(19) United States
(12) Patent Application Publication
(10) Pub. No.: US 2025/0311689 A1
(43) Pub. Date: Oct. 9, 2025

(54) SEEDLING GERMINATION AND GROWTH CONDITIONS

(71) Applicant: PIONEER HI-BRED INTERNATIONAL, INC., JOHNSTON, IA (US)

(72) Inventors: AJITH ANAND, DAVIS, CA (US); PING CHE, AMES, IA (US); WILLIAM JAMES GORDON-KAMM, URBANDALE, IA (US); TODD J JONES, JOHNSTON, IA (US); LARISA A RYAN, ANKENY, IA (US); NAGESH SARDESAI, JOHNSTON, IA (US); NING WANG, JOHNSTON, IA (US); XINLI EMILY WU, JOHNSTON, IA (US)

(73) Assignee: PIONEER HI-BRED INTERNATIONAL, INC., JOHNSTON, IA (US)

(21) Appl. No.: 18/696,217

(22) PCT Filed: Sep. 26, 2022
(86) PCT No.: PCT/US2022/077036

§ 371 Date: Mar. 27, 2024

(51) Int. Cl. A01H 3/04

(52) U.S. Cl. CPC A01H 3/04

(57) ABSTRACT

Methods for pre-treating and transforming monocot leaf explants are provided.

### CROSS-REFERENCE TO RELATED APPLICATIONS

[0001] This application claims priority to International (PCT) Patent Application Serial No. PCT/US22/77036, filed on Sep. 26, 2022, which claims priority to and the benefit of U.S. Provisional Patent Application No. 63/249,191 filed on Sep. 28, 2021, all of which is hereby incorporated herein in its entirety by reference.

### REFERENCE TO SEQUENCE LISTING SUBMITTED ELECTRONICALLY

[0002] The official copy of the sequence listing is submitted electronically via Patent Center as an XML formatted sequence listing with a file named 8529.xml created on Sep. 22, 2022 and having a size of 3,828,345 bytes and is filed concurrently with the specification. The sequence listing comprised in this XML formatted document is part of the specification and is herein incorporated by reference in its entirety.

[0003] The sequence descriptions and sequence listing attached hereto comply with the rules governing nucleotide and amino acid sequence disclosures in patent applications as set forth in 37 C.F.R. §§ 1.831-1.835.

### FIELD OF THE DISCLOSURE

[0004] The present disclosure relates to the field of plant molecular biology, including genetic manipulation of plants. More particularly, the present disclosure pertains to the transformation of monocot leaf explants.

### BACKGROUND OF THE DISCLOSURE

[0005] In recent years, there has been a tremendous expansion of the capabilities for the genetic engineering of plants. Current transformation technology provides an opportunity to produce commercially viable transgenic plants, enabling the creation of new plant varieties containing desirable traits. One limitation of the genetic engineering of plants is the availability of plant tissue explants that are amenable to transformation since many plant tissue explants are recalcitrant to transformation and regeneration. Thus, there is a need for plant transformation methods permitting a broader range of transformable and regenerable plant explant tissues.

### SUMMARY OF THE DISCLOSURE

[0006] The present disclosure comprises methods and compositions for the pre-treatment of seedlings to produce leaf explants that exhibit improved transformation frequencies. In an aspect, a method of pre-treating a seedling with at least one chemical compound, the method comprising contacting the seedling with the at least one chemical compound and isolating leaf explants from the seedling for transformation, wherein the transformation frequency of the leaf explants from the pre-treated seedling is higher than the transformation frequency of leaf explants from seedlings not treated with the at least one chemical compound is provided.

[0007] In another aspect, the at least one chemical compound is an auxin selected from the group consisting of 2,4-D, dicamba, 2,4,5-T, 1-Naphthaleneacetic acid (NAA), picloram, indole-3-acetic acid, 4-chloroindole-3-acetic acid, phenylacetic acid, indole-3-butyric acid, and indole-3-propionic acid.

[0008] In another aspect, the at least one chemical compound is anti-oxidant selected from the group consisting of dithiolthreitol, cysteine, and glutathione.

[0009] In another aspect, the at least one chemical compound is gibberellic acid inhibitors selected from the group consisting of ancymidol, paclobutrazol, uniconazole, chlormequat chloride, mepiquat, AMO-1618 [(2′-isopropyl-4′-(trimethylammoniumchloride)-5′-methylphenylpiperidinecarboxylate)], clorphonium-Cl, tetcylacis, flurprimidol, inabenfide, pro-hexadione, trinexapac-ethyl, daminozide, exo-16,17-acetate, malic hydrazide, phoshor D, alar, chlorocholine chloride, cycocel, the fungicides tebuconazole and metconazole, trinexapac-ethyl, prohexadione-calcium, and exo-16,17-dihydro-GA5-13-acetate. In a further aspect, the gibberellic acid inhibitor is ancymidol. In yet a further aspect, the seedling is contacted with ancymidol at a concentration of about 1 mg/l to about 2 mg/l.

[0010] In still another aspect, the at least one chemical compound is an inhibitor of abscisic acid biosynthesis selected from the group consisting of norflurazon, fluridone, diflufenican, abamine, and nordihydroguaiaretic acid (NDGA).

[0011] In another aspect, the at least one chemical compound is an abscisic acid antagonist selected from the group consisting of AA1 [1-[(4-benzylpiperazin-1-yl)methyl]-2-sulfanylidene-1H,2H,5H,6H,7H,8H-[1,3,4]thiadiazolo[3,2-a][1,3]diazepin-5-one], AS6 [3′-hexylsulfanyl-ABA], DFPM ([5-(3,4-Dichlorophenyl) furan-2-yl]-piperidin-1-ylmethanethione), and RK460.

[0012] In another aspect, the at least one chemical compound is the abscisic acid agonist, pyrabactin.

[0013] In another aspect, the at least one chemical compound is a cytokinin selected from the group consisting of BAP [6-benylamino purine], BA [benzyladenine], kinetin, TDZ [thidiazuron], and trans-zeatin.

[0014] In another aspect, the at least one chemical compound is an anti-cytokinin selected from the group consisting of S-4893 [a 4-phenylquinazoline derivative], 4-phenylquinazoline, 6-(2,5-Dihydroxybenzylamino) purine (LGR-991), and 2-hydroxy-3-methyl-benzyladenine.

[0015] In another aspect, the at least one chemical compound is the cyclin-dependent kinase (CDK) inhibitor, caffeine.

[0016] In another aspect, the at least one chemical compound is an auxin agonist selected from the group consisting of quinclorac, RubNeddins1 (RN1), RubNeddins2 (RN2), RubNeddins3 (RN3), and RubNeddins4 (RN4).

[0017] In another aspect, the at least one chemical compound is an auxin antagonist selected from the group consisting of p-Chlorophenoxy isobutylic (PCIB), tert-butoxycarbonylaminohexyl-IAA (BH-Indole Acetic Acid=BH-IAA), α-(phenylethyl-2-oxo)-IAA (PEO-IAA), and α-(2,4-dimethylphenylethyl-2-oxo)-IAA (auxinole).

[0018] In another aspect, the at least one chemical compound is a methylation inhibitor selected from the group consisting of 5-azacytidine, Decitabine, RG108 [N-Phthalyl-L-tryptophan], zebularine, thioguanine, 2′-deoxy-5-fluoreocytidine, CM-272 (6-methoxy-2-(5-methyl-2-furyl)-N-(1-methyl-4-piperidyl)-7-(3-pyrrolidin-1-ylpropoxy) quinolin-4-amine), CM-579 (6-methoxy-2-(5-methyl-2-furyl)-N-[(1-methyl-4-piperidyl)methyl]-7-(3-pyrrolidin-1-ylpropoxy) quinolin-4-amine), SGI-1027 [N-[4-[(2-Amino-6-methyl-4-pyrimidinyl)amino]phenyl]-4-(4-quinolinylamino)benzamide], gamma-oryzanol, and (−)-epigallocatechin gallate (ECGC), β-Thujaplicin, and procainamide.

[0019] In another aspect, the at least one chemical compound is a histone deacetylase (HDAC) inhibitor selected from the group consisting of valproic acid, tacedinaline, cambinol, trichostain A (TSA), verinostat, panobinostat, belinostat, RGFP-966 [(E)-N-(2-amino-4-fluorophenyl)-3-(1-cinnamyl-1H-pyrazol-4-yl) acrylamide], tubastatin A, and PCI-34051 [N-Hydroxy-1-[(4-methoxyphenyl)methyl]-1H-indole-6-carboxamide].

[0020] In another aspect, the at least one chemical compound is a sugar composition selected from the group consisting of sucrose and maltose.

[0021] In another aspect, the at least one chemical compound is a composition comprising a metal selected from the group consisting of copper, zinc, and manganese.

[0022] In another aspect, the at least one chemical compound is an amino acid selected from the group consisting of proline, asparagine, methionine, and glutamine.

[0023] In another aspect, the at least one chemical compound is an ethylene inhibitor selected from the group consisting of silver nitrate, 2-aminoethoxyvinyl glycine (AVG), silver ions (Ag), and 1-methylcyclopropene (1-MCP).

[0024] In another aspect, the at least one chemical compound is the ethylene competitive inhibitor, norbornadiene.

[0025] In another aspect, the at least one chemical compound is a polycomb repressive complex 2 (PRC2) inhibitor selected from the group consisting of EPZ005687 [1-cyclopentyl-N-[(4,6-dimethyl-2-oxo-1H-pyridin-3-yl)methyl]-6-[4-(morpholin-4-ylmethyl)phenyl]indazole-4-carboxamide], UNC1999 [N-[(6-methyl-2-oxo-4-propyl-1H-pyridin-3-yl)methyl]-1-propan-2-yl-6-[6-(4-propan-2-ylpiperazin-1-yl) pyridin-3-yl]indazole-4-carboxamide], PF-06726304 [C₂₂H₂₁C₁₂N₃O₃], Lirametostat, Tazemetostat, EPZ011989 (C₃₅H₅₁N₅O₄·HCl), CPI-169 (C₂₇H₃₆N₄O₅S), and JQ-EZ-05 (C₃₀H₃₈N₈O₂).

[0026] In another aspect, the at least one chemical compound is a Jasmonate, selected from the group consisting of Jasmonic acid and Methyl-jasmonate.

[0027] In another aspect, the at least one chemical compound is a safener selected from the group consisting of naphthalic anhydride, salicylic acid, fenchlorazole, cloquintocet-mexyl, and mefenpyr diethyl.

[0028] In another aspect, the at least one chemical compound is a kinase inhibitor selected from the group consisting of N-[(2R)-2,3 dihydroxypropoxy]-3,4-difluoro-2-(2-fluoro-4-iodoanilino) benzamide, anthra (1,9-cd) pyrazol-6 (2H)-one:4-(4-Fluoro phenyl)-2-(4-methylsulfinylphenyl)-5-(4-pyridyl) 1H imidazole, and N-benzyl-2-(pyrimidin-4-ylamino)-1,3 thiazole-4-carboxamide.

[0029] In another aspect, the at least one chemical compound is a reactive oxygen species (ROS) scavenger selected from the group consisting of Tiron, dimethylthiourea (DMTU), and diphenyleneiodonium (DPI).

[0030] In a further aspect, the at least one chemical compound is 2,4-D, dicamba, 2,4,5-T, NAA, picloram, indole-3-acetic acid, 4-chloroindole-3-acetic acid, phenylacetic acid, indole-3-butyric acid, indole-3-propionic acid, dithiolthreitol (DTT), cysteine, glutathione, ancymidol, paclobutrazol, uniconazole, chlormequat chloride, mepiquat, AMO-1618 [(2′-isopropyl-4′-(trimethylammoniumchloride)-5′-methylphenylpiperidinecarboxylate)], clorphonium-Cl, tetcylacis, flurprimidol, inabenfide, pro-hexadione, trinexapac-ethyl, daminozide, exo-16,17-acetate, malic hydrazide, phoshor D, alar, chlorocholine chloride, cycocel, the fungicides tebuconazole and metconazole, trinexapac-ethyl, prohexadione-calcium, exo-16,17-dihydro-GA5-13-acetate, norflurazon, fluridone, diflufenican, abamine, nordihydroguaiaretic acid (NDGA), AA1 [1-[(4-benzylpiperazin-1-yl)methyl]-2-sulfanylidene-1H,2H,5H,6H,7H,8H-[1,3,4]thiadiazolo[3,2-a][1,3]diazepin-5-one], AS6 [3′-hexylsulfanyl-ABA], DFPM ([5-(3,4-Dichlorophenyl) furan-2-yl]-piperidin-1-ylmethanethione), RK460, pyrabactin, BAP [6-benylamino purine], BA [benzyladenine], kinetin, TDZ [thidiazuron], trans-zeatin, S-4893 [a 4-phenylquinazoline derivative], 4-phenylquinazoline, 6-(2,5-Dihydroxybenzylamino) purine (LGR-991), 2-hydroxy-3-Methyl-benzyladenine, caffeine, quinclorac, RubNeddins1 (RN1), RubNeddins2 (RN2), RubNeddins3 (RN3), RubNeddins4 (RN4), p-Chlorophenoxy isobutylic (PCIB), tert-butoxycarbonylaminohexyl-IAA (BH-Indole Acetic Acid=BH-IAA), α-(phenylethyl-2-oxo)-IAA (PEO-IAA), α-(2,4-dimethylphenylethyl-2-oxo)-IAA (auxinole), 5-azacytidine, Decitabine, RG108 [N-Phthalyl-L-tryptophan], zebularine, thioguanine, 2′-deoxy-5-fluoreocytidine, CM-272 (6-methoxy-2-(5-methyl-2-furyl)-N-(1-methyl-4-piperidyl)-7-(3-pyrrolidin-1-ylpropoxy) quinolin-4-amine), CM-579 (6-methoxy-2-(5-methyl-2-furyl)-N-[(1-methyl-4-piperidyl)methyl]-7-(3-pyrrolidin-1-ylpropoxy) quinolin-4-amine), SGI-1027 [N-[4-[(2-Amino-6-methyl-4-pyrimidinyl)amino]phenyl]-4-(4-quinolinylamino)benzamide], gamma-oryzanol, and (−)-epigallocatechin gallate (ECGC), β-Thujaplicin, procainamide, valproic acid, tacedinaline, cambinol, trichostain A (TSA), verinostat, panobinostat, belinostat, RGFP-966 [(E)-N-(2-amino-4-fluorophenyl)-3-(1-cinnamyl-1H-pyrazol-4-yl) acrylamide], tubastatin A, PCI-34051 [N-Hydroxy-1-[(4-methoxyphenyl)methyl]-1H-indole-6-carboxamide], sucrose, maltose, copper, zinc, manganese, proline, asparagine, methionine, glutamine, silver nitrate, 2-aminoethoxyvinyl glycine (AVG), silver ions (Ag), 1-methylcyclopropene (1-MCP), norbornadiene, EPZ005687 [1-cyclopentyl-N-[(4,6-dimethyl-2-oxo-1H-pyridin-3-yl)methyl]-6-[4-(morpholin-4-ylmethyl)phenyl]indazole-4-carboxamide], UNC1999 [N-[(6-methyl-2-oxo-4-propyl-1H-pyridin-3-yl)methyl]-1-propan-2-yl-6-[6-(4-propan-2-ylpiperazin-1-yl) pyridin-3-yl]indazole-4-carboxamide], PF-06726304 [C₂₂H₂₁Cl₂N₃O₃], Lirametostat, Tazemetostat, EPZ011989 (C₃₅H₅₁N₅O₄·HCl), CPI-169 (C₂₇H₃₆N₄O₅S), JQ-EZ-05 (C₃₀H₃₈N₈O₂), Jasmonic acid, Methyl-jasmonate, naphthalic anhydride, salicylic acid, fenchlorazole, cloquintocet-mexyl, mefenpyr diethyl, N-[(2R)-2,3 dihydroxypropoxy]-3,4-difluoro-2-(2-fluoro-4-iodoanilino) benzamide, anthra (1,9-cd) pyrazol-6 (2H)-one:4 (4-Fluoro phenyl)-2-(4-methylsulfinylphenyl)-5-(4-pyridyl) 1H imidazole, N-benzyl-2-(pyrimidin-4-ylamino)-1,3 thiazole-4-carboxamide, Tiron, dimethylthiourea (DMTU), diphenyleneiodonium (DPI), or any combinations thereof.

[0031] In another aspect, the pre-treated seedling is a monocot seedling.

[0032] In another aspect, a method of pre-treating a seedling, comprising exposing the seedling to an increased spectrum of light, an increased heat treatment, or a cold-shock treatment, and isolating leaf explants from the exposed seedling for transformation, wherein the transformation frequency of the leaf explants from the pre-treated seedling is higher than the transformation frequency of leaf explants from an unexposed seedling is provided. In a further aspect, the heat treatment is 45° C. for 3 hours at 70% relative humidity. In another aspect, the heat treatment is 37° C. for 17 hours at 50% relative humidity. In another aspect, the pre-treated seedling is a monocot seedling.

[0033] In another aspect, a method of pre-treating a seedling with at least one chemical compound, the method comprising contacting the seedling with the at least one chemical compound, wherein the seedling is further contacted with a non-chemical pre-treatment comprising exposing the seedling to an increased spectrum of light, an increased heat treatment, or a cold-shock treatment, and isolating leaf explants from the pre-treated seedling for transformation, wherein the transformation frequency of the leaf explants from the pre-treated seedling is higher than the transformation frequency of leaf explants from an unexposed seedling is provided. In a further aspect, the pre-treatment of a seedling with the at least one chemical compound and the non-chemical pre-treatment occur simultaneously or sequentially.

### DETAILED DESCRIPTION

[0034] The disclosures herein will be described more fully hereinafter, in which some, but not all possible aspects are shown. Indeed, disclosures may be embodied in many different forms and should not be construed as limited to the aspects set forth herein; rather, these aspects are provided so that this disclosure will satisfy applicable legal requirements.

[0035] Many modifications and other aspects disclosed herein will come to mind to one skilled in the art to which the disclosed methods pertain having the benefit of the teachings presented in the following descriptions. Therefore, it is to be understood that the disclosures are not to be limited to the specific aspects disclosed and that modifications and other aspects are intended to be included within the scope of the appended claims. Although specific terms are employed herein, they are used in a generic and descriptive sense only and not for purposes of limitation.

[0036] It is also to be understood that the terminology used herein is for the purpose of describing particular aspects only and is not intended to be limiting. As used in the specification and in the claims, the term “comprising” can include the aspect of “consisting of.” Unless defined otherwise, all technical and scientific terms used herein have the same meaning as commonly understood by one of ordinary skill in the art to which the disclosed compositions and methods belong. In this specification and in the claims which follow, reference will be made to a number of terms which shall be defined herein.

[0037] As used herein, “contacting”, “contact”, “contacted”, “comes in contact with” or “in contact with” means “direct contact” or “indirect contact”. For example, cells are placed in a condition where the cells can come into contact with an expression cassette, a nucleotide, a peptide, a RNP (ribonucleoprotein), or other substance disclosed herein. Such expression cassette, nucleotide, peptide, or other substance is allowed to be present in an environment where the cells survive (for example, medium or expressed in the cell or expressed in an adjacent cell) and can act on the cells. For example, medium comprising a selection agent may have direct contact with a cell or the medium comprising the selection agent may be separated from the cell by filter paper, plant tissues, or other cells thus, the selection agent is transferred through the filter paper, plant tissues, or other cells to the cell. The expression cassettes, nucleotides, peptides, and other substances disclosed herein may be contacted with a cell by T-DNA transfer, particle bombardment, electroporation, PEG transfection, or RNP (ribonucleoprotein) delivery.

[0038] As used herein, a “somatic embryo” is a multicellular structure that progresses through developmental stages that are similar to the development of a zygotic embryo, including formation of globular and transition-stage embryos, formation of an embryo axis and a scutellum, and accumulation of lipids and starch. Single somatic embryos derived from a zygotic embryo germinate to produce single non-chimeric plants, which may originally derive from a single cell.

[0039] As used herein, an “embryogenic callus” or “callus” is a friable or non-friable mixture of undifferentiated or partially undifferentiated cells which subtend proliferating primary and secondary somatic embryos capable of regenerating into mature fertile plants.

[0040] As used herein, “germination” is the growth of a regenerable structure, such as a somatic embryo, to form a plantlet which continues growing to produce a plant.

[0041] As used herein, a “transgenic plant” is a mature, fertile plant that contains a transgene.

[0042] The methods of the disclosure can be used to transform leaf explants. As used herein, “leaf explants” include but are not limited to radical leaves, cauline leaves, alternate leaves, opposite leaves, decussate leaves, opposite superposed leaves, whorled leaves, petiolate leaves, sessile leaves, subsessile leaves, stipulate leaves, exstipulate leaves, simple leaves, or compound leaves. Leaf explants include buds, including but not limited to lateral buds, leaf primordia, the leaf sheath, leaf base or the portion of the leaf immediately proximal to its attachment point to the petiole or stem. Such vegetative organs and their composite tissues can be used for transformation with nucleotide sequences encoding agronomically important traits. In this context, the leaf primordia contained within a mature maize seed are transformable explants.

[0043] As used herein, a “leaf” is a flat lateral structure that protrudes from a plant's stem, including the supporting stalk between the flattened leaf and the plant stem, but not including the axillary meristem located at the junction of the petiole and stem, including but not limited to a radical leaf, a cauline leaf, an alternate leaf, and opposite leaf, a decussate leaf, an opposite superposed leaf, a whorled leaf, a petiolate leaf, a sessile leaf, a subsessile leaf, a stipulate leaf, an exstipulate leaf, a simple leaf, or a compound leaf. Once an axillary meristem is de-repressed and stimulated to begin growing, new leaf primordia and developing leaves result around it's expanding periphery and become transformable explants. In this manner, in vitro shoot proliferation can be useful to mass-produce transformable explants through hormonally-manipulated multiple shoot proliferation.

[0044] As used herein, the term “morphogenic gene” means a gene that when ectopically expressed stimulates formation of a somatically-derived structure that can produce a plant. More precisely, ectopic expression, or mutation, or silencing, or decreased expression of the morphogenic gene stimulates the de novo formation of a somatic embryo or an organogenic structure, such as a shoot meristem or an axillary meristem, that can produce a plant or stimulates regeneration of a plant. This stimulated de novo formation occurs either in the cell in which the morphogenic gene is expressed, or silenced, or repressed, or in a neighboring cell. A morphogenic gene can be a transcription factor that regulates expression of other genes, or a gene that influences hormone levels in a plant tissue, both of which can stimulate morphogenic changes. To enhance the growth rate of somatic embryos, genes that stimulate growth rates (i.e. cell division) such as GRF/GIF genes, cyclins, CDKs, or RepA, can be used. A morphogenic gene may be stably incorporated into the genome of a plant or it may be transiently expressed. In an aspect, expression of the morphogenic gene is controlled. The expression can be controlled transcriptionally or post-transcriptionally. The controlled expression may also be a pulsed expression of the morphogenic gene for a particular period of time. Alternatively, the morphogenic gene may be expressed in only some transformed cells and not expressed in others. The control of expression of the morphogenic gene can be achieved by a variety of methods as disclosed herein below. The morphogenic genes useful in the methods of the present disclosure may be obtained from or derived from any plant species.

[0045] As used herein, the term “morphogenic factor” means a morphogenic gene and/or the protein expressed by a morphogenic gene.

[0046] A morphogenic gene is involved in plant metabolism, organ development, stem cell development, cell growth stimulation, organogenesis, regeneration, somatic embryogenesis initiation, accelerated somatic embryo maturation, initiation and/or development of the apical meristem, initiation and/or development of shoot meristem or axillary meristem, initiation and/or development of shoots, or a combination thereof, such as WUS/WOX genes (WUS, WUS1, WUS2, WUS3, WOX2A, WOX4, WOX5, or WOX9) see U.S. Pat. Nos. 7,348,468 and 7,256,322 and United States Patent Application publications 20170121722 and 20070271628; Laux et al. (1996) Development 122:87-96; and Mayer et al. (1998) Cell 95:805-815; van der Graaff et al., 2009, Genome Biology 10:248; Dolzblasz et al., 2016, Mol. Plant 19:1028-39 are useful in the methods of the disclosure. Modulation of WUS/WOX is expected to modulate plant and/or plant tissue phenotype including plant metabolism, organ development, stem cell development, cell growth stimulation, organogenesis, regeneration, somatic embryogenesis initiation, accelerated somatic embryo maturation, initiation and/or development of the apical meristem, initiation and/or development of shoot meristem, initiation and/or development of shoots, or a combination thereof. Expression of Arabidopsis WUS can induce stem cells in vegetative tissues, which can differentiate into somatic embryos (Zuo, et al. (2002) Plant J 30:349-359). Also of interest in this regard would be a MYB118 gene (see U.S. Pat. No. 7,148,402), MYB115 gene (see Wang et al. (2008) Cell Research 224-235), a BABYBOOM gene (BBM; see Boutilier et al. (2002) Plant Cell 14:1737-1749), a CLAVATA gene (see, for example, U.S. Pat. No. 7,179,963), an Enhancer of Shoot Regeneration 1 (ESR1) gene (see Banno et al. (2001), The Plant Cell, Vol. 13:2609-2618), a Corngrass1 (Cg1) gene (see Chuck et al. (2007) Nature Genetics, Vol. 39(4):544-549), a Cup-Shaped Cotyledon (CUC) gene (see Hibara et al. (2006) The Plant Cell, Vol. 18:2946-2957), a REVOLUTA (REV) gene (see Otsuga et al. (2001) The Plant Journal 25(2):223-236), a More Axillary Growth 1 (MAX1) gene (see Stirnberg et al. (2002) Development 129:1131-1141), a SUPERSHOOT (SPS) gene (see Tanikanjana, et al. (2001) Genes & Development 15:1577-1588), a Lateral Suppressor (LAS) gene (see Greb et al. (2003) Genes & Development 17:1175-1187), a More Axillary Growth4 (MAX4) gene (see Sorefan et al. (2003) Genes & Development 17:1469-1474), a Stem Cell-Inducing Factor 1 (STEMIN1) gene (see Ishikawa et al. (2019) Nature Plants 5:681-690), a Growth-Regulating Factor 4 (GRF4) gene and/or a GRF-Interacting Factor 1 (GIF1) gene (see Debernardi et al. bioRxiv 2020.08.23.263905; doi:https://doi.org/10.1101/2020.08.23.263905), and a Growth-Regulating Factor 5 (GRF5) gene (see Kong et al. bioRxiv 2020.08.23.263947; doi:https://doi.org/10.1101/2020.08.23.263947).

[0047] Morphogenic polynucleotide sequences and amino acid sequences of functional WUS/WOX polypeptides are useful in the disclosed methods. As defined herein, a “functional WUS/WOX nucleotide” is any polynucleotide encoding a protein that contains a homeobox DNA binding domain, a WUS box, and an EAR repressor domain (Ikeda et al., 2009 Plant Cell 21:3493-3505). As demonstrated by Rodriguez et al., 2016 PNAS www.pnas.org/cgi/doi/10.1073/pnas.1607673113 removal of the dimerization sequence which leaves behind the homeobox DNA binding domain, a WUS box, and an EAR repressor domain results in a functional WUS/WOX polypeptide. The Wuschel protein, designated hereafter as WUS, plays a key role in the initiation and maintenance of the apical meristem, which contains a pool of pluripotent stem cells (Endrizzi, et al., (1996) Plant Journal 10:967-979; Laux, et al., (1996) Development 122:87-96; and Mayer, et al., (1998) Cell 95:805-815). Arabidopsis plants mutant for the WUS gene contain stem cells that are misspecified and that appear to undergo differentiation. WUS encodes a novel homeodomain protein which presumably functions as a transcriptional regulator (Mayer, et al., (1998) Cell 95:805-815). The stem cell population of Arabidopsis shoot meristems is believed to be maintained by a regulatory loop between the CLAVATA (CLV) genes which promote organ initiation and the WUS gene which is required for stem cell identity, with the CLV genes repressing WUS at the transcript level, and WUS expression being sufficient to induce meristem cell identity and the expression of the stem cell marker CLV3 (Brand, et al., (2000) Science 289:617-619; Schoof, et al., (2000) Cell 100:635-644). Constitutive expression of WUS in Arabidopsis has been shown to lead to adventitious shoot proliferation from leaves (in planta) (Laux, T., Talk Presented at the XVI International Botanical Congress Meeting, Aug. 1-7, 1999, St. Louis, Mo.).

[0048] In an aspect, the functional WUS/WOX polypeptides useful in the methods of the present disclosure is a WUS, WUS1, WUS2, WUS3, WOX2A, WOX4, WOX5, WOX5A, or WOX9 polypeptide (see, U.S. Pat. Nos. 7,348,468 and 7,256,322 and US Patent Application Publication Numbers 2017/0121722 and 2007/0271628, herein incorporated by reference in their entirety and van der Graaff et al., 2009, Genome Biology 10:248). The functional WUS/WOX polypeptides useful in the methods of the present disclosure can be obtained from or derived from any plant including but not limited to monocots, dicots, Angiospermae, and Gymnospermae. Additional functional WUS/WOX sequences useful in the methods of the present disclosure are listed in Table 2.

[0049] Other morphogenic genes useful in the present disclosure include, but are not limited to, LEC1 (U.S. Pat. No. 6,825,397 incorporated herein by reference in its entirety, Lotan et al., 1998, Cell 93:1195-1205), LEC2 (Stone et al., 2008, PNAS 105:3151-3156; Belide et al., 2013, Plant Cell Tiss. Organ Cult 113:543-553), KN1/STM (Sinha et al., 1993. Genes Dev 7:787-795), the IPT gene from Agrobacterium (Ebinuma and Komamine, 2001, In vitro Cell. Dev Biol-Plant 37:103-113), MONOPTEROS-DELTA (Ckurshumova et al., 2014, New Phytol. 204:556-566), the Agrobacterium AV-6b gene (Wabiko and Minemura 1996, Plant Physiol. 112:939-951), the combination of the Agrobacterium IAA-h and IAA-m genes (Endo et al., 2002, Plant Cell Rep., 20:923-928), the Arabidopsis SERK gene (Hecht et al., 2001, Plant Physiol. 127:803-816), the Arabidopsis AGL15 gene (Harding et al., 2003, Plant Physiol. 133:653-663), the FUSCA gene (Castle and Meinke, Plant Cell 6:25-41), and the PICKLE gene (Ogas et al., 1999, PNAS 96:13839-13844).

[0050] As used herein, the term “transcription factor” means a protein that controls the rate of transcription of specific genes by binding to the DNA sequence of the promoter and either up-regulating or down-regulating expression. Examples of transcription factors that are also morphogenic genes, include members of the AP2/EREBP family (including BBM (ODP2)), plethora and aintegumenta sub-families, CAAT-box binding proteins such as LEC1 and HAP3, and members of the MYB, bHLH, NAC, MADS, bZIP and WRKY families.

[0051] Morphogenic polynucleotide sequences and amino acid sequences of Ovule Development Protein 2 (ODP2) polypeptides, and related polypeptides, e.g., Babyboom (BBM) protein family proteins are useful in the methods of the disclosure. In an aspect, a polypeptide comprising two AP2-DNA binding domains is an ODP2, BBM2, BMN2, or BMN3 polypeptide see, US Patent Application Publication Number 2017/0121722, herein incorporated by reference in its entirety. ODP2 polypeptides useful in the methods of the disclosure contain two predicted APETALA2 (AP2) domains and are members of the AP2 protein family (PFAM Accession PF00847). The AP2 family of putative transcription factors has been shown to regulate a wide range of developmental processes, and the family members are characterized by the presence of an AP2 DNA binding domain. This conserved core is predicted to form an amphipathic alpha helix that binds DNA. The AP2 domain was first identified in APETALA2, an Arabidopsis protein that regulates meristem identity, floral organ specification, seed coat development, and floral homeotic gene expression. The AP2 domain has now been found in a variety of proteins.

[0052] ODP2 polypeptides useful in the methods of the disclosure share homology with several polypeptides within the AP2 family, e.g., see FIG. 1 of U.S. Pat. No. 8,420,893, which is incorporated herein by reference in its entirety, and provides an alignment of the maize and rice ODP2 polypeptides with eight other proteins having two AP2 domains. A consensus sequence of all proteins appearing in the alignment of U.S. Pat. No. 8,420,893 is also provided in FIG. 1 therein. The polypeptide comprising the two AP2-DNA binding domains useful in the methods of the disclosure can be obtained from or derived from any of the plants described herein. In an aspect, the polypeptide comprising the two AP2-DNA binding domains useful in the methods of the disclosure is an ODP2 polypeptide. In an aspect, the polypeptide comprising the two AP2-DNA binding domains useful in the methods of the disclosure is a BBM2 polypeptide. The ODP2 polypeptide and the BBM2 polypeptide useful in the methods of the disclosure can be obtained from or derived from any plant including but not limited to monocots, dicots, Angiospermae, and Gymnospermae. Additional Ovule Development Protein 2 (ODP2) sequences and Babyboom (BBM) (BBM, BBM1, BBM2, BBM3, BMN2, and BMN3) sequences useful in the methods of the present disclosure are listed in Table 2.

[0053] As used herein, the term “expression cassette” means a distinct component of vector DNA consisting of coding and non-coding sequences including 5′ and 3′ regulatory sequences that control expression in a transformed/transfected cell.

[0054] As used herein, the term “coding sequence” means the portion of DNA sequence bounded by a start and a stop codon that encodes the amino acids of a protein.

[0055] As used herein, the term “non-coding sequence” means the portions of a DNA sequence that are transcribed to produce a messenger RNA, but that do not encode the amino acids of a protein, such as 5′ untranslated regions, introns and 3′ untranslated regions. Non-coding sequence can also refer to RNA molecules such as micro-RNAs, interfering RNA or RNA hairpins, that when expressed can down-regulate expression of an endogenous gene or another transgene.

[0056] As used herein, the term “regulatory sequence” means a segment of a nucleic acid molecule which is capable of increasing or decreasing the expression of a gene. Regulatory sequences include promoters, terminators, enhancer elements, silencing elements, 5′ UTR and 3′ UTR (untranslated regions).

[0057] As used herein, the term “UBI” or “UBI1” or “UBI PRO” or “UBI1 PRO” or “ZM-UBI PRO” or “ZM-UBI1 PRO” or “ZM-UBI1 PRO Complete” (SEQ ID NO: 339) is made up of the UBI1ZM PRO sequence (SEQ ID NO: 333) and the UBI1ZM 5UTR (SEQ ID NO: 334) and the UBI1ZM INTRON1 (SEQ ID NO: 335).

[0058] As used herein, the term “3×ENH” (SEQ ID NO: 340) is made up of the FMV ENH (SEQ ID NO: 336) and the PCSV ENH (SEQ ID NO: 337) and the MMV ENH (SEQ ID NO: 338).

[0059] As used herein, the term “transfer cassette” means a T-DNA comprising an expression cassette or expression cassettes flanked by the right border and the left border.

[0060] As used herein, “T-DNA” means a portion of a Ti plasmid that is inserted into the genome of a host plant cell.

[0061] As used herein, the term “selectable marker” means a transgene that when expressed in a transformed/transfected cell confers resistance to selective agents such as antibiotics, herbicides and other compounds toxic to an untransformed/untransfected cell.

[0062] As used herein, the term “EAR” means an Ethylene-responsive element binding factor-associated Amphiphilic Repression motif having general consensus sequences that act as transcriptional repression signals within transcription factors. Addition of an EAR-type repressor element to a DNA-binding protein such as a transcription factor, dCAS, or LEXA (as examples) confers transcriptional repression function to the fusion protein (Kagale, S., and Rozwadowski, K. 2010. Plant Signaling and Behavior 5:691-694).

[0063] As used herein, the term “activation domain” means the portion of a transcription factor protein that specifically confers transcriptional activation when it is brought in proximity of promoter elements such as the TATA box and Transcription Start Site (TTS). Addition of an activation domain such as the CBF1A activation domain to an endogenous DNA binding peptide, dCAS, or LEXA (as examples), positioning the activation domain near the TATA/TSS region of an endogenous genes can activate transcription (for example, Cheng et al., 2013, Cell Res 23:1163-1171; Hummel et al., US20200332307A1)

[0064] In an aspect, the methods of the disclosure comprise contacting a monocot leaf explant with a recombinant expression cassette or construct comprising a nucleotide sequence encoding a functional WUS/WOX polypeptide, or a nucleotide sequence encoding a Babyboom (BBM) polypeptide or an Ovule Development Protein 2 (ODP2) polypeptide, or a combination of a nucleotide sequence encoding a functional WUS/WOX polypeptide and a nucleotide sequence encoding a Babyboom (BBM) polypeptide or an Ovule Development Protein 2 (ODP2) polypeptide to produce a transgenic monocot plant comprising a heterologous polynucleotide.

[0065] In an aspect, a nucleotide sequence encoding a functional WUS/WOX polypeptide, or a nucleotide sequence encoding a Babyboom (BBM) polypeptide or an Ovule Development Protein 2 (ODP2) polypeptide, or the combination of a nucleotide sequence encoding a functional WUS/WOX polypeptide and a nucleotide sequence encoding a Babyboom (BBM) polypeptide or an Ovule Development Protein 2 (ODP2) polypeptide can be targeted for excision by a site-specific recombinase. Thus, the expression of the nucleotide sequence encoding the functional WUS/WOX polypeptide, or the nucleotide sequence encoding a Babyboom (BBM) polypeptide or an Ovule Development Protein 2 (ODP2) polypeptide, or the combination of a nucleotide sequence encoding a functional WUS/WOX polypeptide and a nucleotide sequence encoding a Babyboom (BBM) polypeptide or an Ovule Development Protein 2 (ODP2) polypeptide can be controlled by excision at a desired time post-transformation. It is understood that when a site-specific recombinase is used to control the expression of the nucleotide sequence encoding the functional WUS/WOX polypeptide, or the nucleotide sequence encoding a Babyboom (BBM) polypeptide or an Ovule Development Protein 2 (ODP2) polypeptide, or the combination of a nucleotide sequence encoding a functional WUS/WOX polypeptide and a nucleotide sequence encoding a Babyboom (BBM) polypeptide or an Ovule Development Protein 2 (ODP2) polypeptide, the expression construct comprises appropriate site-specific excision sites flanking the polynucleotide sequences to be excised, e.g., Cre lox sites if Cre recombinase is utilized. It is not necessary that the site-specific recombinase be co-located on the expression construct comprising the nucleotide sequence encoding the functional WUS/WOX polypeptide, or the nucleotide sequence encoding a Babyboom (BBM) polypeptide or an Ovule Development Protein 2 (ODP2) polypeptide, or the combination of a nucleotide sequence encoding a functional WUS/WOX polypeptide and a nucleotide sequence encoding a Babyboom (BBM) polypeptide or an Ovule Development Protein 2 (ODP2) polypeptide. However, in an aspect, the morphogenic gene expression cassette further comprises a nucleotide sequence encoding a site-specific recombinase.

[0066] The site-specific recombinase used to control expression of the nucleotide sequence encoding the functional WUS/WOX polypeptide, or the nucleotide sequence encoding a Babyboom (BBM) polypeptide or an Ovule Development Protein 2 (ODP2) polypeptide, or the combination of a nucleotide sequence encoding a functional WUS/WOX polypeptide and a nucleotide sequence encoding a Babyboom (BBM) polypeptide or an Ovule Development Protein 2 (ODP2) polypeptide can be chosen from a variety of suitable site-specific recombinases. For example, in various aspects, the site-specific recombinase is FLP, FLPe, KD, Cre, SSV1, lambda Int, phi C31 Int, HK022, R, B2 (Nern et al., (2011) PNAS Vol. 108, No. 34 pp 14198-14203), B3 (Nern et al., (2011) PNAS Vol. 108, No. 34 pp 14198-14203), Gin, Tn1721, CinH, ParA, Tn5053, Bxb1, TP907-1, or U153. The site-specific recombinase can be a destabilized fusion polypeptide. The destabilized fusion polypeptide can be TETR(G17A)˜CRE or ESR(G17A)˜CRE.

[0067] In an aspect, the nucleotide sequence encoding a site-specific recombinase is operably linked to a constitutive promoter, an inducible promoter, a tissue-specific promoter, or a developmentally-regulated promoter. Suitable constitutive promoters, inducible promoters, tissue-specific promoters, and developmentally-regulated promoters include UBI, LLDAV, EVCV, DMMV, BSV(AY) PRO, CYMV PRO FL, UBIZM PRO, SI-UB3 PRO, SB-UBI PRO (ALT1), USB1ZM PRO, ZM-GOS2 PRO, ZM-H1B PRO (1.2 KB), IN2-2, NOS, the −135 version of 35S, ZM-ADF PRO (ALT2), AXIG1, DR5, XVE, GLB1, OLE, LTP2 (Kalla et al., 1994. Plant J. 6:849-860 and U.S. Pat. No. 5,525,716 incorporated herein by reference in its entirety), HSP17.7, HSP26, HSP18A, AT-HSP811, AT-HSP811L, GM-HSP173B, promoters activated by tetracycline, ethametsulfuron or chlorsulfuron, PLTP, PLTP1, PLTP2, PLTP3, SDR, LGL, LEA-14A, or LEA-D34 (United States Patent Application publications 20170121722 and 20180371480 incorporated herein by reference in their entireties).

[0068] In an aspect, the chemically inducible promoter operably linked to the site-specific recombinase is XVE (Zuo et al. (2002) The Plant Journal 30(3):349-359). The chemically-inducible promoter can be repressed by the tetracycline repressor (TETR), the ethametsulfuron repressor (ESR), or the chlorsulfuron repressor (CR), and de-repression occurs upon addition of tetracycline-related or sulfonylurea ligands. The repressor can be TETR and the tetracycline-related ligand is doxycycline or anhydrotetracycline. (Gatz, C., Frohberg, C. and Wendenburg, R. (1992) Stringent repression and homogeneous de-repression by tetracycline of a modified CaMV 35S promoter in intact transgenic tobacco plants, Plant J. 2, 397-404). Alternatively, the repressor can be ESR and the sulfonylurea ligand is ethametsulfuron, chlorsulfuron, metsulfuron-methyl, sulfometuron methyl, chlorimuron ethyl, nicosulfuron, primisulfuron, tribenuron, sulfosulfuron, trifloxysulfuron, foramsulfuron, iodosulfuron, prosulfuron, thifensulfuron, rimsulfuron, mesosulfuron, or halosulfuron (US20110287936 incorporated herein by reference in its entirety). An alternative method for inducible expression is use of the glucocorticoid system in which an encoded glucocorticoid repressor (Ouwerkerk et al. (2001) Planta 213:370-378) is fused to an encoded gene of interest (e.g., a morphogenic protein such as WUS2 or ODP2 protein).

[0069] In an aspect, when the morphogenic gene expression cassette or construct comprises site-specific recombinase excision sites, the nucleotide sequence encoding the functional WUS/WOX polypeptide, or the nucleotide sequence encoding a Babyboom (BBM) polypeptide or an Ovule Development Protein 2 (ODP2) polypeptide, or the combination of a nucleotide sequence encoding a functional WUS/WOX polypeptide and a nucleotide sequence encoding a Babyboom (BBM) polypeptide or an Ovule Development Protein 2 (ODP2) polypeptide can be operably linked to an auxin inducible promoter, a developmentally regulated promoter, a tissue-specific promoter, or a constitutive promoter. Exemplary auxin inducible promoters, developmentally regulated promoters, tissue-specific promoters, and constitutive promoters useful in this context include UBI, LLDAV, EVCV, DMMV, BSV (AY) PRO, CYMV PRO FL, UBIZM PRO, SI-UB3 PRO, SB-UBI PRO (ALT1), USB1ZM PRO, ZM-GOS2 PRO, ZM-H1B PRO (1.2 KB), IN2-2, NOS, the −135 version of 35S, ZM-ADF PRO (ALT2), AXIG1 (U.S. Pat. No. 6,838,593 incorporated herein by reference in its entirety), DR5, XVE, GLB1, OLE, LTP2, HSP17.7, HSP26, HSP18A, AT-HSP811 (Takahashi, T, et al., (1992) Plant Physiol. 99 (2): 383-390), AT-HSP811L (Takahashi, T, et al., (1992) Plant Physiol. 99 (2): 383-390), GM-HSP173B (Schöffl, F., et al. (1984) EMBO J. 3(11): 2491-2497), promoters activated by tetracycline, ethametsulfuron or chlorsulfuron, PLTP, PLTP1, PLTP2, PLTP3, SDR, LGL, LEA-14A, LEA-D34 (United States Patent Application publications 20170121722 and 20180371480 incorporated herein by reference in their entireties), and any of the promoters disclosed herein.

[0070] When using a morphogenic gene cassette and a trait gene cassette (heterologous polynucleotide) to produce transgenic plants it is desirable to have the ability to segregate the morphogenic gene locus away from the trait gene (heterologous polynucleotide) locus in co-transformed plants to provide transgenic plants containing only the trait gene (heterologous polynucleotide). This can be accomplished using an Agrobacterium tumefaciens two T-DNA binary system, with two variations on this general theme (see Miller et al., 2002). For example, in the first, a two T-DNA vector, where expression cassettes for morphogenic genes and herbicide selection (i.e. HRA) are contained within a first T-DNA and the trait gene cassette (heterologous polynucleotide) is contained within a second T-DNA, where both T-DNA's reside on a single binary vector. When a plant cell is transformed by an Agrobacterium containing the two T-DNA plasmid a high percentage of transformed cells contain both T-DNA's that have integrated into different genomic locations (for example, onto different chromosomes). In the second method, for example, two Agrobacterium strains, each containing one of the two T-DNA's (either the morphogenic gene T-DNA or the trait gene (heterologous polynucleotide) T-DNA), are mixed together in a ratio, and the mixture is used for transformation. After transformation using this mixed Agrobacterium method, it is observed at a high frequency that recovered transgenic events contain both T-DNA's, often at separate genomic locations. For both co-transformation methods, it is observed that in a large proportion of the produced transgenic events, the two T-DNA loci segregate independently and progeny T1 plants can be readily identified in which the T-DNA loci have segregated away from each other, resulting in the recovery of progeny seed that contain the trait genes (heterologous polynucleotides) with no morphogenic genes/herbicide genes. See, Miller et al. Transgenic Res 11(4):381-96.

[0071] The methods provided herein provide seedling pre-treatments that enhance transformation frequency of leaf explants from the pre-treated seedlings. The methods provided herein rely upon the use of bacteria-mediated and/or biolistic-mediated gene transfer, in addition to electroporation, PEG transfection, or RNP (ribonucleoprotein) delivery to produce regenerable plant cells having an incorporated nucleotide sequence of interest. Bacterial strains useful in the methods of the disclosure include, but are not limited to, a disarmed Agrobacterium, an Ochrobactrum bacteria or a Rhizobiaceae bacteria. Disarmed Agrobacteria useful in the present methods include, but are not limited to, AGL-1, EHA105, GV3101, LBA4404, LBA4404 THY—(see U.S. Pat. No. 8,334,429 incorporated herein by reference in its entirety) and LBA4404 TD THY—in which both copies of the Tn904 transposon removed have been removed from LBA4404 THY—(see PCT/US20/24993 filed Mar. 26, 2020 which claims the benefit of U.S. Provisional Patent Application No. 62/825,054 filed on Mar. 28, 2019, all of which is hereby incorporated herein in its entirety by reference). Agrobacterium strain LBA4404 TD THY—is A. tumefaciens LBA4404 THY-strain deposited with the ATCC, assigned Accession Number PTA-10531 wherein a functional Tn904 transposon is not present or both copies of the Tn904 transposon have been deleted. Ochrobactrum bacterial strains useful in the present methods include, but are not limited to, those disclosed in U.S. Pat. Pub. No. US20180216123 incorporated herein by reference in its entirety. Rhizobiaceae bacterial strains useful in the present methods include, but are not limited to, those disclosed in U.S. Pat. No. 9,365,859 incorporated herein by reference in its entirety.

[0072] Also embodied is a plant, generated from a leaf explant wherein its seedling has been treated with various compounds, light exposures, and/or temperatures to enhance the transformability of the leaf explant. The plant comprises the described expression cassette stably incorporated into the genome of the plant. Also embodied is a seed of the plant, wherein the seed comprises the expression cassette. Further embodied is a plant wherein a gene or gene product of a heterologous polynucleotide or a polynucleotide of interest that confers a nutritional enhancement, increased yield, abiotic stress tolerance, drought tolerance, cold tolerance, herbicide tolerance, pest resistance, pathogen resistance, insect resistance, nitrogen use efficiency (NUE), disease resistance, or an ability to alter a metabolic pathway. A plant wherein expression of a heterologous polynucleotide or a polynucleotide of interest alters the phenotype of said plant is also embodied.

[0073] The methods, sequences, and genes disclosed herein are useful for genetic engineering of plants, e.g. to produce a transformed or transgenic plant, to express a phenotype of interest. As used herein, the terms “transformed plant” and “transgenic plant” refer to a plant that comprises within its genome a heterologous polynucleotide. Generally, the heterologous polynucleotide is stably integrated within the genome of a transgenic or transformed plant such that the polynucleotide is passed on to successive generations. The heterologous polynucleotide may be integrated into the genome alone or as part of a recombinant DNA construct. It is to be understood that as used herein the term “transgenic” includes any cell, cell line, callus, tissue, plant part or plant the genotype of which has been altered by the presence of a heterologous nucleic acid including those transgenics initially so altered as well as those created by sexual crosses or asexual propagation from the initial transgenic. The methods of pre-treating seedlings described herein are used to enhance transformability of leaf explants. Leaf explants derived from pre-treated methods disclosed herein are used to increase efficiency of stable integration of heterologous polynucleotides.

[0074] A transgenic “event” is produced by transformation of plant cells with a heterologous DNA construct, including a nucleic acid expression cassette that comprises a gene of interest, the regeneration of a population of plants resulting from the insertion of the transferred gene into the genome of the plant and selection of a plant characterized by insertion into a particular genome location. An event is characterized phenotypically by the expression of the inserted gene. At the genetic level, an event is part of the genetic makeup of a plant. The term “event” also refers to progeny produced by a sexual cross between the transformant and another plant wherein the progeny include the heterologous DNA.

[0075] The term “plant” refers to whole plants, plant organs (e.g., leaves, stems, roots, etc.), plant tissues, plant cells, plant parts, seeds, propagules, embryos, and progeny of the same. Plant cells can be differentiated or undifferentiated (e.g. callus, undifferentiated callus, immature and mature embryos, immature zygotic embryo, immature cotyledon, embryonic axis, suspension culture cells, protoplasts, leaf, leaf cells, root cells, phloem cells and pollen). Plant cells include, without limitation, cells from seeds, suspension cultures, explants, immature embryos, embryos, zygotic embryos, somatic embryos, embryogenic callus, meristem, somatic meristems, meristematic regions, organogenic callus, callus tissue, protoplasts, embryos derived from mature ear-derived seed, leaves, leaf bases, leaves from mature plants, leaf tips, immature inflorescences, tassel, immature ear, silks, cotyledons, immature cotyledons, embryonic axes, cells from leaves, cells from stems, cells from roots, cells from shoots, roots, shoots, gametophytes, sporophytes, pollen, microspores, multicellular structures (MCS), regenerable plant structures (RPS), and embryo-like structures.

[0076] Plant parts include differentiated and undifferentiated tissues including, but not limited to the following: roots, stems, shoots, leaves, pollen, seeds, tumor tissue and various forms of cells and culture (e.g., single cells, protoplasts, embryos and callus tissue). The plant tissue may be in a plant or in a plant organ, tissue or cell culture.

[0077] Grain is intended to mean the mature seed produced by commercial growers for purposes other than growing or reproducing the species. Progeny, variants and mutants of the regenerated plants are also included within the scope of the disclosure, provided these progeny, variants and mutants comprise the introduced polynucleotides.

[0078] The present disclosure also includes plants obtained by any of the methods disclosed herein. The present disclosure also includes seeds from a plant obtained by any of the methods disclosed herein.

[0079] In a further aspect, the leaf explants used in the disclosed methods can be derived from pre-treated seedlings. Pre-treatment methods disclosed herein include the use of compounds (e.g., ancymidol, 2.4-D, and anti-oxidants), exposure to increased or decreased temperatures, artificial lighting (e.g., LED lights) and combinations thereof. Disclosed pre-treatment methods are used to enhance transformability of leaf explants. Disclosed pre-treatment methods may, for example, produce leaf segments that exhibit improved frequencies of T-DNA delivery, improved somatic embryo response (more rapid growth and higher numbers), increased production of TO plants, and increased single-copy integration frequencies. In other aspects, disclosed pre-treatment methods may, for example, produce leaf segments that exhibit improved transformation as the result of improved nuclease-mediated genome modification, such as when CAS-mediated cutting is used for mutagenesis, dropping-out (excision via two flanking cuts), or Homology-Dependent Repair (HDR) for precise integration into the genome.

[0080] In a further aspect, the leaf explant used in the disclosed methods can be derived from any plant, including higher plants of the Angiospermae class. Plants of the subclasses of the Monocotyledonae are suitable. Suitable species may come from the family Alliaceae, Alstroemeriaceae, Amaryllidaceae, Arecaceae, Bromeliaceae, Colchicaceae, Dioscoreaceae, Melanthiaceae, Musaceae, and Poaceae.

[0081] Suitable species from which the leaf explant used in the disclosed methods can be derived include members of the genus, Allium, Alstroemeria, Ananas, Andropogon, Arundo, Colchicum, Cynodon, Dioscorea, Elaeis, Erianthus, Festuca, Galanthus, Hordeum, Lolium, Miscanthus, Musa, Oryza, Panicum, Pennisetum, Phalaris, Phleum, Poa, Saccharum, Secale, Sorghum, Spartina, Triticosecale, Triticum, Uniola, Veratrum, and Zea.

[0082] In a further aspect, the leaf explant used in the disclosed methods can be derived from a plant that is important or interesting for agriculture, horticulture, biomass for the production of liquid fuel molecules and other chemicals, and/or forestry. Non-limiting examples include, for instance, Panicum virgatum (switchgrass), Sorghum bicolor (sorghum, sudangrass), Miscanthus giganteus (miscanthus), Saccharum sp. (energycane), Zea mays (corn), Triticum aestivum (wheat), Oryza sativa (rice), Pennisetum glaucum (pearl millet), Panicum spp., Sorghum spp., Miscanthus spp., Saccharum spp., Erianthus spp., Andropogon gerardii (big bluestem), Pennisetum purpureum (elephant grass), Phalaris arundinacea (reed canarygrass), Cynodon dactylon (bermudagrass), Festuca arundinacea (tall fescue), Spartina pectinata (prairie cord-grass), Arundo donax (giant reed), Secale cereale (rye), Triticosecale spp. (triticum—wheat X rye), Bamboo, Elaeis guineensis (palm), Musa paradisiaca (banana), Ananas comosus (pineapple), Allium cepa (onion), Colchicum autumnale, Veratrum californica., Dioscorea spp., Galanthus wornorii, Alstroemeria spp., Uniola paniculata (oats), bentgrass (Agrostis spp.), Hordeum vulgare (barley), Poa pratensis (bluegrass), Lolium spp. (ryegrass), and Phleum pratense (timothy). Of interest are plants grown for energy production, so called energy crops, such as cellulose-based energy crops like Panicum virgatum (switchgrass), Sorghum bicolor (sorghum, sudangrass), Miscanthus giganteus (miscanthus), Saccharum sp. (energycane), Andropogon gerardii (big bluestem), Pennisetum purpureum (elephant grass), Phalaris arundinacea (reed canarygrass), Cynodon dactylon (bermudagrass), Festuca arundinacea (tall fescue), Spartina pectinata (prairie cord-grass), Arundo donax (giant reed), Secale cereale (rye), Triticosecale spp. (triticum—wheat×rye), and Bamboo; and starch-based energy crops like Zea mays (corn); and sucrose-based energy crops like Saccharum sp. (sugarcane); and biodiesel-producing energy crops like Elaeis guineensis (palm).

[0083] In a further aspect, the leaf explant from a pre-treated seedling resulting from the methods disclosed herein can be derived from any plant found within the monocot families listed in Table 1 along with representative genera and/or species.

TABLE 1

| Family Names | Order | Representative Genera/Species |
|---|---|---|
| Agavaceae | Asparagales | Agave: A. cantala (Maguey, fiber crop); Yucca |
| Alliaceae | Asparagales | Thirteen genera e.g. Allium: A. cepa (Onion, spice |
| | | crop); Ipheion, Leucocoryne, Tulbaghia |
| Amaryllidaceae | Asparagales | Fifty-nine genera e.g. Amaryllis: A. |
| | | belladona (Belladona lily, ornamental |
| | | crop); Crinum, Galanthus, Hippeastrum, Leucojum, |
| | | Lycoris, Narcissus |
| Araceae | Alismatales | Over one hundred genera e.g. Colocasia: C. esculenta |
| | | (Taro or Gabi), Alocasia, Xanthosoma (food crops, |
| | | root and tuber crops), Aglaonema, Anthurium, |
| | | Caladium, Dieffenbachia, Monstera, Philodendron, |
| | | Spathiphylum, Syngonium, Syngonium, Zantedeschia |
| | | (ornamental crops), Lemna, Pistia, Wolfia |
| Arecaceae or | Arecales | Areca: A. catechu (Betel |
| Palmae | | nut); Arenga, Cocos, Elaeis, Metroxylon, |
| | | Phoenix, Washingtonia, Lodoicea maldivica (biggest |
| | | seed), Rhapia spp. (largest leaves), Calamus (rattan) |
| Asparagaceae | Asparagales | Asparagus: A. officinalis (Vegetable Asparagus) |
| Asphodelaceae | Asparagales | Fifteen genera e.g. Aloe: A. vera (Aloe or |
| | | sabila); Asphodelus, Bulbine, Gasteria, Haworthia, |
| | | Kniphofia |
| Bromeliaceae | Poales | Ananas: A. comosus (Pineapple, fruit and fiber |
| | | crop); Aechmea, Neoregalia, Puya, Tillandsia |
| Cannaceae | Zingiberales | One genus i.e, Canna: Canna spp. |
| Colchicaceae | Liliales | Colchicum: C. autumnale (Autumn |
| | | Crocus); Burchardia |
| Commelinaceae | Commelinales | Commelina: C. diffusa (Climbing |
| | | dayflower); Rhoeo, Cyanotis, Tradescantia, Zebrina |
| Costaceae | Zingiberales | Costus: C. speciosus (Common spiral ginger) |
| Cyclanthacea | Pandanales | Carludovica palmata (fiber) |
| Cyperaceae | Poales | One hundred four genera e.g. Cyperus: C. |
| | | alternifolius, Carex, Eleocharis, Scirpus |
| Dioscoreaceae | Dioscoreales | Four genera e.g. Dioscorea: D. alata (Yam, tuber |
| | | crop); Stenomeris, Tacca, Trichopus |
| Eriocaulaceae | Poales | Ten genera e.g. Eriocaulon (pipewort), Leiothrix, |
| | | Paepalanthus, Syngonanthus |
| Heliconiaceae | Zingiberales | Heliconia: H. humilis (ornamental crop) |
| Iridaceae | Asparagales | Seventy genera e.g. Iris: I. reticulata (Reticulated Iris, |
| | | ornamental crop); Crocus, Dietes, Freesia, Gladiolus |
| Juncaceae | Poales | Seven genera e.g. Juncus: J. effusus (Soft |
| | | rush); Distichia |
| Liliaceae | Liliales | Sixteen generae.g. Lilium: L. longiflorum (White |
| | | Trumpet Lily, ornamental |
| | | crop); Tulipa, Calochortus, Erythronium, Fritillaria, |
| | | Medeola |
| Marantaceae | Zingiberales | Maranta: M. arundinacea (Arrow root, root |
| | | crop); Calathea, Thalia |
| Musaceae | Zingiberales | Three genera e.g. Musa: Musa spp. (Banana, fruit |
| | | crop; Abaca, fiber crop); Ensete, Musella |
| Orchidaceae | Asparagales | Seven to eight hundred genera |
| | | e.g. Cattleya, Cymbidium, Dendrobium, Phalaenopsis, |
| | | Vanda: V. sanderiana (waling-waling orchid, |
| | | ornamental crop), Vanilla |
| Pandanaceae | Pandanales | Three genera e.g. Pandanus: P. tectorius (Screw Pine, |
| | | fiber crop); Freycinetia |
| Poaceae or | Poales | Six hundred sixty-eight genera e.g. Avena, Hordeum, |
| Gramineae | | Sorghum, Oryza, Triticum, Zea (cereals); Bambusa, |
| | | Dendrocalamus (bamboos); Saccharum: |
| | | S. officinarum (sugarcane); Cymbopogon (lemon grass, |
| | | spice, essential-oil); Brachiaria, Cynodon, Panicum, |
| | | Pennisetum (forage crops); Axonopus, Paspalum, |
| | | Zoysia (turfgrasses) |
| Pontederiaceae | Commelinales | Pontederia: P. cordata (Pickerel |
| | | weed); Eichhornia, Heteranthera, Monochoria |
| Smilacaceae | Liliales | Smilax: S. bracteata (Sarsaparilla) |
| Strelitziaceae | Zingiberales | Three genera e.g. Strelitzia: S. reginae (Bird of |
| | | Paradise, ornamental |
| | | crop); Phenakospermum, Ravanela |
| Typhaceae | Poales | One genus: Typha: T. angustifolia (Cattail, aquatic |
| | | ornamental crop and food crop) |
| Xyridaceae | Poales | Five genera e.g. Xyris: X. pauciflora (grass-like |
| | | weed), Abolboda, Achlyphila, Aratitiyopea, Orectanth |
| Zingiberaceae | Zingiberales | Zingiber: Z. officinalis (Ginger, spice |
| | | crop), Alpinia, Curcuma, Elettaria, Hedychium |
| Zosteraceae | Alismatales | Zostera marina (eelgrass), Phyllospadix serrulatus |
| | | (surfgrass) |

[0084] In yet a further aspect, leaf explants from seedlings from the Poaceae family, including leaf explants from the sub-families Chloridoideae, Danthonioideae, Micrairoideae, Arundinoideae, Panicoideae, Aristidoideae. Oryzoideae, Bambusoideae, Pooideae, Puelioideae, Pharoideae, and Anomochlooideae are pre-treated by the methods disclosed herein and are useful in the methods of the present disclosure. Poaceae (also referred to historically as the Gramineae) is a large family of monocotyledonous flowering plants known as grasses. It includes the cereal grasses, bamboos and the grasses of natural grassland and species cultivated in lawns and pasture. Examples of species within the Poaceae useful in seedling pre-treatment methods of the present disclosure include, but are not limited to bamboo (Phyllostachys edulis), barley (Hordeum vulgare), bentgrass (Agrostis sp.), creeping bent (Agrostis stolonifera), bluegrass (Poa sp.), fescue (Festuca sp.), green bristlegrass (Setaria viridis), reed canarygrass (Phalaris arundinacea), guinea grass (Megathyrsus maximus), golden bamboo (Phyllostachys aurea), elephant grass (Arundo donax), desert grass (Stipagrostis plumosa), inland sea oats (Chasmanthium latifolium), silver grass (Miscanthus sinensis), foxtail millet (Setaria italica), finger millet (Eleusine coracana), little millet (Panicum sumatrance), kodo millet (Paspalum scrobiculatum), barnyard millet (Echinochloa frumentacea) and proso millet (Panicum miliaceum), orchard grass (Dactylis glomerata), switchgrass (Panicum virgatum), pearl millet (Pennisetum glaucum), purple false brome (Brachypodium distachyon), rice (Oryza sativa; both Japonica and indica varieties), rye (Secale cereale), ryegrass (Lolium perenne), sorghum (Sorghum bicolor), Saint Augustine grass (Stenotaphrum secundatum), sugarcane (Saccharum officinarum), teff (Eragrostis tef), fonio (Digitaria exilis), timothy (Phleum pratense), triticale (Triticosecale sp.), wheat (Triticum aestivum), durum wheat (Triticum durum), emmer wheat (Triticum dicoccum), einkorn wheat (Triticum monococcum), spelt wheat (Triticum spelta), goatgrass (Aegilops spp), wheatgrass (Agropyron cristatum), oats (Avena sativa), corn (Zea mays), teosinte (Zea mays spp. mexicana or spp. parviglumis), and perennial teosinte (Zea diploperennis).

[0085] In specific aspects, leaf explants derived from pre-treated seedlings disclosed in the methods herein and useful in the methods of the present disclosure include, but are not limited to leaf explants of bamboo (Phyllostachys edulis), barley (Hordeum vulgare), bentgrass (Agrostis sp.), creeping bent (Agrostis stolonifera), bluegrass (Poa sp.), fescue (Festuca sp.), green bristlegrass (Setaria viridis), reed canarygrass (Phalaris arundinacea), guinea grass (Megathyrsus maximus), golden bamboo (Phyllostachys aurea), elephant grass (Arundo donax), desert grass (Stipagrostis plumosa), inland sea oats (Chasmanthium latifolium), silver grass (Miscanthus sinensis), foxtail millet (Setaria italica), finger millet (Eleusine coracana), little millet (Panicum sumatrance), kodo millet (Paspalum scrobiculatum), barnyard millet (Echinochloa frumentacea) and proso millet (Panicum miliaceum), orchard grass (Dactylis glomerata), switchgrass (Panicum virgatum), pearl millet (Pennisetum glaucum), purple false brome (Brachypodium distachyon), rice (Oryza sativa; both Japonica and Indica varieties), rye (Secale cereale), ryegrass (Lolium perenne), sorghum (Sorghum bicolor), Saint Augustine grass (Stenotaphrum secundatum), sugarcane (Saccharum officinarum), teff (Eragrostis tef), fonio (Digitaria exilis), timothy (Phleum pratense), triticale (Triticosecale sp.), wheat (Triticum aestivum), durum wheat (Triticum durum), emmer wheat (Triticum dicoccum), einkorn wheat (Triticum monococcum), spelt wheat (Triticum spelta), goatgrass (Aegilops spp), wheatgrass (Agropyron cristatum), oats (Avena sativa), corn (Zea mays), teosinte (Zea mays spp. mexicana or spp. parviglumis), and perennial teosinte (Zea diploperennis).

[0086] Heterologous coding sequences, heterologous polynucleotides, and polynucleotides of interest may be used in the methods of the disclosure for varying the phenotype of a plant. Various changes in phenotype are of interest including modifying expression of a gene in a plant, altering a plant's pathogen or insect defense mechanism, increasing a plant's tolerance to herbicides, altering plant development to respond to environmental stress, modulating the plant's response to salt, temperature (hot and cold), drought and the like. These results can be achieved by the expression of a heterologous nucleotide sequence of interest comprising an appropriate gene product. In specific aspects, the heterologous nucleotide sequence of interest is an endogenous plant sequence whose expression level is increased in the plant or plant part. Results can be achieved by providing for altered expression of one or more endogenous gene products, particularly hormones, receptors, signaling molecules, enzymes, transporters or cofactors or by affecting nutrient uptake in the plant. These changes result in a change in phenotype of the transformed plant.

[0087] General categories of heterologous polynucleotides or nucleotide sequences of interest for use in the methods of the present disclosure include, for example, those genes involved in information, such as zinc fingers, those involved in communication, such as kinases and those involved in housekeeping, such as heat shock proteins. More specific categories of transgenes (heterologous polynucleotides or nucleotide sequences of interest), for example, include genes encoding important traits for agronomics, insect resistance, disease resistance, herbicide resistance, environmental stress resistance (altered tolerance to cold, salt, drought, etc.) and grain characteristics. Still other categories of transgenes include genes for inducing expression of exogenous products such as enzymes, cofactors, and hormones from plants and other eukaryotes as well as prokaryotic organisms. It is recognized that any gene or polynucleotide of interest can be operably linked to a promoter and expressed in a plant using the methods disclosed herein.

[0088] Many agronomic traits can affect “yield”, including without limitation, plant height, pod number, pod position on the plant, number of internodes, incidence of pod shatter, grain size, efficiency of nodulation and nitrogen fixation, efficiency of nutrient assimilation, resistance to biotic and abiotic stress, carbon assimilation, plant architecture, resistance to lodging, percent seed germination, seedling vigor, and juvenile traits. Other traits that can affect yield include, efficiency of germination (including germination in stressed conditions), growth rate (including growth rate in stressed conditions), ear number, seed number per ear, seed size, composition of seed (starch, oil, protein) and characteristics of seed fill. Also of interest is the generation of transgenic plants that demonstrate desirable phenotypic properties that may or may not confer an increase in overall plant yield. Such properties include enhanced plant morphology, plant physiology or improved components of the mature seed harvested from the transgenic plant.

[0089] “Increased yield” of a transgenic plant of the present disclosure may be evidenced and measured in a number of ways, including test weight, seed number per plant, seed weight, seed number per unit area (i.e. seeds, or weight of seeds, per acre), bushels per acre, tons per acre, kilo per hectare. For example, maize yield may be measured as production of shelled corn kernels per unit of production area, e.g. in bushels per acre or metric tons per hectare, often reported on a moisture adjusted basis, e.g., at 15.5% moisture. Increased yield may result from improved utilization of key biochemical compounds, such as nitrogen, phosphorous and carbohydrate, or from improved tolerance to environmental stresses, such as cold, heat, drought, salt, and attack by pests or pathogens. Trait-enhancing recombinant DNA may also be used to provide transgenic plants having improved growth and development, and ultimately increased yield, as the result of modified expression of plant growth regulators or modification of cell cycle or photosynthesis pathways.

[0090] An “enhanced trait” as used herein describing the aspects of the present disclosure includes improved or enhanced water use efficiency or drought tolerance, osmotic stress tolerance, high salinity stress tolerance, heat stress tolerance, enhanced cold tolerance, including cold germination tolerance, increased yield, improved seed quality, enhanced nitrogen use efficiency, early plant growth and development, late plant growth and development, enhanced seed protein, and enhanced seed oil production.

[0091] Multiple genes of interest (heterologous polynucleotides or nucleotide sequences of interest) can be used in the methods of the disclosure and expressed in a plant, for example insect resistance traits herbicide resistance, fungal resistance, virus resistance, stress tolerance, disease resistance, male sterility, stalk strength, and the like) or output traits (e.g., increased yield, modified starches, improved oil profile, balanced amino acids, high lysine or methionine, increased digestibility, improved fiber quality, drought resistance, nutritional enhancement, and the like).

[0092] Such genes (heterologous polynucleotides or nucleotide sequences of interest) include, for example, Bacillus thuringiensis toxic protein genes, U.S. Pat. Nos. 5,366,892; 5,747,450; 5,736,514; 5,723,756; 5,593,881 and Geiser, et al., (1986) Gene 48:109, the disclosures of which are herein incorporated by reference in their entirety. Genes (heterologous polynucleotides or nucleotide sequences of interest) encoding disease resistance traits can also be used in the methods of the disclosure including, for example, detoxification genes, such as those which detoxify fumonisin (U.S. Pat. No. 5,792,931); avirulence (avr) and disease resistance (R) genes (Jones, et al., (1994) Science 266:789; Martin, et al., (1993) Science 262:1432; and Mindrinos, et al., (1994) Cell 78:1089), herein incorporated by reference in their entirety.

[0093] Numerous trait genes (heterologous polynucleotides or nucleotide sequences of interest) are known in the art and can be used in the methods disclosed herein. By way of illustration, without intending to be limiting, trait genes that confer resistance to insects, diseases, or herbicides, trait genes that confer or contribute to an altered grain characteristic, such as altered fatty acids, altered phosphorus content, altered carbohydrates or carbohydrate composition, altered antioxidant content or composition, or altered essential seed amino acids content or composition, are examples of the types of trait genes which can be operably linked to a promoter for expression in plants transformed by the methods disclosed herein. Additional genes known in the art may be included in the expression cassettes useful in the methods disclosed herein. Non-limiting examples include genes that create a site for site specific DNA integration, genes that affect abiotic stress resistance (including but not limited to flowering, ear and seed development, enhancement of nitrogen utilization efficiency, altered nitrogen responsiveness, drought resistance or tolerance, cold resistance or tolerance, and salt resistance or tolerance) and increased yield under stress, or other genes and transcription factors that affect plant growth and agronomic traits such as yield, flowering, plant growth and/or plant structure.

[0094] The methods of the disclosure can be used to transform a plant with a heterologous nucleotide sequence that is an antisense sequence for a targeted gene. As used herein, “antisense orientation” includes reference to a polynucleotide sequence that is operably linked to a promoter in an orientation where the antisense strand is transcribed. The antisense strand is sufficiently complementary to an endogenous transcription product such that translation of the endogenous transcription product is often inhibited. “Operably linked” refers to the association of two or more nucleic acid fragments on a single nucleic acid fragment so that the function of one is affected by the other. For example, a promoter is operably linked with a coding sequence when it is capable of affecting the expression of that coding sequence (i.e., that the coding sequence is under the transcriptional control of the promoter). Coding sequences can be operably linked to regulatory sequences in sense or antisense orientation.

[0095] As used herein, the terms “promoter” or “transcriptional initiation region” mean a regulatory region of DNA usually comprising a TATA box or a DNA sequence capable of directing RNA polymerase II to initiate RNA synthesis at the appropriate transcription initiation site for a particular coding sequence. A promoter may additionally comprise other recognition sequences generally positioned upstream or 5′ to the TATA box or the DNA sequence capable of directing RNA polymerase II to initiate RNA synthesis, referred to as upstream promoter elements, which influence the transcription initiation rate. It is recognized that having identified the nucleotide sequences for the promoter regions disclosed herein, it is within the state of the art to isolate and identify further promoters in the 5′ untranslated region upstream from the particular promoter regions identified herein. Additionally, chimeric promoters may be provided. Such chimeras include portions of the promoter sequence fused to fragments and/or variants of heterologous transcriptional regulatory regions. Thus, the promoter regions disclosed herein can comprise upstream promoters such as, those responsible for tissue and temporal expression of the coding sequence, enhancers and the like.

[0096] As used herein, the term “regulatory element” also refers to a sequence of DNA, usually, but not always, upstream (5′) to the coding sequence of a structural gene, which includes sequences which control the expression of the coding region by providing the recognition for RNA polymerase and/or other factors required for transcription to start at a particular site. An example of a regulatory element that provides for the recognition for RNA polymerase or other transcriptional factors to ensure initiation at a particular site is a promoter element. A promoter element comprises a core promoter element, responsible for the initiation of transcription, as well as other regulatory elements that modify gene expression. It is to be understood that nucleotide sequences, located within introns or 3′ of the coding region sequence may also contribute to the regulation of expression of a coding region of interest. Examples of suitable introns include, but are not limited to, the maize IVS6 intron, or the maize actin intron. A regulatory element may also include those elements located downstream (3′) to the site of transcription initiation, or within transcribed regions, or both. In the context of the present disclosure a post-transcriptional regulatory element may include elements that are active following transcription initiation, for example translational and transcriptional enhancers, translational and transcriptional repressors and mRNA stability determinants.

[0097] A “heterologous nucleotide sequence”, “heterologous polynucleotide of interest”, or “heterologous polynucleotide” as used throughout the disclosure, is a sequence that is not naturally occurring with or operably linked to a promoter sequence. While this nucleotide sequence is heterologous to the promoter sequence, it may be homologous or native or heterologous or foreign to the plant host. Likewise, the promoter sequence may be homologous or native or heterologous or foreign to the plant host and/or the polynucleotide of interest.

[0098] It is recognized that to increase transcription levels, enhancers may be. Enhancers are nucleotide sequences that act to increase the expression of a promoter region. Enhancers are known in the art and include the SV40 enhancer region, the 35S enhancer element and the like. Some enhancers are also known to alter normal promoter expression patterns, for example, by causing a promoter to be expressed constitutively when without the enhancer, the same promoter is expressed only in one specific tissue or a few specific tissues.

[0099] Modifications of promoter sequences can provide for a range of expression of a heterologous nucleotide sequence. Thus, they may be modified to be weak promoters or strong promoters. Generally, a “weak promoter” means a promoter that drives expression of a coding sequence at a low level. A “low level” of expression is intended to mean expression at levels of about 1/10,000 transcripts to about 1/100,000 transcripts to about 1/500,000 transcripts. Conversely, a strong promoter drives expression of a coding sequence at a high level, or at about 1/10 transcripts to about 1/100 transcripts to about 1/1,000 transcripts.

[0100] The transformation methods disclosed herein are useful in the genetic manipulation of any plant, thereby resulting in a change in phenotype of the transformed plant. Changes in phenotype can be accomplished by T-DNA transfer, particle bombardment, electroporation, PEG transfection, or RNP (ribonucleoprotein) delivery.

[0101] The term “operably linked” means that the transcription or translation of a heterologous nucleotide sequence is under the influence of a promoter sequence. In this manner, the nucleotide sequences for the promoters may be provided in expression cassettes along with heterologous nucleotide sequences of interest for expression in the plant of interest, more particularly for expression in the reproductive tissue of the plant.

[0102] In one aspect of the disclosure, expression cassettes comprise a transcriptional initiation region comprising a promoter nucleotide sequence or variants or fragments thereof, operably linked to a morphogenic gene and/or a heterologous nucleotide sequence. Such an expression cassette can be provided with a plurality of restriction sites for insertion of the nucleotide sequence to be under the transcriptional regulation of the regulatory regions. The expression cassette may additionally contain selectable marker genes as well as 3′ termination regions.

[0103] The expression cassette can include, in the 5′-3′ direction of transcription, a transcriptional initiation region (i.e., a promoter, or variant or fragment thereof), a translational initiation region, a heterologous nucleotide sequence of interest, a translational termination region and optionally, a transcriptional termination region functional in the host organism. The regulatory regions (i.e., promoters, transcriptional regulatory regions, and translational termination regions) and/or the polynucleotide of the aspects may be native/analogous to the host cell or to each other. Alternatively, the regulatory regions and/or the polynucleotide of the aspects may be heterologous to the host cell or to each other. As used herein, “heterologous” in reference to a sequence is a sequence that originates from a foreign species or, if from the same species, is substantially modified from its native form in composition and/or genomic locus by deliberate human intervention. For example, a promoter operably linked to a heterologous polynucleotide is from a species different from the species from which the polynucleotide was derived or, if from the same/analogous species, one or both are substantially modified from their original form and/or genomic locus or the promoter is not the native promoter for the operably linked polynucleotide.

[0104] The termination region may be native with the transcriptional initiation region, may be native with the operably linked DNA sequence of interest, may be native with the plant host, or may be derived from another source (i.e., foreign or heterologous to the promoter, the DNA sequence being expressed, the plant host, or any combination thereof). Convenient termination regions are available from the Ti-plasmid of A. tumefaciens, such as the octopine synthase and nopaline synthase termination regions. See also, Guerineau, et al., (1991) Mol. Gen. Genet. 262:141-144; Proudfoot, (1991) Cell 64:671-674; Sanfacon, et al., (1991) Genes Dev. 5:141-149; Mogen, et al., (1990) Plant Cell 2:1261-1272; Munroe, et al., (1990) Gene 91:151-158; Ballas, et al., (1989) Nucleic Acids Res. 17:7891-7903; and Joshi, et al., (1987) Nucleic Acid Res. 15:9627-9639, herein incorporated by reference in their entirety.

[0105] The expression cassette useful in the methods of the disclosure may also contain at least one additional nucleotide sequence for a gene, heterologous nucleotide sequence, heterologous polynucleotide of interest, or heterologous polynucleotide to be co-transformed into the organism. Alternatively, the additional nucleotide sequence(s) can be provided on another expression cassette.

[0106] Where appropriate, the nucleotide sequences may be optimized for increased expression in the transformed plant. That is, these nucleotide sequences can be synthesized using plant preferred codons for improved expression. See, for example, Campbell and Gowri, (1990) Plant Physiol. 92:1-11, herein incorporated by reference in its entirety, for a discussion of host-preferred codon usage. Methods are available in the art for synthesizing plant-preferred genes. See, for example, U.S. Pat. Nos. 5,380,831, 5,436,391 and Murray, et al., (1989) Nucleic Acids Res. 17:477-498, herein incorporated by reference in their entirety.

[0107] Additional sequence modifications are known to enhance gene expression in a cellular host. These include elimination of sequences encoding spurious polyadenylation signals, exon-intron splice site signals, transposon-like repeats and other such well-characterized sequences that may be deleterious to gene expression. The G-C content of the heterologous nucleotide sequence may be adjusted to levels average for a given cellular host, as calculated by reference to known genes expressed in the host cell. When possible, the sequence is modified to avoid predicted hairpin secondary mRNA structures.

[0108] The expression cassettes may additionally contain 5′ leader sequences. Such leader sequences can act to enhance translation. Translation leaders are known in the art and include, without limitation: picornavirus leaders, for example, EMCV leader (Encephalomyocarditis 5′ noncoding region) (Elroy-Stein, et al., (1989) Proc. Nat. Acad. Sci. USA 86:6126-6130); potyvirus leaders, for example, TEV leader (Tobacco Etch Virus) (Allison, et al., (1986) Virology 154:9-20); MDMV leader (Maize Dwarf Mosaic Virus); human immunoglobulin heavy-chain binding protein (BiP) (Macejak, et al., (1991) Nature 353:90-94); untranslated leader from the coat protein mRNA of alfalfa mosaic virus (AMV RNA 4) (Jobling, et al., (1987) Nature 325:622-625); tobacco mosaic virus leader (TMV) (Gallie, et al., (1989) Molecular Biology of RNA, pages 237-256) and maize chlorotic mottle virus leader (MCMV) (Lommel, et al., (1991) Virology 81:382-385), herein incorporated by reference in their entirety. See, also, Della-Cioppa, et al., (1987) Plant Physiology 84:965-968, herein incorporated by reference in its entirety. Methods known to enhance mRNA stability can also be utilized, for example, introns, such as the maize Ubiquitin intron (Christensen and Quail, (1996) Transgenic Res. 5:213-218; Christensen, et al., (1992) Plant Molecular Biology 18:675-689) or the maize AdhI intron (Kyozuka, et al., (1991) Mol. Gen. Genet. 228:40-48; Kyozuka, et al., (1990) Maydica 35:353-357) and the like, herein incorporated by reference in their entirety.

[0109] The DNA expression cassettes or constructs useful in the methods of the disclosure can also include further enhancers, either translation or transcription enhancers, as may be required. These enhancer regions are well known to persons skilled in the art and can include the ATG initiation codon and adjacent sequences. The initiation codon must be in phase with the reading frame of the coding sequence to ensure translation of the entire sequence. The translation control signals and initiation codons can be from a variety of origins, both natural and synthetic. Translational initiation regions may be provided from the source of the transcriptional initiation region, or from the structural gene. The sequence can also be derived from the regulatory element selected to express the gene and can be specifically modified to increase translation of the mRNA. It is recognized that to increase transcription levels enhancers may be utilized in combination with the promoter regions of the aspects. Enhancers are known in the art and include the SV40 enhancer region, the 35S enhancer element, and the like.

[0110] In preparing the expression cassette, the various DNA fragments may be manipulated, to provide for the DNA sequences in the proper orientation and, as appropriate, in the proper reading frame. Toward this end, adapters or linkers may be employed to join the DNA fragments or other manipulations may be involved to provide for convenient restriction sites, removal of superfluous DNA, removal of restriction sites or the like. For this purpose, in vitro mutagenesis, primer repair, restriction, annealing, resubstitutions, for example, transitions and transversions, may be involved.

[0111] Reporter genes or selectable marker genes may also be included in the expression cassettes useful in the methods of the present disclosure. Examples of suitable reporter genes known in the art can be found in, for example, Jefferson, et al., (1991) in Plant Molecular Biology Manual, ed. Gelvin, et al., (Kluwer Academic Publishers), pp. 1-33; DeWet, et al., (1987) Mol. Cell. Biol. 7:725-737; Goff, et al., (1990) EMBO J. 9:2517-2522; Kain, et al., (1995) Bio Techniques 19:650-655 and Chiu, et al., (1996) Current Biology 6:325-330, herein incorporated by reference in their entirety.

[0112] Selectable marker genes for selection of transformed cells or tissues can include genes that confer antibiotic resistance or resistance to herbicides. Examples of suitable selectable marker genes include, but are not limited to, genes encoding resistance to chloramphenicol (Herrera Estrella, et al., (1983) EMBO J. 2:987-992); methotrexate (Herrera Estrella, et al., (1983) Nature 303:209-213; Meijer, et al., (1991) Plant Mol. Biol. 16:807-820); hygromycin (Waldron, et al., (1985) Plant Mol. Biol. 5:103-108 and Zhijian, et al., (1995) Plant Science 108:219-227); streptomycin (Jones, et al., (1987) Mol. Gen. Genet. 210:86-91); spectinomycin (Bretagne-Sagnard, et al., (1996) Transgenic Res. 5:131-137); bleomycin (Hille, et al., (1990) Plant Mol. Biol. 7:171-176); sulfonamide (Guerineau, et al., (1990) Plant Mol. Biol. 15:127-36); bromoxynil (Stalker, et al., (1988) Science 242:419-423); glyphosate (Shaw, et al., (1986) Science 233:478-481 and U.S. patent application Ser. Nos. 10/004,357 and 10/427,692); phosphinothricin (DeBlock, et al., (1987) EMBO J. 6:2513-2518), herein incorporated by reference in their entirety.

[0113] Other genes that could serve utility in the recovery of transgenic events would include, but are not limited to, examples such as GUS (beta-glucuronidase; Jefferson, (1987) Plant Mol. Biol. Rep. 5:387), GFP (green fluorescence protein; Chalfie, et al., (1994) Science 263:802), luciferase (Riggs, et al., (1987) Nucleic Acids Res. 15(19):8115 and Luehrsen, et al., (1992) Methods Enzymol. 216:397-414) and the maize genes encoding for anthocyanin production (Ludwig, et al., (1990) Science 247:449), herein incorporated by reference in their entirety.

[0114] As used herein, “vector” refers to a DNA molecule such as a plasmid, cosmid or bacterial phage for introducing a nucleotide construct, for example, an expression cassette or construct, into a host cell. Cloning vectors typically contain one or a small number of restriction endonuclease recognition sites at which foreign DNA sequences can be inserted in a determinable fashion without loss of essential biological function of the vector, as well as a marker gene that is suitable for use in the identification and selection of cells transformed with the cloning vector. Marker genes typically include genes that provide tetracycline resistance, hygromycin resistance or ampicillin resistance.

[0115] The methods of the disclosure involve introducing a polypeptide or polynucleotide into a plant. As used herein, “introducing” means presenting to the plant the polynucleotide or polypeptide in such a manner that the sequence gains access to the interior of a cell of the plant. The methods of the disclosure do not depend on a particular method for introducing a sequence into a plant, only that the polynucleotide or polypeptides gains access to the interior of at least one cell of the plant. Methods for introducing polynucleotide or polypeptides into plants are known in the art including, but not limited to, stable transformation methods, transient transformation methods and virus-mediated methods.

[0116] A “stable transformation” is a transformation in which the nucleotide construct introduced into a plant integrates into the genome of the plant and is capable of being inherited by the progeny thereof. “Transient transformation” means that a polynucleotide is introduced into the plant and does not integrate into the genome of the plant or a polypeptide is introduced into a plant.

[0117] Transformation protocols as well as protocols for introducing nucleotide sequences into plants may vary depending on the type of plant or plant cell, i.e., monocot or dicot, targeted for transformation. Suitable methods of introducing nucleotide sequences into plant cells and subsequent insertion into the plant genome include microinjection (Crossway, et al., (1986) Biotechniques 4:320-334), electroporation (Riggs, et al., (1986) Proc. Natl. Acad. Sci. USA 83:5602-5606), Agrobacterium-mediated transformation (Townsend, et al., U.S. Pat. No. 5,563,055 and Zhao, et al., U.S. Pat. No. 5,981,840), direct gene transfer (Paszkowski, et al., (1984) EMBO J. 3:2717-2722) and ballistic particle acceleration (see, for example, U.S. Pat. Nos. 4,945,050; 5,879,918; 5,886,244; 5,932,782; Tomes, et al., (1995) in Plant Cell, Tissue, and Organ Culture: Fundamental Methods, ed. Gamborg and Phillips (Springer-Verlag, Berlin); McCabe, et al., (1988) Biotechnology 6:923-926) and Lec1 transformation (WO 00/28058). Also see, Weissinger, et al., (1988) Ann. Rev. Genet. 22:421-477; Sanford, et al., (1987) Particulate Science and Technology 5:27-37 (onion); Christou, et al., (1988) Plant Physiol. 87:671-674 (soybean); McCabe, et al., (1988) Bio/Technology 6:923-926 (soybean); Finer and McMullen, (1991) In Vitro Cell Dev. Biol. 27P: 175-182 (soybean); Singh, et al., (1998) Theor. Appl. Genet. 96:319-324 (soybean); Datta, et al., (1990) Biotechnology 8:736-740 (rice); Klein, et al., (1988) Proc. Natl. Acad. Sci. USA 85:4305-4309 (maize); Klein, et al., (1988) Biotechnology 6:559-563 (maize); U.S. Pat. Nos. 5,240,855; 5,322,783 and 5,324,646; Klein, et al., (1988) Plant Physiol. 91:440-444 (maize); Fromm, et al., (1990) Biotechnology 8:833-839 (maize); Hooykaas-Van Slogteren, et al., (1984) Nature (London) 311:763-764; U.S. Pat. No. 5,736,369 (cereals); Bytebier, et al., (1987) Proc. Natl. Acad. Sci. USA 84:5345-5349 (Liliaceae); De Wet, et al., (1985) in The Experimental Manipulation of Ovule Tissues, ed. Chapman, et al., (Longman, New York), pp. 197-209 (pollen); Kaeppler, et al., (1990) Plant Cell Reports 9:415-418 and Kaeppler, et al., (1992) Theor. Appl. Genet. 84:560-566 (whisker-mediated transformation); D'Halluin, et al., (1992) Plant Cell 4:1495-1505 (electroporation); Li, et al., (1993) Plant Cell Reports 12:250-255 and Christou and Ford, (1995) Annals of Botany 75:407-413 (rice); Osjoda, et al., (1996) Nature Biotechnology 14:745-750 (maize via Agrobacterium tumefaciens), all of which are herein incorporated by reference in their entirety. Methods and compositions for rapid plant transformation of immature embryos are also found in US 2017/0121722, herein incorporated in its entirety by reference. Vectors useful in plant transformation are found in US 2019/0078106, herein incorporated by reference in its entirety.

[0118] In specific aspects, the DNA expression cassettes or constructs can be provided to a leaf explant from a pre-treated seedling derived from the methods disclosed herein using a variety of transient transformation methods. Such transient transformation methods include, but are not limited to, viral vector systems and the precipitation of the polynucleotide in a manner that precludes subsequent release of the DNA. Thus, transcription from the particle-bound DNA can occur, but the frequency with which it is released to become integrated into the genome is greatly reduced. Such methods include the use of particles coated with polyethylenimine (PEI; Sigma #P3143).

[0119] In other aspects, the polynucleotide may be introduced into plants by contacting plants with a virus or viral nucleic acids. Generally, such methods involve incorporating a nucleotide construct within a viral DNA or RNA molecule. Methods for introducing polynucleotides into plants and expressing a protein encoded therein, involving viral DNA or RNA molecules, are known in the art. See, for example, U.S. Pat. Nos. 5,889,191, 5,889,190, 5,866,785, 5,589,367, 5,316,931 and Porta, et al., (1996) Molecular Biotechnology 5:209-221, herein incorporated by reference in their entirety.

[0120] Transformed cells derived from leaf explants of pre-treated seedlings described herein may be grown into plants in accordance with conventional ways. See, for example, McCormick, et al., (1986) Plant Cell Reports 5:81-84, herein incorporated by reference in its entirety. These plants may then be grown, and either pollinated with the same transformed strain or different strains, and the resulting progeny having expression of the desired phenotypic characteristic identified. Two or more generations may be grown to ensure that expression of the desired phenotypic characteristic is stably maintained and inherited and then seeds harvested to ensure expression of the desired phenotypic characteristic has been achieved. In this manner, the present disclosure provides transformed seed (also referred to as “transgenic seed”) having a nucleotide construct, for example, an expression cassette, stably incorporated into its genome.

[0121] There are a variety of methods for the regeneration of plants from plant tissue. The particular method of regeneration will depend on the starting plant tissue and the particular plant species to be regenerated. The regeneration, development and cultivation of plants from single plant protoplast transformants or from various transformed explants is well known in the art (Weissbach and Weissbach, (1988) In: Methods for Plant Molecular Biology, (Eds.), Academic Press, Inc., San Diego, Calif., herein incorporated by reference in its entirety). This regeneration and growth process typically includes the steps of selection of transformed cells, culturing those individualized cells through the usual stages of embryonic development through the rooted plantlet stage. Transgenic embryos and seeds are similarly regenerated. The resulting transgenic rooted shoots are thereafter planted in an appropriate plant growth medium such as soil. Preferably, the regenerated plants are self-pollinated to provide homozygous transgenic plants. Otherwise, pollen obtained from the regenerated plants is crossed to seed-grown plants of agronomically important lines. Conversely, pollen from plants of these important lines is used to pollinate regenerated plants. A transgenic plant of the aspects containing a desired polynucleotide is cultivated using methods well known to one skilled in the art.

[0122] Methods are known in the art for the targeted insertion of a polynucleotide at a specific location in the plant genome. The insertion of the polynucleotide at a desired genomic location is achieved using a site-specific recombination system. See, for example, U.S. Pat. No. 9,222,098 B2, U.S. Pat. No. 7,223,601 B2, U.S. Pat. No. 7,179,599 B2, and U.S. Pat. No. 6,911,575 B1, all of which are herein incorporated by reference in their entirety. Briefly, a polynucleotide of interest, flanked by two non-identical recombination sites, can be contained in a T-DNA transfer cassette. The T-DNA transfer cassette is introduced into a plant having stably incorporated into its genome a target site which is flanked by two non-identical recombination sites that correspond to the sites of the transfer cassette. Alternatives to T-DNA transfer include but are not limited to, particle bombardment, electroporation, PEG transfection, or RNP (ribonucleoprotein) delivery. An appropriate recombinase is provided, and the transfer cassette is integrated at the target site. The polynucleotide of interest is thereby integrated at a specific chromosomal position in the plant genome.

[0123] In an aspect, the disclosed pre-treatment methods can be used to enhance introduction into leaf explants, polynucleotides useful to target a specific site for modification in the genome of a plant. Site specific modifications that can be introduced with the disclosed methods include those produced using any method for introducing site specific modification, including, but not limited to, through the use of gene repair oligonucleotides (e.g. US Publication 2013/0019349), or through the use of double-stranded break technologies such as TALENs, meganucleases, zinc finger nucleases, CRISPR-Cas, and the like. For example, the disclosed methods can be used to introduce a CRISPR-Cas system into a plant cell or plant, for the purpose of genome modification of a target sequence in the genome of a plant or plant cell, for selecting plants, for deleting a base or a sequence, for gene editing, and for inserting a polynucleotide of interest into the genome of a plant or plant cell. Thus, the disclosed methods can be used together with a CRISPR-Cas system to provide for an effective system for modifying or altering target sites and nucleotides of interest within the genome of a plant, plant cell or seed. The Cas endonuclease gene is a plant optimized Cas9 endonuclease, wherein the plant optimized Cas9 endonuclease is capable of binding to and creating a double strand break in a genomic target sequence the plant genome.

[0124] The Cas endonuclease is guided by the guide nucleotide to recognize and optionally introduce a double strand break at a specific target site into the genome of a cell. The CRISPR-Cas system provides for an effective system for modifying target sites within the genome of a plant, plant cell or seed. Further provided are methods and compositions employing a guide polynucleotide/Cas endonuclease system to provide an effective system for modifying target sites within the genome of a cell and for editing a nucleotide sequence in the genome of a cell. Once a genomic target site is identified, a variety of methods can be employed to further modify the target sites such that they contain a variety of polynucleotides of interest. The disclosed compositions and methods can be used to introduce a CRISPR-Cas system for editing a nucleotide sequence in the genome of a cell. The nucleotide sequence to be edited (the nucleotide sequence of interest) can be located within or outside a target site that is recognized by a Cas endonuclease.

[0125] CRISPR loci (Clustered Regularly Interspaced Short Palindromic Repeats) (also known as SPIDRs-SPacer Interspersed Direct Repeats) constitute a family of recently described DNA loci. CRISPR loci consist of short and highly conserved DNA repeats (typically 24 to 40 bp, repeated from 1 to 140 times—also referred to as CRISPR-repeats) which are partially palindromic. The repeated sequences (usually specific to a species) are interspaced by variable sequences of constant length (typically 20 to 58 by depending on the CRISPR locus (WO2007/025097 published Mar. 1, 2007).

[0126] Cas gene includes a gene that is generally coupled, associated or close to or in the vicinity of flanking CRISPR loci. The terms “Cas gene” and “CRISPR-associated (Cas) gene” are used interchangeably herein.

[0127] In another aspect, the Cas endonuclease gene is operably linked to a SV40 nuclear targeting signal upstream of the Cas codon region and a bipartite VirD2 nuclear localization signal (Tinland et al. (1992) Proc. Natl. Acad. Sci. USA 89:7442-6) downstream of the Cas codon region.

[0128] As related to the Cas endonuclease, the terms “functional fragment,” “fragment that is functionally equivalent,” and “functionally equivalent fragment” are used interchangeably herein. These terms refer to a portion or subsequence of the Cas endonuclease sequence in which the ability to create a double-strand break is retained.

[0129] As related to the Cas endonuclease, the terms “functional variant,” “variant that is functionally equivalent” and “functionally equivalent variant” are used interchangeably herein. These terms refer to a variant of the Cas endonuclease in which the ability to create a double-strand break is retained. Fragments and variants can be obtained via methods such as site-directed mutagenesis and synthetic construction.

[0130] In an aspect, the Cas endonuclease gene is a plant codon optimized Streptococcus pyogenes Cas9 gene that can recognize any genomic sequence of the form N(12-30)NGG which can in principle be targeted. Additional Cas endonucleases and methodologies are continually being developed in the art. It is expected that those additional Cas endonucleases and methodologies would be useful in the methods of the present disclosure.

[0131] Endonucleases are enzymes that cleave the phosphodiester bond within a polynucleotide chain and include restriction endonucleases that cleave DNA at specific sites without damaging the bases. Restriction endonucleases include Type I, Type II, Type III, and Type IV endonucleases, which further include subtypes. In the Type I and Type III systems, both the methylase and restriction activities are contained in a single complex. Endonucleases also include meganucleases, also known as homing endonucleases (HEases), which like restriction endonucleases, bind and cut at a specific recognition site, however the recognition sites for meganucleases are typically longer, about 18 bp or more (Patent application PCT/US 12/30061 filed on Mar. 22, 2012). Meganucleases have been classified into four families based on conserved sequence motifs. These motifs participate in the coordination of metal ions and hydrolysis of phosphodiester bonds. Meganucleases are notable for their long recognition sites, and for tolerating some sequence polymorphisms in their DNA substrates. The naming convention for meganuclease is similar to the convention for other restriction endonuclease. Meganucleases are also characterized by prefix F-, I-, or PI- for enzymes encoded by free-standing ORFs, introns, and inteins, respectively. One step in the recombination process involves polynucleotide cleavage at or near the recognition site. This cleaving activity can be used to produce a double-strand break. For reviews of site-specific recombinases and their recognition sites, see, Sauer (1994) Curr Op Biotechnol 5:521-7; and Sadowski (1993) FASEB 7:760-7. In some examples the recombinase is from the Integrase or Resolvase families. TAL effector nucleases are a new class of sequence-specific nucleases that can be used to make double-strand breaks at specific target sequences in the genome of a plant or other organism. (Miller, et al. (2011) Nature Biotechnology 29:143-148). Zinc finger nucleases (ZFNs) are engineered double-strand break inducing agents comprised of a zinc finger DNA binding domain and a double-strand-break-inducing agent domain. Recognition site specificity is conferred by the zinc finger domain, which typically comprising two, three, or four zinc fingers, for example having a C2H2 structure, however other zinc finger structures are known and have been engineered. Zinc finger domains are amenable for designing polypeptides which specifically bind a selected polynucleotide recognition sequence. ZFNs include an engineered DNA-binding zinc finger domain linked to a nonspecific endonuclease domain, for example nuclease domain from a Type Ms endonuclease such as Fokl. Additional functionalities can be fused to the zinc-finger binding domain, including transcriptional activator domains, transcription repressor domains, and methylases. In some examples, dimerization of nuclease domain is required for cleavage activity. Each zinc finger recognizes three consecutive base pairs in the target DNA. For example, a 3-finger domain recognized a sequence of 9 contiguous nucleotides, with a dimerization requirement of the nuclease, two sets of zinc finger triplets are used to bind an 18-nucleotide recognition sequence.

[0132] A “Dead-CAS9” (dCAS9) as used herein, is used to supply a transcriptional repressor domain. The dCAS9 has been mutated so that can no longer cut DNA. The dCAS9 can still bind when guided to a sequence by the gRNA and can also be fused to repressor elements. The dCAS9 fused to the repressor element, as described herein, is abbreviated to dCAS9˜REP, where the repressor element (REP) can be any of the known repressor motifs that have been characterized in plants. An expressed guide RNA (gRNA) binds to the dCAS9˜REP protein and targets the binding of the dCAS9-REP fusion protein to a specific predetermined nucleotide sequence within a promoter (a promoter within the T-DNA). For example, if this is expressed beyond—the border using a ZM-UBI PRO::dCAS9˜REP::PINII TERM cassette along with a U6-POL PRO::gRNA::U6 TERM cassette and the gRNA is designed to guide the dCAS9-REP protein to bind the SB-UBI promoter in the expression cassette SB-UBI PRO::moPAT::PINII TERM within the T-DNA, any event that has integrated the beyond-the-border sequence would be bialaphos sensitive. Transgenic events that integrate only the T-DNA would express moPAT and be bialaphos resistant. The advantage of using a dCAS9 protein fused to a repressor (as opposed to a TETR or ESR) is the ability to target these repressors to any promoter within the T-DNA. TETR and ESR are restricted to cognate operator binding sequences. Alternatively, a synthetic Zinc-Finger Nuclease fused to a repressor domain can be used in place of the gRNA and dCAS9˜REP (Urritia et al., 2003, Genome Biol. 4:231) as described above.

[0133] The type II CRISPR/Cas system from bacteria employs a crRNA and tracrRNA to guide the Cas endonuclease to its DNA target. The crRNA (CRISPR RNA) contains the region complementary to one strand of the double strand DNA target and base pairs with the tracrRNA (trans-activating CRISPR RNA) forming a RNA duplex that directs the Cas endonuclease to cleave the DNA target. As used herein, the term “guide nucleotide” relates to a synthetic fusion of two RNA molecules, a crRNA (CRISPR RNA) comprising a variable targeting domain, and a tracrRNA. In an aspect, the guide nucleotide comprises a variable targeting domain of 12 to 30 nucleotide sequences and a RNA fragment that can interact with a Cas endonuclease.

[0134] As used herein, the term “guide polynucleotide” relates to a polynucleotide sequence that can form a complex with a Cas endonuclease and enables the Cas endonuclease to recognize and optionally cleave a DNA target site. The guide polynucleotide can be a single molecule or a double molecule. The guide polynucleotide sequence can be a RNA sequence, a DNA sequence, or a combination thereof (a RNA-DNA combination sequence). Optionally, the guide polynucleotide can comprise at least one nucleotide, phosphodiester bond or linkage modification such as, but not limited, to Locked Nucleic Acid (LNA), 5-methyl dC, 2,6-Diaminopurine, 2′-Fluoro A, 2′-Fluoro U, 2′-O-Methyl RNA, phosphorothioate bond, linkage to a cholesterol molecule, linkage to a polyethylene glycol molecule, linkage to a spacer 18 (hexaethylene glycol chain) molecule, or 5′ to 3′ covalent linkage resulting in circularization. A guide polynucleotide that solely comprises ribonucleic acids is also referred to as a “guide nucleotide”.

[0135] Nucleotide sequence modification of the guide polynucleotide, VT domain and/or CER domain can be selected from, but not limited to, the group consisting of a 5′ cap, a 3′ polyadenylated tail, a riboswitch sequence, a stability control sequence, a sequence that forms a dsRNA duplex, a modification or sequence that targets the guide poly nucleotide to a subcellular location, a modification or sequence that provides for tracking, a modification or sequence that provides a binding site for proteins, a Locked Nucleic Acid (LNA), a 5-methyl dC nucleotide, a 2,6-Diaminopurine nucleotide, a 2′-Fluoro A nucleotide, a 2′-Fluoro U nucleotide; a 2′-O-Methyl RNA nucleotide, a phosphorothioate bond, linkage to a cholesterol molecule, linkage to a polyethylene glycol molecule, linkage to a spacer 18 molecule, a 5′ to 3′ covalent linkage, or any combination thereof. These modifications can result in at least one additional beneficial feature, wherein the additional beneficial feature is selected from the group of a modified or regulated stability, a subcellular targeting, tracking, a fluorescent label, a binding site for a protein or protein complex, modified binding affinity to complementary target sequence, modified resistance to cellular degradation, and increased cellular permeability.

[0136] In an aspect, the guide nucleotide and Cas endonuclease are capable of forming a complex that enables the Cas endonuclease to introduce a double strand break at a DNA target site.

[0137] In an aspect of the methods of the disclosure the variable target domain is 12, 13, 14, 15, 16, 17, 18, 19, 20, 21, 22, 23, 24, 25, 26, 27, 28, 29 or 30 nucleotides in length.

[0138] In an aspect of the methods of the disclosure, the guide nucleotide comprises a cRNA (or cRNA fragment) and a tracrRNA (or tracrRNA fragment) of the type II CRISPR/Cas system that can form a complex with a type II Cas endonuclease, wherein the guide nucleotide Cas endonuclease complex can direct the Cas endonuclease to a plant genomic target site, enabling the Cas endonuclease to introduce a double strand break into the genomic target site. The guide nucleotide can be introduced into a plant or plant cell directly using any method known in the art such as, but not limited to, particle bombardment or topical applications.

[0139] In an aspect, the guide nucleotide can be introduced indirectly by introducing a recombinant DNA molecule comprising the corresponding guide DNA sequence operably linked to a plant specific promoter that is capable of transcribing the guide nucleotide in the plant cell. The term “corresponding guide DNA” includes a DNA molecule that is identical to the RNA molecule but has a “T” substituted for each “U” of the RNA molecule.

[0140] In an aspect, the guide nucleotide is introduced via particle bombardment or using the disclosed methods and compositions for Agrobacterium transformation of a recombinant DNA construct comprising the corresponding guide DNA operably linked to a plant U6 polymerase III promoter.

[0141] In an aspect, the RNA that guides the RNA Cas9 endonuclease complex, is a duplexed RNA comprising a duplex crRNA-tracrRNA. One advantage of using a guide nucleotide versus a duplexed crRNA-tracrRNA is that only one expression cassette needs to be made to express the fused guide nucleotide.

[0142] The terms “target site,” “target sequence,” “target DNA,” “target locus,” “genomic target site,” “genomic target sequence,” and “genomic target locus” are used interchangeably herein and refer to a polynucleotide sequence in the genome (including chloroplastic and mitochondrial DNA) of a plant cell at which a double-strand break is induced in the plant cell genome by a Cas endonuclease. The target site can be an endogenous site in the plant genome, or alternatively, the target site can be heterologous to the plant and thereby not be naturally occurring in the genome, or the target site can be found in a heterologous genomic location compared to where it occurs in nature.

[0143] As used herein, terms “endogenous target sequence” and “native target sequence” are used interchangeably herein to refer to a target sequence that is endogenous or native to the genome of a plant and is at the endogenous or native position of that target sequence in the genome of the plant. In an aspect, the target site can be similar to a DNA recognition site or target site that is specifically recognized and/or bound by a double-strand break inducing agent such as a LIG3-4 endonuclease (US patent publication 2009/0133152 A1 (published May 21, 2009) or a MS26++ meganuclease (U.S. patent application Ser. No. 13/526,912 filed Jun. 19, 2012).

[0144] An “artificial target site” or “artificial target sequence” are used interchangeably herein and refer to a target sequence that has been introduced into the genome of a plant. Such an artificial target sequence can be identical in sequence to an endogenous or native target sequence in the genome of a plant but be located in a different position (i.e., a non-endogenous or non-native position) in the genome of a plant.

[0145] An “altered target site,” “altered target sequence” “modified target site,” and “modified target sequence” are used interchangeably herein and refer to a target sequence as disclosed herein that comprises at least one alteration when compared to non-altered target sequence. Such “alterations” include, for example: (i) replacement of at least one nucleotide, (ii) a deletion of at least one nucleotide, (iii) an insertion of at least one nucleotide, or (iv) any combination of (i)-(iii).

[0146] In an aspect, the disclosed methods can be used to introduce into plants polynucleotides useful for gene suppression of a target gene in a plant. Reduction of the activity of specific genes (also known as gene silencing, or gene suppression) is desirable for several aspects of genetic engineering in plants. Many techniques for gene silencing are well known to one of skill in the art, including but not limited to antisense technology.

[0147] In an aspect, the disclosed methods can be used to introduce into plants polynucleotides useful for the targeted integration of nucleotide sequences into a plant. For example, the disclosed methods can be used to introduce T-DNA expression cassettes comprising nucleotide sequences of interest flanked by non-identical recombination sites are used to transform a plant comprising a target site. In an aspect, the target site contains at least a set of non-identical recombination sites corresponding to those on the T-DNA expression cassette. The exchange of the nucleotide sequences flanked by the recombination sites is affected by a recombinase. Thus, the disclosed methods can be used for the introduction of T-DNA expression cassettes for targeted integration of nucleotide sequences, wherein the T-DNA expression cassettes which are flanked by non-identical recombination sites recognized by a recombinase that recognizes and implements recombination at the nonidentical recombination sites. Accordingly, the disclosed methods and composition can be used to improve efficiency and speed of development of plants containing non-identical recombination sites.

[0148] Thus, the disclosed methods can further comprise methods for the directional, targeted integration of exogenous nucleotides into a transformed plant. In an aspect, the disclosed methods use novel recombination sites in a gene targeting system which facilitates directional targeting of desired genes and nucleotide sequences into corresponding recombination sites previously introduced into the target plant genome.

[0149] In an aspect, a nucleotide sequence flanked by two non-identical recombination sites is introduced into one or more cells of an explant derived from the target organism's genome establishing a target site for insertion of nucleotide sequences of interest. Once a stable plant or cultured tissue is established a second construct, or nucleotide sequence of interest, flanked by corresponding recombination sites as those flanking the target site, is introduced into the stably transformed plant or tissues in the presence of a recombinase protein. This process results in exchange of the nucleotide sequences between the non-identical recombination sites of the target site and the T-DNA expression cassette.

[0150] It is recognized that the transformed plant prepared in this manner may comprise multiple target sites; i.e., sets of non-identical recombination sites. In this manner, multiple manipulations of the target site in the transformed plant are available. By target site in the transformed plant is intended a DNA sequence that has been inserted into the transformed plant's genome and comprises non-identical recombination sites.

[0151] Examples of recombination sites for use in the disclosed method are known. The two-micron plasmid found in most naturally occurring strains of Saccharomyces cerevisiae, encodes a site-specific recombinase that promotes an inversion of the DNA between two inverted repeats. This inversion plays a central role in plasmid copy-number amplification.

[0152] The protein, designated FLP protein, catalyzes site-specific recombination events. The minimal recombination site (FRT) has been defined and contains two inverted 13-base pair (bp) repeats surrounding an asymmetric 8-bp spacer. The FLP protein cleaves the site at the junctions of the repeats and the spacer and is covalently linked to the DNA via a 3′phosphate. Site specific recombinases like FLP cleave and re-ligate DNA at specific target sequences, resulting in a precisely defined recombination between two identical sites. To function, the system needs the recombination sites and the recombinase. No auxiliary factors are needed. Thus, the entire system can be inserted into and function in plant cells. The yeast FLP\FRT site specific recombination system has been shown to function in plants. To date, the system has been utilized for excision of unwanted DNA. See, Lyznik et at. (1993) Nucleic Acid Res. 21:969-975. In contrast, the present disclosure utilizes non-identical FRTs for the exchange, targeting, arrangement, insertion and control of expression of nucleotide sequences in the plant genome.

[0153] In an aspect, a transformed organism of interest, such as an explant from a plant, containing a target site integrated into its genome is needed. The target site is characterized by being flanked by non-identical recombination sites. A targeting cassette is additionally required containing a nucleotide sequence flanked by corresponding non-identical recombination sites as those sites contained in the target site of the transformed organism. A recombinase which recognizes the non-identical recombination sites and catalyzes site-specific recombination is required.

[0154] It is recognized that the recombinase can be provided by any means known in the art. That is, it can be provided in the organism or plant cell by transforming the organism with an expression cassette capable of expressing the recombinase in the organism, by transient expression, or by providing messenger RNA (mRNA) for the recombinase or the recombinase protein.

[0155] By “non-identical recombination sites” it is intended that the flanking recombination sites are not identical in sequence and will not recombine or recombination between the sites will be minimal. That is, one flanking recombination site may be a FRT site where the second recombination site may be a mutated FRT site. The non-identical recombination sites used in the methods of the present disclosure prevent or greatly suppress recombination between the two flanking recombination sites and excision of the nucleotide sequence contained therein. Accordingly, it is recognized that any suitable non-identical recombination sites may be utilized in the present disclosure, including FRT and mutant FRT sites, FRT and lox sites, lox and mutant lox sites, as well as other recombination sites known in the art.

[0156] By suitable non-identical recombination site implies that in the presence of active recombinase, excision of sequences between two non-identical recombination sites occurs, if at all, with an efficiency considerably lower than the recombinationally-mediated exchange targeting arrangement of nucleotide sequences into the plant genome. Thus, suitable non-identical sites for use in the present disclosure include those sites where the efficiency of recombination between the sites is low; for example, where the efficiency is less than about 30 to about 50%, preferably less than about 10 to about 30%, more preferably less than about 5 to about 10%.

[0157] As noted above, the recombination sites in the targeting cassette correspond to those in the target site of the transformed plant. That is, if the target site of the transformed plant contains flanking non-identical recombination sites of FRT and a mutant FRT, the targeting cassette will contain the same FRT and mutant FRT non-identical recombination sites.

[0158] It is furthermore recognized that the recombinase, which is used in the disclosed methods, will depend upon the recombination sites in the target site of the transformed plant and the targeting cassette. That is, if FRT sites are utilized, the FLP recombinase will be needed. In the same manner, where lox sites are utilized, the Cre recombinase is required. If the non-identical recombination sites comprise both a FRT and a lox site, both the FLP and Cre recombinase will be required in the plant cell.

[0159] The FLP recombinase is a protein which catalyzes a site-specific reaction that is involved in amplifying the copy number of the two-micron plasmid of S. cerevisiae during DNA replication. FLP protein has been cloned and expressed. See, for example, Cox (1993) Proc. Natl. Acad. Sci. U.S.A. 80:4223-4227. The FLP recombinase for use in the present disclosure may be that derived from the genus Saccharomyces. It may be preferable to synthesize the recombinase using plant preferred codons for optimum expression in a plant of interest. See, for example, U.S. application Ser. No. 08/972,258 filed Nov. 18, 1997, entitled “Novel Nucleic Acid Sequence Encoding FLP Recombinase,” herein incorporated by reference.

[0160] The bacteriophage recombinase Cre catalyzes site-specific recombination between two lox sites. The Cre recombinase is known in the art. See, for example, Guo et al. (1997) Nature 389:40-46; Abremski et al. (1984) J. Biol. Chem. 259:1509-1514; Chen et al. (1996) Somat. Cell Mol. Genet. 22:477-488; and Shaikh et al. (1977) J. Biol. Chem. 272:5695-5702. All of which are herein incorporated by reference. Such Cre sequence may also be synthesized using plant preferred codons.

[0161] Where appropriate, the nucleotide sequences to be inserted in the plant genome may be optimized for increased expression in the transformed plant. Where mammalian, yeast, or bacterial genes are used in the present disclosure, they can be synthesized using plant preferred codons for improved expression. It is recognized that for expression in monocots, dicot genes can also be synthesized using monocot preferred codons. Methods are available in the art for synthesizing plant preferred genes. See, for example, U.S. Pat. Nos. 5,380,831,5,436,391, and Murray et al. (1989) Nucleic Acids Res. 17:477-498, herein incorporated by reference. The plant preferred codons may be determined from the codons utilized more frequently in the proteins expressed in the plant of interest. It is recognized that monocot or dicot preferred sequences may be constructed as well as plant preferred sequences for particular plant species. See, for example, EPA 0359472; EPA 0385962; WO 91/16432; Perlak et al. (1991) Proc. Natl. Acad. Sci. USA, 88:3324-3328; and Murray et al. (1989) Nucleic Acids Research, 17:477-498. U.S. Pat. Nos. 5,380,831; 5,436,391; and the like, herein incorporated by reference. It is further recognized that all or any part of the gene sequence may be optimized or synthetic. That is, fully optimized or partially optimized sequences may also be used.

[0162] Additional sequence modifications are known to enhance gene expression in a cellular host and can be used in the present disclosure. These include elimination of sequences encoding spurious polyadenylation signals, exon-intron splice site signals, transposon-like repeats, and other such well-characterized sequences, which may be deleterious to gene expression. The G-C content of the sequence may be adjusted to levels average for a given cellular host, as calculated by reference to known genes expressed in the host cell. When possible, the sequence is modified to avoid predicted hairpin secondary RNA structures.

[0163] The present disclosure also encompasses novel FLP recombination target sites (FRT). The FRT has been identified as a minimal sequence comprising two 13 base pair repeats, separated by an eight (8) base spacer. The nucleotides in the spacer region can be replaced with a combination of nucleotides, so long as the two 13-base repeats are separated by eight nucleotides. It appears that the actual nucleotide sequence of the spacer is not critical; however, for the practice of the present disclosure, some substitutions of nucleotides in the space region may work better than others. The eight-base pair spacer is involved in DNA-DNA pairing during strand exchange. The asymmetry of the region determines the direction of site alignment in the recombination event, which will subsequently lead to either inversion or excision. As indicated above, most of the spacer can be mutated without a loss of function. See, for example, Schlake and Bode (1994) Biochemistry 33:12746-12751, herein incorporated by reference.

[0164] Novel FRT mutant sites can be used in the practice of the disclosed methods. Such mutant sites may be constructed by PCR-based mutagenesis. Although mutant FRT sites are known (see SEQ ID Nos 2, 3, 4 and 5 of WO1999/025821), it is recognized that other mutant FRT sites may be used in the practice of the present disclosure. The present disclosure is not restricted to the use of a particular FRT or recombination site, but rather that non-identical recombination sites or FRT sites can be utilized for targeted insertion and expression of nucleotide sequences in a plant genome. Thus, other mutant FRT sites can be constructed and utilized based upon the present disclosure.

[0165] As discussed above, bringing genomic DNA containing a target site with non-identical recombination sites together with a vector containing a T-DNA expression cassette with corresponding non-identical recombination sites, in the presence of the recombinase, results in recombination. The nucleotide sequence of the T-DNA expression cassette located between the flanking recombination sites is exchanged with the nucleotide sequence of the target site located between the flanking recombination sites. In this manner, nucleotide sequences of interest may be precisely incorporated into the genome of the host.

[0166] It is recognized that many variations of the present disclosure can be practiced. For example, target sites can be constructed having multiple non-identical recombination sites. Thus, multiple genes or nucleotide sequences can be stacked or ordered at precise locations in the plant genome. Likewise, once a target site has been established within the genome, additional recombination sites may be introduced by incorporating such sites within the nucleotide sequence of the T-DNA expression cassette and the transfer of the sites to the target sequence. Thus, once a target site has been established, it is possible to subsequently add sites, or alter sites through recombination.

[0167] Another variation includes providing a promoter or transcription initiation region operably linked with the target site in an organism. Preferably, the promoter will be 5′ to the first recombination site. By transforming the organism with a T-DNA expression cassette comprising a coding region, expression of the coding region will occur upon integration of the T-DNA expression cassette into the target site. This aspect provides for a method to select transformed cells, particularly plant cells, by providing a selectable marker sequence as the coding sequence.

[0168] Other advantages of the present system include the ability to reduce the complexity of integration of transgenes or transferred DNA in an organism by utilizing T-DNA expression cassettes as discussed above and selecting organisms with simple integration patterns. In the same manner, preferred sites within the genome can be identified by comparing several transformation events. A preferred site within the genome includes one that does not disrupt expression of essential sequences and provides for adequate expression of the transgene sequence.

[0169] The disclosed methods also provide for means to combine multiple expression cassettes at one location within the genome. Recombination sites may be added or deleted at target sites within the genome.

[0170] Any means known in the art for bringing the three components of the system together may be used in the present disclosure. For example, a plant can be stably transformed to harbor the target site in its genome. The recombinase may be transiently expressed or provided. Alternatively, a nucleotide sequence capable of expressing the recombinase may be stably integrated into the genome of the plant. In the presence of the corresponding target site and the recombinase, the T-DNA expression cassette, flanked by corresponding non-identical recombination sites, is inserted into the transformed plant's genome.

[0171] Alternatively, the components of the system may be brought together by sexually crossing transformed plants. In this aspect, a transformed plant, parent one, containing a target site integrated in its genome can be sexually crossed with a second plant, parent two, that has been genetically transformed with a T-DNA expression cassette containing flanking non-identical recombination sites, which correspond to those in plant one. Either plant one or plant two contains within its genome a nucleotide sequence expressing recombinase. The recombinase may be under the control of a constitutive or inducible promoter. In this manner, expression of recombinase and subsequent activity at the recombination sites can be controlled.

[0172] The disclosed methods are useful in targeting the integration of transferred nucleotide sequences to a specific chromosomal site. The nucleotide sequence may encode any nucleotide sequence of interest. Particular genes of interest include those which provide a readily analyzable functional feature to the host cell and/or organism, such as marker genes, as well as other genes that alter the phenotype of the recipient cells, and the like. Thus, genes effecting plant growth, height, susceptibility to disease, insects, nutritional value, and the like may be utilized in the present disclosure. The nucleotide sequence also may encode an ‘antisense’ sequence to turn off or modify gene expression.

[0173] It is recognized that the nucleotide sequences will be utilized in a functional expression unit or T-DNA expression cassette. By functional expression unit or T-DNA expression cassette is intended, the nucleotide sequence of interest with a functional promoter, and in most instances a termination region. There are various ways to achieve the functional expression unit within the practice of the present disclosure. In one aspect of the present disclosure, the nucleic acid of interest is transferred or inserted into the genome as a functional expression unit.

[0174] Alternatively, the nucleotide sequence may be inserted into a site within the genome which is 3′ to a promoter region. In this latter instance, the insertion of the coding sequence 3′ to the promoter region is such that a functional expression unit is achieved upon integration. The T-DNA expression cassette will comprise a transcriptional initiation region, or promoter, operably linked to the nucleic acid encoding the peptide of interest. Such an expression cassette is provided with a plurality of restriction sites for insertion of the gene or genes of interest to be under the transcriptional regulation of the regulatory regions.

[0175] The following examples are offered by way of illustration and not by way of limitation.

### EXAMPLES

[0176] The aspects of the disclosure are further defined in the following Examples, in which parts and percentages are by weight and degrees are Celsius, unless otherwise stated. These Examples, while indicating aspects of the disclosure, are given by way of illustration only. From the above discussion and these Examples, one skilled in the art can ascertain the essential characteristics of the aspects of the disclosure, and without departing from the spirit and scope thereof, can make various changes and modifications of them to adapt to various usages and conditions. Thus, various modifications in addition to those shown and described herein will be apparent to those skilled in the art from the foregoing description. Such modifications are also intended to fall within the scope of the appended claims.

### Example 1: Sequences

[0177] Sequences useful in the methods of the disclosure are presented in Table 2.

TABLE 2

| SEQ | Polynucleotide (DNA) | | |
|---|---|---|---|
| ID NO: | or Polypeptide (PRT) | NAME | DESCRIPTION |
| 1 | DNA | PHP35648 | RB + UBI1ZM PRO::UBI1ZM 5UTR::UBI1ZM |
| | | | INTRON1::LOXP::AM-CYAN1::PINII TERM + |
| | | | RAB17 PRO::MO-CRE-EXON1::ST-LS1 |
| | | | INTRON1::MO-CRE EXON2::PINII TERM + |
| | | | GZ-W64A TERM + NOS PRO::ZM- |
| | | | WUS2::PINII TERM + CAMV35S |
| | | | ENH::UBI1ZM PRO PRO::UBI1ZM |
| | | | 5UTR::UBI1ZM INTRON1::ZM-ODP2::PINII |
| | | | TERM + LOXP::ZS-YELLOW1 N1::PINII |
| | | | TERM + UBI1ZM PRO::UBI1ZM |
| | | | 5UTR::UBI1ZM INTRON1::MO-PAT::PINII |
| | | | TERM + LB |
| 2 | DNA | PHP46332 | RB + UBI1ZM 5UTR::UBI1ZM |
| | | | INTRON1::LOXP::AM-CYAN1::PINII TERM + |
| | | | RAB17 PRO::MO-CRE-EXON1::ST-LS1 |
| | | | INTRON1::MO-CRE EXON2::PINII TERM + |
| | | | NOS PRO::ZM-WUS2::PINII TERM + UBI1ZM |
| | | | PRO PRO::UBI1ZM 5UTR::UBI1ZM |
| | | | INTRON1::ZM-ODP2::PINII TERM + |
| | | | LOXP::ZS-YELLOW1 N1::PINII TERM + |
| | | | UBI1ZM PRO::UBI1ZM 5UTR::UBI1ZM |
| | | | INTRON1::MO-PAT::PINII TERM + LB |
| 3 | DNA | PHP5096 | UBI1ZM 5UTR::UBI1ZM |
| | | | INTRON1::LOXP::FLPM::PINII TERM |
| 4 | DNA | PHP71539 | VIRB1 + VIRB2 + VIRB3 + VIRB4 + VIRB5 + |
| | | | VIRB6 + VIRB7 + VIRB8 + VIRB9 + VIRB 10 + |
| | | | VIRB11 + VIRG + VIRC2 + VIRC1 + VIRD1 + |
| | | | VIRD2 + VIRD3 + VIRD4 + VIRD5 + VIRE1 + |
| | | | VIRE2 + VIRE3 + GENT + COLE1 ORI + PVS1 |
| | | | ORI |
| 5 | DNA | PHP81855 | RB + LOXP + 8xDR5 ENH::CAMV35S |
| | | | PRO::TOP3::ZM-WUS2::PINII TERM + PLTP |
| | | | PRO::TOP::ZM-ODP2::OS-T28 TERM + RAB17 |
| | | | PRO::MO-CRE-EXON1::ST-LS1 |
| | | | INTRON1::MO-CRE EXON2::PINII + LOXP + |
| | | | UBI1ZM 5UTR::UBI1ZM |
| | | | INTRON1::FRT1::NPTII::PINII TERM + |
| | | | UBI1ZM PRO::UBI1ZM 5UTR::UBI1ZM |
| | | | INTRON1::MO-PAT::PINII TERM + FRT6 + LB |
| 6 | DNA | PHP81856 | RB + LOXP + ZM-AXIG1 PRO::TOP::ZM- |
| | | | WUS2::IN2-1 TERM + PLTP PRO::TOP::ZM- |
| | | | ODP2::OS-T28 TERM + RAB17 PRO:: MO- |
| | | | CRE-EXON1::ST-LS1 INTRON1::MO-CRE |
| | | | EXON2::PINII + LOXP + UBI1ZM |
| | | | 5UTR::UBI1ZM INTRON1::FRT1::NPTII::PINII |
| | | | TERM + UBI1ZM PRO::UBI1ZM |
| | | | 5UTR::UBI1ZM INTRON1::MO-PAT::PINII |
| | | | TERM + FRT6 + LB |
| 7 | DNA | PHP81857 | RB + LOXP + NOS PRO::2xTOP::ZM- |
| | | | WUS2::IN2-1 TERM + PLTP PRO::TOP::ZM- |
| | | | ODP2::OS-T28 TERM + RAB17 PRO:: MO- |
| | | | CRE-EXON1::ST-LS1 INTRON1::MO-CRE |
| | | | EXON2::PINII + LOXP + UBI1ZM |
| | | | 5UTR::UBI1ZM INTRON1::FRT1::NPTII::PINII |
| | | | TERM + UBI1ZM PRO::UBI1ZM |
| | | | 5UTR::UBI1ZM INTRON1::AM-CYAN1::PINII |
| | | | TERM + FRT6 + LB |
| 8 | DNA | PHP81858 | RB + LOXP + NOS PRO::ZM-WUS2::IN2-1 |
| | | | TERM + PLTP PRO::TOP::ZM-ODP2::OS-T28 |
| | | | TERM + RAB17 PRO:: MO-CRE-EXON1::ST- |
| | | | LS1 INTRON1::MO-CRE EXON2::PINII + |
| | | | LOXP + UBI1ZM PRO::UBI1ZM |
| | | | 5UTR::UBI1ZM INTRON1::FRT1::NPTII::PINII |
| | | | TERM + UBI1ZM PRO::UBI1ZM |
| | | | 5UTR::UBI1ZM INTRON1::AM-CYAN1::PINII |
| | | | TERM + FRT6 + LB |
| 9 | DNA | PHP83475 | RB + LOXP + PLTP PRO::ZM-WUS2::IN2-1 |
| | | | TERM + AT-5-IV-2 INS + ZM-HSP17.7 |
| | | | PRO::MO-CRE-EXON1::ST-LS1 |
| | | | INTRON1::MO-CRE EXON2::PINII + UBI1ZM |
| | | | PRO::UBI1ZM 5UTR::UBI1ZM INTRON1::DS- |
| | | | RED2::PINII TERM + LOXP + SB-ALS |
| | | | PRO::ZM-ALS (HRA)::PINII TERM + LB |
| 10 | DNA | PHP83621 | RB + LOXP + PLTP PRO::ZM-WUS2::IN2-1 |
| | | | TERM + AT-5-IV-2 INS + PLTP |
| | | | PRO::TOP::ZM-ODP2::OS-T28 TERM + GLB1 |
| | | | PRO::MO-CRE-EXON1::ST-LS1 |
| | | | INTRON1::MO-CRE EXON2::PINII + LOXP + |
| | | | SB-ALS PRO::ZM-ALS (HRA)::PINII TERM + |
| | | | LB |
| 11 | DNA | PHP83652 | RB + LOXP + ZM-AXIG1 PRO::ZM- |
| | | | WUS2::IN2-1 TERM + AT-5-IV-2 INS + PLTP |
| | | | PRO::TOP::ZM-ODP2::OS-T28 TERM::PINII |
| | | | TERM::CZ19B1 TERM + ZM-HSP18A |
| | | | PRO::MO-CRE-EXON1::ST-LS1 |
| | | | INTRON1::MO-CRE EXON2::PINII + SB-UBI |
| | | | PRO:: SB-UBI INTRON1::ZS-GREEN1::OS-UBI |
| | | | TERM + LOXP + SB-ALS PRO::ZM-ALS |
| | | | (HRA)::PINII TERM + LB |
| 12 | DNA | PHP89030 | ZM-PLTP PRO::ZM-ODP2::OS-T28 TERM + |
| | | | FMV ENH + PCSV ENH |
| 13 | DNA | PHP89179 | ZM-PLTP PRO::ZM-WUS2::IN2-1 TERM + |
| | | | PSW1 + GZ-W64A TERM + FL2 TERM |
| 14 | DNA | PHP90842 | RB + UBI1ZMPRO::UBI1ZM 5UTR::UBI1ZM |
| | | | INTRON1::FLPM-EXON1::ST-LS1 |
| | | | INTRON2::FLPM-EXON2::PINII TERM::AT-T9 |
| | | | TERM + FRT1::PMI::PINII TERM::CZ19B1 |
| | | | TERM + OS-ACTIN PRO::OS-ACTIN |
| | | | INTRON1::ZM-WUS2::ZM-IN2-1 TERM + |
| | | | UBI1ZMPRO::UBI1ZM 5UTR::UBI1ZM |
| | | | INTRON1::ZM-ODP2::OS-T28 TERM::GZ- |
| | | | W64A TERM:: FL2 TERM + ZM-HSP17.7 |
| | | | PRO::MO-CRE-EXON1::ST-LS1 |
| | | | INTRON1::MO-CRE EXON2::SB-CPI8 TERM + |
| | | | LOXP + SB-UBI PRO::SB-UBI INTRON1::DS- |
| | | | RED2::SB-ACTIN TERM + FRT6 + LB |
| 15 | DNA | PHP92365 | RB + LOXP + PLTP PRO::ZM-WUS2::IN2-1 |
| | | | TERM + UBI1ZMPRO::UBI1ZM |
| | | | 5UTR::UBI1ZM INTRON1::ZM-LECI::OS-UBI |
| | | | TERM + LOXP + SI-UBI3 PRO::SI-UBI3 |
| | | | INTRON1::ZS-GREEN1::PINII TERM + SB- |
| | | | ALS PRO::ZM-ALS (HRA)::SB-PEPC1 TERM + |
| | | | LB |
| 16 | DNA | PHP92765 | RB + LOXP + PLTP PRO::ZM-WUS2::IN2-1 |
| | | | TERM + ZM-PLTP2 PRO::ZM-MPKL-A::ZM |
| | | | MIRNA PRECURSOR 396H::ZM-PKL-A STAR |
| | | | SEQ::SB-GKAF TERM + ZM-HSP17.7 |
| | | | PRO::MO-CRE-EXON1::ST-LS1 |
| | | | INTRON1::MO-CRE EXON2::PINII + LOXP + |
| | | | LB |
| 17 | DNA | PHP92928 | RB + FMV ENH::PCSV ENH::MMV |
| | | | ENH::PLTP PRO::ZM-WUS2::IN2-1 TERM + |
| | | | UBI1ZMPRO::UBI1ZM 5UTR::UBI1ZM |
| | | | INTRON1::ZM-LEC1::OS-T28 TERM + SI-UBI3 |
| | | | PRO::SI-UBI3 INTRON1::ZS-GREEN1::PINII |
| | | | TERM + SB-ALS PRO::ZM-ALS (HRA)::SB- |
| | | | PEPC1 TERM + LB |
| 18 | DNA | PHP93271 | RB + PLTP PRO::ZM-WUS2::IN2-1 TERM + |
| | | | UBI1ZMPRO::UBI1ZM 5UTR::UBI1ZM |
| | | | INTRON1::REP A (WDV)::OS-T28 TERM + SB- |
| | | | UBI PRO::SB-UBI INTRON1::ZS-GREEN1::OS- |
| | | | UBI TERM + SB-ALS PRO::ZM-ALS |
| | | | (HRA)::SB-PEPC1 TERM + LB |
| 19 | DNA | PHP93559 | RB + LOXP + ZM-HSP17.7 PRO::MO-CRE- |
| | | | EXON1::ST-LS1 INTRON1::MO-CRE |
| | | | EXON2::PINII TERM + NOS PRO::ZM- |
| | | | WUS2::IN2-1 TERM + UBI1ZM PRO::UBI1ZM |
| | | | 5UTR::UBI1ZM INTRON1::ZM-ODP2::ZM-UBI |
| | | | TERM + LOXP + SB-UBI PRO::SB-UBI |
| | | | INTRON1::ZS-GREEN1::OS-UBI TERM + SB- |
| | | | UBI PRO::SB-UBI INTRON1::PMI::SB-UBI |
| | | | TERM + LB |
| 20 | DNA | PHP93613 | RB + LOXP + ZM-HSP17.7 PRO::MO-CRE- |
| | | | EXON1::ST-LS1 INTRON1::MO-CRE |
| | | | EXON2::PINII TERM + OS-ACTIN PRO::OS- |
| | | | ACTIN INTRON1::ZM-WUS2::IN2-1 TERM + |
| | | | UBI1ZM PRO::UBI1ZM 5UTR::UBI1ZM |
| | | | INTRON1::ZM-LEC1::OS-T28 TERM + LOXP + |
| | | | SB-UBI PRO::SB-UBI INTRON1::ZS- |
| | | | GREEN1::OS-UBI TERM + SI-ALS PRO::SI- |
| | | | ALS 5UTR::ZM-ALS (HRA)::SB-UBI TERM + |
| | | | LB |
| 21 | DNA | PHP93696 | RB + LOXP + ZM-HSP17.7 PRO::MO-CRE- |
| | | | EXON1::ST-LS1 INTRON1::MO-CRE |
| | | | EXON2::PINII TERM + 2xOC-EME1::UBI1ZM |
| | | | PRO::UBI1ZM 5UTR::UBI1ZM |
| | | | INTRON1::LOXP::2xOC-EME1::ZM-CAB |
| | | | PRO::ZM-WUS2::IN2-1 TERM + LOXP::ZM- |
| | | | LEC1::OS-T28 TERM + SB-UBI PRO::SB-UBI |
| | | | INTRON1::ZS-GREEN1::OS-UBI TERM + SI- |
| | | | ALS PRO::SI-ALS 5UTR::ZM-ALS (HRA)::SB- |
| | | | UBI TERM + LB |
| 22 | DNA | PHP93738 | RB + LOXP + ZM-HSP17.7 PRO::MO-CRE- |
| | | | EXON1::ST-LS1 INTRON1::MO-CRE |
| | | | EXON2::PINII TERM + OS-ACTIN PRO::OS- |
| | | | ACTIN INTRON1::ZM-WUS2::ZM-IN2-1 |
| | | | TERM + UBI1ZMPRO::UBI1ZM |
| | | | 5UTR::UBI1ZM INTRON1::ZM-ODP2::OS-T28 |
| | | | TERM + LOXP + SB-UBI PRO::SB-UBI |
| | | | INTRON1::ZS-GREEN1::OS-UBI TERM + SI- |
| | | | ALS PRO::SI-ALS 5UTR::ZM-ALS (HRA)::SB- |
| | | | UBI TERM + LB |
| 23 | DNA | PHP93739 | RB + LOXP + ZM-HSP17.7 PRO::MO-CRE- |
| | | | EXON1::ST-LS1 INTRON1::MO-CRE |
| | | | EXON2::PINII TERM + NOS PRO::ZM- |
| | | | WUS2::ZM-IN2-1 TERM + |
| | | | UBI1ZMPRO::UBI1ZM 5UTR::UBI1ZM |
| | | | INTRON1::ZM-ODP2::ZM-UBI TERM + LOXP + |
| | | | SB-UBI PRO::SB-UBI INTRON1::ZS- |
| | | | GREEN1::OS-UBI TERM + SI-ALS PRO::SI- |
| | | | ALS 5UTR::ZM-ALS (HRA)::SB-UBI TERM + |
| | | | LB |
| 24 | DNA | PHP93743 | RB + LOXP + ZM-HSP17.7 PRO::MO-CRE- |
| | | | EXON1::ST-LS1 INTRON1::MO-CRE |
| | | | EXON2::PINII TERM + SCBV PRO::SCBV |
| | | | 5UTR::ZM-WUS2::ZM-IN2-1 TERM + |
| | | | UBI1ZMPRO::UBI1ZM 5UTR::UBI1ZM |
| | | | INTRON1::REP A (WDV)::OS-T28 TERM + |
| | | | LOXP + SB-UBI PRO::SB-UBI INTRON1::ZS- |
| | | | GREEN1::OS-UBI TERM + SI-ALS PRO::SI- |
| | | | ALS 5UTR::ZM-ALS (HRA)::SB-UBI TERM + |
| | | | LB |
| 25 | DNA | PHP93766 | RB + LOXP + ZM-HSP17.7 PRO::MO-CRE- |
| | | | EXON1::ST-LS1 INTRON1::MO-CRE |
| | | | EXON2::PINII TERM + NOS PRO::ZM- |
| | | | WUS2::ZM-IN2-1 TERM + |
| | | | UBI1ZMPRO::UBI1ZM 5UTR::UBI1ZM |
| | | | INTRON1::ZM-LEC1::OS-T28 TERM + LOXP + |
| | | | SB-UBI PRO::SB-UBI INTRON1::ZS- |
| | | | GREEN1::OS-UBI TERM + SI-ALS PRO::SI- |
| | | | ALS 5UTR::ZM-ALS (HRA)::SB-UBI TERM + |
| | | | LB |
| 26 | DNA | PHP93925 | RB + UBI1ZMPRO::UBI1ZM 5UTR::UBI1ZM |
| | | | INTRON1::ZM-WUS2::ZM-IN2-1 TERM + |
| | | | FMV ENH:PCSV ENH:MMV ENH::SB-UBI |
| | | | PRO::SB-UBII INTRON1::ZM-ODP2::ZM-UBI |
| | | | TERM + SB-UBI PRO::SB-UBI INTRON1::ZS- |
| | | | GREEN1::OS-UBI TERM + SI-ALS PRO::SI- |
| | | | ALS 5UTR::ZM-ALS (HRA)::SB-UBI TERM + |
| | | | LB |
| 27 | DNA | PHP93926 | RB + LOXP + ZM-HSP17.7 PRO::MO-CRE- |
| | | | EXON1::ST-LS1 INTRON1::MO-CRE |
| | | | EXON2::PINII TERM + NOS PRO::ZM- |
| | | | WUS2::ZM-IN2-1 TERM + |
| | | | UBI1ZMPRO::UBI1ZM 5UTR::UBI1ZM |
| | | | INTRON1::ZM-ODP2::OS-T28 TERM + LOXP + |
| | | | SB-UBI PRO::SB-UBI INTRON1::ZS- |
| | | | GREEN1::OS-UBI TERM + SI-ALS PRO::SI- |
| | | | ALS 5UTR::ZM-ALS (HRA)::SB-UBI TERM + |
| | | | LB |
| 28 | DNA | PHP93932 | RB + LOXP + FMV ENH::PCSV ENH::MMV |
| | | | ENH::ZM-EXP11232.1 PRO::ZM-WUS2::IN2-1 |
| | | | TERM + ZM-EXP13262.2 PRO::ZM-MPKL- |
| | | | A::ZM MIRNA PRECURSOR 396H::ZM-PKL-A |
| | | | STAR SEQ::ZM-EXP23070.1 TERM + LOXP + |
| | | | SB-UBI PRO::SB-UBI INTRON1::ZS- |
| | | | GREEN1::OS-UBI TERM + SI-ALS PRO::SI- |
| | | | ALS 5UTR::ZM-ALS (HRA)::SB-UBI TERM + |
| | | | LB |
| 29 | DNA | PHP93933 | RB + NOS PRO::ZM-WUS2::IN2-1 TERM + |
| | | | FMV ENH::PCSV ENH::MMV ENH::UBI1ZM |
| | | | PRO::UBI1ZM 5UTR::UBI1ZM INTRON1::ZM- |
| | | | ODP2::OS-T28 TERM + SB-UBI PRO::SB-UBI |
| | | | INTRON1::ZS-GREEN1::OS-UBI TERM + SB- |
| | | | ALS PRO::ZM-ALS (HRA)::SB-PEPC1 TERM + |
| | | | LB |
| 30 | DNA | PHP94331 | RB + LOXP + ZM-HSP17.7 PRO::MO-CRE- |
| | | | EXON1::ST-LS1 INTRON1::MO-CRE |
| | | | EXON2::PINII TERM + NOS PRO::ZM- |
| | | | WUS2::ZM-IN2-1 TERM + |
| | | | UBI1ZMPRO::UBI1ZM 5UTR::UBI1ZM |
| | | | INTRON1::ZM-ODP2::ZM-UBI TERM + ZM- |
| | | | CAB PRO::ZM-CAB 5UTR::ZM-MPKL-A::ZM |
| | | | MIRNA PRECURSOR 396H::ZM-PKL-A STAR |
| | | | SEQ::ZM-EXP23070.1 TERM + LOXP + SB-UBI |
| | | | PRO::SB-UBI INTRON1::ZS-GREEN1::OS-UBI |
| | | | TERM + SI-ALS PRO::SI-ALS 5UTR::ZM-ALS |
| | | | (HRA)::SB-UBI TERM + LB |
| 31 | DNA | PHP94332 | RB + LOXP + ZM-HSP17.7 PRO::MO-CRE- |
| | | | EXON1::ST-LS1 INTRON1::MO-CRE |
| | | | EXON2::PINII TERM + NOS PRO::ZM- |
| | | | WUS2::ZM-IN2-1 TERM + |
| | | | UBI1ZMPRO::UBI1ZM 5UTR::UBI1ZM |
| | | | INTRON1::ZM-ODP2::ZM-UBI TERM + |
| | | | UBI1ZMPRO::UBI1ZM 5UTR::UBI1ZM |
| | | | INTRON1::ZM-MPKL-A::ZM MIRNA |
| | | | PRECURSOR 396H::ZM-PKL-A STAR |
| | | | SEQ::ZM-EXP23070.1 TERM + LOXP + SB-UBI |
| | | | PRO::SB-UBI INTRON1::ZS-GREEN1::OS-UBI |
| | | | TERM + SI-ALS PRO::SI-ALS 5UTR::ZM-ALS |
| | | | (HRA)::SB-UBI TERM + LB |
| 32 | DNA | PHP94636 | RB + LOXP + 8xDR5 ENH::CAMV35S |
| | | | PRO::TOP3::ZM-WUS2::PINII TERM + ZM- |
| | | | PLTP PRO::TOP::ZM-ODP2::OS-T28 TERM + |
| | | | RAB17 PRO::MO-CRE-EXON1::ST-LS1 |
| | | | INTRON1::MO-CRE EXON2::PINII + LOXP + |
| | | | UBI1ZM 5UTR::UBI1ZM |
| | | | INTRON1::FRT1::NPTII::PINII TERM + |
| | | | UBI1ZM PRO::UBI1ZM 5UTR::UBI1ZM |
| | | | INTRON1::AM-CYAN1::PINII TERM + FRT6 + |
| | | | LB |
| 33 | DNA | PHP94682 | RB + LOXP + ZM-HSP17.7 PRO::MO-CRE- |
| | | | EXON1::ST-LS1 INTRON1::MO-CRE |
| | | | EXON2::PINII TERM + SCBV PRO::SCBV |
| | | | 5UTR::ZM-WUS2::ZM-IN2-1 TERM + |
| | | | UBI1ZMPRO::UBI1ZM 5UTR::UBI1ZM |
| | | | INTRON1::ZM-LEC1::OS-T28 TERM + LOXP + |
| | | | SB-UBI PRO::SB-UBI INTRON1::ZS- |
| | | | GREEN1::OS-UBI TERM + SI-ALS PRO::SI- |
| | | | ALS 5UTR::ZM-ALS (HRA)::SB-UBI TERM + |
| | | | LB |
| 34 | DNA | PHP94684 | RB + LOXP + ZM-HSP17.7 PRO::MO-CRE- |
| | | | EXON1::ST-LS1 INTRON1::MO-CRE |
| | | | EXON2::PINII TERM + IN2-1 TERM::ZM- |
| | | | WUS2::ZM-UBI1 INTRON1 (B104)::ZM-UBI1 |
| | | | 5UTR (B104)::ZM-UBI1 MINPRO (B104) + |
| | | | UBI1ZMPRO::UBI1ZM 5UTR::UBI1ZM |
| | | | INTRON1::ZM-ODP2::ZM-UBI TERM + LOXP + |
| | | | SB-UBI PRO::SB-UBI INTRON1::ZS- |
| | | | GREEN1::OS-T28 TERM + SI-ALS PRO::SI- |
| | | | ALS 5UTR::ZM-ALS (HRA)::SB-UBI TERM + |
| | | | LB |
| 35 | DNA | PHP94685 | RB + LOXP + IN2-1 TERM::ZM-WUS2::ZM- |
| | | | UBI1 INTRON1 (B104)::ZM-UBI1 5UTR |
| | | | (B104)::ZM-UBI1 MINPRO (B104)::MMV |
| | | | ENH::PCSV ENH::FMV |
| | | | ENH::UBI1ZMPRO::UBI1ZM 5UTR::UBI1ZM |
| | | | INTRON1::ZM-ODP2::ZM-UBI TERM + LOXP + |
| | | | SB-UBI PRO::SB-UBI INTRON1::ZS- |
| | | | GREEN1::OS-T28 TERM + SI-ALS PRO::SI- |
| | | | ALS 5UTR::ZM-ALS (HRA)::SB-UBI TERM + |
| | | | LB |
| 36 | DNA | PHP94715 | RB + LOXP + 8xDR5 ENH::CAMV35S |
| | | | PRO::ZM-WUS2::PINII TERM + UBI1ZM |
| | | | PRO::UBI1ZM 5UTR::UBI1ZM INTRON1::ZM- |
| | | | ODP2::PINII TERM + RAB 17 PRO::MO-CRE- |
| | | | EXON1::ST-LS1 INTRON1::MO-CRE |
| | | | EXON2::PINII + LOXP + UBI1ZM |
| | | | PRO::UBI1ZM 5UTR::UBI1ZM |
| | | | INTRON1::FRT1::NPTII::PINII TERM + |
| | | | UBI1ZM PRO::UBI1ZM 5UTR::UBI1ZM |
| | | | INTRON1::AM-CYAN1::PINII TERM + FRT6 + |
| | | | LB |
| 37 | DNA | PHP95067 | RB + LOXP + NOS PRO::ZM-WUS2::PINII |
| | | | TERM + UBI1ZM PRO::UBI1ZM |
| | | | 5UTR::UBI1ZM INTRON1::ZM-CUC1-2::SB- |
| | | | GKAF TERM + ZM-HSP17.7 PRO::MO-CRE- |
| | | | EXON1::ST-LS1 INTRON1::MO-CRE |
| | | | EXON2::PINII TERM::OS-UBI TERM + LOXP + |
| | | | SI-UBI3 PRO::SI-UBI3 INTRON1::ZS- |
| | | | GREEN1::PINII TERM + SB-ALS PRO::ZM- |
| | | | ALS (HRA)::SB-PEPC1 TERM + LB |
| 38 | DNA | PHP95068 | RB + LOXP + NOS PRO::ZM-WUS2::PINII |
| | | | TERM + UBI1ZM PRO::UBI1ZM |
| | | | 5UTR::UBI1ZM INTRON1::ZM-CUC2::SB- |
| | | | GKAF TERM + ZM-HSP17.7 PRO::MO-CRE- |
| | | | EXON1::ST-LS1 INTRON1::MO-CRE |
| | | | EXON2::PINII TERM::OS-UBI TERM + LOXP + |
| | | | SI-UBI3 PRO::SI-UBI3 INTRON1::ZS- |
| | | | GREEN1::PINII TERM + SB-ALS PRO::ZM- |
| | | | ALS (HRA)::SB-PEPC1 TERM + LB |
| 39 | DNA | PHP95069 | RB + LOXP + NOS PRO::ZM-WUS2::PINII |
| | | | TERM + UBI1ZM PRO::UBI1ZM |
| | | | 5UTR::UBI1ZM INTRON1::ZM-CUC3-2::SB- |
| | | | GKAF TERM + ZM-HSP17.7 PRO::MO-CRE- |
| | | | EXON1::ST-LS1 INTRON1::MO-CRE |
| | | | EXON2::PINII TERM::OS-UBI TERM + LOXP + |
| | | | SI-UBI3 PRO::SI-UBI3 INTRON1::ZS- |
| | | | GREEN1::PINII TERM + SB-ALS PRO::ZM- |
| | | | ALS (HRA)::SB-PEPC1 TERM + LB |
| 40 | DNA | PHP95070 | RB + LOXP + NOS PRO::ZM-WUS2::PINII |
| | | | TERM + UBI1ZM PRO::UBI1ZM |
| | | | 5UTR::UBI1ZM INTRON1::ZM-GPCNAC- |
| | | | 1::SB-GKAF TERM + ZM-HSP17.7 PRO::MO- |
| | | | CRE-EXON1::ST-LS1 INTRON1::MO-CRE |
| | | | EXON2::PINII TERM::OS-UBI TERM + LOXP + |
| | | | SI-UBI3 PRO::SI-UBI3 INTRON1::ZS- |
| | | | GREEN1::PINII TERM + SB-ALS PRO::ZM- |
| | | | ALS (HRA)::SB-PEPC1 TERM + LB |
| 41 | DNA | PHP95071 | RB + LOXP + NOS PRO::ZM-WUS2::PINII |
| | | | TERM + UBI1ZM PRO::UBI1ZM |
| | | | 5UTR::UBI1ZM INTRON1::AT-RKD4::SB- |
| | | | GKAF TERM + ZM-HSP17.7 PRO::MO-CRE- |
| | | | EXON1::ST-LS1 INTRON1::MO-CRE |
| | | | EXON2::PINII TERM::OS-UBI TERM + LOXP + |
| | | | SI-UBI3 PRO::SI-UBI3 INTRON1::ZS- |
| | | | GREEN1::PINII TERM + SB-ALS PRO::ZM- |
| | | | ALS (HRA)::SB-PEPC1 TERM + LB |
| 42 | DNA | PHP95072 | RB + LOXP + FT-MEM1::NOS PRO::ZM- |
| | | | WUS2::PINII TERM + UBI1ZM PRO::UBI1ZM |
| | | | 5UTR::UBI1ZM INTRON1::ZM-ODP2::PINII |
| | | | TERM + ZM-HSP17.7 PRO::MO-CRE- |
| | | | EXON1::ST-LS1 INTRON1::MO-CRE |
| | | | EXON2::PINII TERM::OS-UBI TERM + LOXP + |
| | | | SI-UBI3 PRO::SI-UBI3 INTRON1::ZS- |
| | | | GREEN1::PINII TERM + SB-ALS PRO::ZM- |
| | | | ALS (HRA)::SB-PEPC1 TERM + LB |
| 43 | DNA | PHP95073 | RB + LOXP + ZM-PEPCI PRO::ZM- |
| | | | WUS2::PINII TERM + UBI1ZM PRO::UBI1ZM |
| | | | 5UTR::UBI1ZM INTRON1::ZM-ODP2::PINII |
| | | | TERM + ZM-HSP17.7 PRO::MO-CRE- |
| | | | EXON1::ST-LS1 INTRON1::MO-CRE |
| | | | EXON2::PINII TERM::OS-UBI TERM + LOXP + |
| | | | SI-UBI3 PRO::SI-UBI3 INTRON1::ZS- |
| | | | GREEN1::PINII TERM + SB-ALS PRO::ZM- |
| | | | ALS (HRA)::SB-PEPC1 TERM + LB |
| 44 | DNA | PHP95074 | RB + LOXP + ZM-DIURNAL 12 PRO::ZM- |
| | | | WUS2::PINII TERM + UBI1ZM PRO::UBI1ZM |
| | | | 5UTR::UBI1ZM INTRON1::ZM-ODP2::PINII |
| | | | TERM + ZM-HSP17.7 PRO::MO-CRE- |
| | | | EXON1::ST-LS1 INTRON1::MO-CRE |
| | | | EXON2::PINII TERM::OS-UBI TERM + LOXP + |
| | | | SI-UBI3 PRO::SI-UBI3 INTRON1::ZS- |
| | | | GREEN1::PINII TERM + SB-ALS PRO::ZM- |
| | | | ALS (HRA)::SB-PEPC1 TERM + LB |
| 45 | DNA | PHP95075 | RB + LOXP + NOS PRO::ZM-WUS2::PINII |
| | | | TERM + UBI1ZM PRO::UBI1ZM |
| | | | 5UTR::UBI1ZM INTRON1::AT-LEC2::SB- |
| | | | GKAF TERM + ZM-HSP17.7 PRO::MO-CRE- |
| | | | EXON1::ST-LS1 INTRON1::MO-CRE |
| | | | EXON2::PINII TERM::OS-UBI TERM + LOXP + |
| | | | SI-UBI3 PRO::SI-UBI3 INTRON1::ZS- |
| | | | GREEN1::PINII TERM + SB-ALS PRO::ZM- |
| | | | ALS (HRA)::SB-PEPC1 TERM + LB |
| 46 | DNA | PHP95205 | RB + LOXP + RUBISCO SSU PRO::ZM- |
| | | | WUS2::PINII TERM + UBI1ZM PRO::UBI1ZM |
| | | | 5UTR::UBI1ZM INTRON1::ZM-ODP2::PINII |
| | | | TERM + ZM-HSP17.7 PRO::MO-CRE- |
| | | | EXON1::ST-LS1 INTRON1::MO-CRE |
| | | | EXON2::PINII TERM::OS-UBI TERM + LOXP + |
| | | | SI-UBI3 PRO::SI-UBI3 INTRON1::ZS- |
| | | | GREEN1::PINII TERM + SB-ALS PRO::ZM- |
| | | | ALS (HRA)::SB-PEPC1 TERM + LB |
| 47 | DNA | PHP95385 | RB + LOXP + OS-ACTIN PRO::OS-ACTIN |
| | | | INTRON1::ZM-WUS2::ZM-IN2-1 TERM + |
| | | | UBI1ZMPRO::UBI1ZM 5UTR::UBI1ZM |
| | | | INTRON1::ZM-ODP2::OS-T28 TERM::GZ- |
| | | | W64A TERM::FL2 TERM + ZM-HSP17.7 |
| | | | PRO::MO-CRE-EXON1::ST-LS1 |
| | | | INTRON1::MO-CRE EXON2::SB-CPI8 TERM + |
| | | | LOXP + SB-UBI PRO::SB-UBI INTRON1::ZS- |
| | | | GREEN1::OS-UBI TERM + SI-ALS PRO::SI- |
| | | | ALS 5UTR::ZM-ALS (HRA)::SB-UBI TERM + |
| | | | LB |
| 48 | DNA | PHP95393 | RB + LOXP + CSVMV PRO::CSVMV |
| | | | 5UTR::ZM-WUS2::PINII TERM + UBI1ZM |
| | | | PRO::UBI1ZM 5UTR::UBI1ZM INTRON1::ZM- |
| | | | ODP2::PINII TERM + ZM-HSP17.7 PRO::MO- |
| | | | CRE-EXON1::ST-LS1 INTRON1::MO-CRE |
| | | | EXON2::PINII TERM::OS-UBI TERM + LOXP + |
| | | | SI-UBI3 PRO::SI-UBI3 INTRON1::ZS- |
| | | | GREEN1::PINII TERM + SB-ALS PRO::ZM- |
| | | | ALS (HRA)::SB-PEPC1 TERM + LB |
| 49 | DNA | PHP95394 | RB + LOXP + ZMEXP13262.1 PRO::ZM- |
| | | | WUS2::PINII TERM + UBI1ZM PRO::UBI1ZM |
| | | | 5UTR::UBI1ZM INTRON1::ZM-ODP2::PINII |
| | | | TERM + ZM-HSP17.7 PRO::MO-CRE- |
| | | | EXON1::ST-LS1 INTRON1::MO-CRE |
| | | | EXON2::PINII TERM::OS-UBI TERM + LOXP + |
| | | | SI-UBI3 PRO::SI-UBI3 INTRON1::ZS- |
| | | | GREEN1::PINII TERM + SB-ALS PRO::ZM- |
| | | | ALS (HRA)::SB-PEPC1 TERM + LB |
| 50 | DNA | PHP95499 | RB + LOXP + ZM-HSP17.7 PRO::MO-CRE- |
| | | | EXON1::ST-LS1 INTRON1::MO-CRE |
| | | | EXON2::PINII TERM + OS-ACTIN PRO::OS- |
| | | | ACTIN INTRON1::ZM-WUS2::ZM-IN2-1 |
| | | | TERM + UBI1ZMPRO::UBI1ZM |
| | | | 5UTR::UBI1ZM INTRON1::ZM-ODP2::OS-T28 |
| | | | TERM + LOXP + SB-UBI PRO::SB-UBI |
| | | | INTRON1::ZS-GREEN1::OS-UBI TERM + SI- |
| | | | ALS PRO::SI-ALS 5UTR::ZM-ALS (HRA)::SB- |
| | | | UBI TERM + LB |
| 51 | DNA | PHP95502 | RB + LOXP + ZM-HSP17.7 PRO::MO-CRE- |
| | | | EXON1::ST-LS1 INTRON1::MO-CRE |
| | | | EXON2::PINII TERM + AT-5-IV-2 INS + NOS |
| | | | PRO::ZM-WUS2::ZM-IN2-1 TERM + |
| | | | UBI1ZMPRO::UBI1ZM 5UTR::UBI1ZM |
| | | | INTRON1::ZM-ODP2::OS-T28 TERM + LOXP + |
| | | | SB-UBI PRO::SB-UBI INTRON1::ZS- |
| | | | GREEN1::OS-UBI TERM + SI-ALS PRO::SI- |
| | | | ALS 5UTR::ZM-ALS (HRA)::SB-UBI TERM + |
| | | | LB |
| 52 | DNA | PHP95503 | RB + LOXP + NOS PRO::ZM-WUS2::PINII |
| | | | TERM + UBI1ZM PRO (3X ZM-AS2 |
| | | | EME)::UBI1ZM 5UTR::UBI1ZM |
| | | | INTRON1::ZM-ODP2::OS-T28 TERM + AT-5- |
| | | | IV-2 INS + ZM-HSP17.7 PRO::MO-CRE- |
| | | | EXON1::ST-LS1 INTRON1::MO-CRE |
| | | | EXON2::PINII TERM + AT-5-IV-2 INS + LOXP + |
| | | | SB-UBI PRO::SB-UBI INTRON1::ZS- |
| | | | GREEN1::OS-UBI TERM + SB-ALS PRO::ZM- |
| | | | ALS (HRA)::SB-UBI TERM + LB |
| 53 | DNA | PHP95881 | RB + LOXP + NOS PRO::ZM-WUS2::PINII |
| | | | TERM + UBI1ZM PRO::UBI1ZM |
| | | | 5UTR::UBI1ZM INTRON1::ZM-ODP2::OS-T28 |
| | | | TERM + UBI1ZM PRO::UBI1ZM |
| | | | 5UTR::UBI1ZM INTRON1::AT-LEC2 |
| | | | (MO)::SB-GKAF TERM + ZM-HSP17.7 |
| | | | PRO::MO-CRE-EXON1::ST-LS1 |
| | | | INTRON1::MO-CRE EXON2::PINII TERM::OS- |
| | | | UBI TERM + LOXP + SI-UBI3 PRO::SI-UBI3 |
| | | | INTRON1::ZS-GREEN1::PINII TERM + SB- |
| | | | ALS PRO::ZM-ALS (HRA)::SB-PEPC1 TERM + |
| | | | LB |
| 54 | DNA | PHP95882 | RB + LOXP + NOS PRO::ZM-WUS2::PINII |
| | | | TERM + UBI1ZM PRO::UBI1ZM |
| | | | 5UTR::UBI1ZM INTRON1::ZM-ODP2::OS-T28 |
| | | | TERM + UBI1ZM PRO::UBI1ZM |
| | | | 5UTR::UBI1ZM INTRON1::ZM-LEC1::SB- |
| | | | GKAF TERM + ZM-HSP17.7 PRO::MO-CRE- |
| | | | EXON1::ST-LS1 INTRON1::MO-CRE |
| | | | EXON2::PINII TERM::OS-UBI TERM + LOXP + |
| | | | SI-UBI3 PRO::SI-UBI3 INTRON1::ZS- |
| | | | GREEN1::PINII TERM + SB-ALS PRO::ZM- |
| | | | ALS (HRA)::SB-PEPC1 TERM + LB |
| 55 | DNA | PHP95886 | RB + LOXP + NOS PRO::ZM-WUS2::PINII |
| | | | TERM + UBI1ZM PRO::UBI1ZM |
| | | | 5UTR::UBI1ZM INTRON1::ZM-ODP2::OS-T28 |
| | | | TERM + UBI1ZM PRO::UBI1ZM |
| | | | 5UTR::UBI1ZM INTRON1::AT-RKD4::SB- |
| | | | GKAF TERM + ZM-HSP17.7 PRO::MO-CRE- |
| | | | EXON1::ST-LS1 INTRON1::MO-CRE |
| | | | EXON2::PINII TERM::OS-UBI TERM + LOXP + |
| | | | SI-UBI3 PRO::SI-UBI3 INTRON1::ZS- |
| | | | GREEN1::PINII TERM + SB-ALS PRO::ZM- |
| | | | ALS (HRA)::SB-PEPC1 TERM + LB |
| 56 | DNA | PHP95892 | RB + LOXP + NOS PRO::ZM-WUS2::PINII |
| | | | TERM + UBI1ZM PRO::UBI1ZM |
| | | | 5UTR::UBI1ZM INTRON1::ZM-ODP2::OS-T28 |
| | | | TERM + UBI1ZM PRO::UBI1ZM |
| | | | 5UTR::UBI1ZM INTRON1::AT-RAP2.6L::SB- |
| | | | GKAF TERM + ZM-HSP17.7 PRO::MO-CRE- |
| | | | EXON1::ST-LS1 INTRON1::MO-CRE |
| | | | EXON2::PINII TERM::OS-UBI TERM + LOXP + |
| | | | SI-UBI3 PRO::SI-UBI3 INTRON1::ZS- |
| | | | GREEN1::PINII TERM + SB-ALS PRO::ZM- |
| | | | ALS (HRA)::SB-PEPC1 TERM + LB |
| 57 | DNA | PHP95893 | RB + LOXP + NOS PRO::ZM-WUS2::PINII |
| | | | TERM + UBI1ZM PRO::UBI1ZM |
| | | | 5UTR::UBI1ZM INTRON1::ZM-ODP2::OS-T28 |
| | | | TERM + UBI1ZM PRO::UBI1ZM |
| | | | 5UTR::UBI1ZM INTRON1::ZM-MIR156B::SB- |
| | | | GKAF TERM + ZM-HSP17.7 PRO::MO-CRE- |
| | | | EXON1::ST-LS1 INTRON1::MO-CRE |
| | | | EXON2::PINII TERM::OS-UBI TERM + LOXP + |
| | | | SI-UBI3 PRO::SI-UBI3 INTRON1::ZS- |
| | | | GREEN1::PINII TERM + SB-ALS PRO::ZM- |
| | | | ALS (HRA)::SB-PEPC1 TERM + LB |
| 58 | DNA | PHP95904 | RB + LOXP + NOS PRO::ZM-WUS2::PINII |
| | | | TERM + UBI1ZM PRO::UBI1ZM |
| | | | 5UTR::UBI1ZM INTRON1::ZM-ODP2::OS-T28 |
| | | | TERM + UBI1ZM PRO::UBI1ZM |
| | | | 5UTR::UBI1ZM INTRON1::ZM-RLD1::SB- |
| | | | GKAF TERM + ZM-HSP17.7 PRO::MO-CRE- |
| | | | EXON1::ST-LS1 INTRON1::MO-CRE |
| | | | EXON2::PINII TERM::OS-UBI TERM + LOXP + |
| | | | SI-UBI3 PRO::SI-UBI3 INTRON1::ZS- |
| | | | GREEN1::PINII TERM + SB-ALS PRO::ZM- |
| | | | ALS (HRA)::SB-PEPC1 TERM + LB |
| 59 | DNA | PHP95987 | RB + LOXP + SCBV PRO::SCVB 5UTR::ZM- |
| | | | WUS2::PINII TERM + UBI1ZM PRO::UBI1ZM |
| | | | 5UTR::UBI1ZM INTRON1::ZM-ODP2::PINII |
| | | | TERM + ZM-HSP17.7 PRO::MO-CRE- |
| | | | EXON1::ST-LS1 INTRON1::MO-CRE |
| | | | EXON2::PINII TERM::OS-UBI TERM + LOXP + |
| | | | SI-UBI3 PRO::SI-UBI3 INTRON1::ZS- |
| | | | GREEN1::PINII TERM + SB-ALS PRO::ZM- |
| | | | ALS (HRA)::SB-PEPC1 TERM + LB |
| 60 | DNA | PHP95989 | RB + LOXP + FT-PPCA1 PRO::NOS PRO::ZM- |
| | | | WUS2::PINII TERM + UBI1ZM PRO::UBI1ZM |
| | | | 5UTR::UBI1ZM INTRON1::ZM-ODP2::PINII |
| | | | TERM + ZM-HSP17.7 PRO::MO-CRE- |
| | | | EXON1::ST-LS1 INTRON1::MO-CRE |
| | | | EXON2::PINII TERM::OS-UBI TERM + LOXP + |
| | | | SI-UBI3 PRO::SI-UBI3 INTRON1::ZS- |
| | | | GREEN1::PINII TERM + SB-ALS PRO::ZM- |
| | | | ALS (HRA)::SB-PEPC1 TERM + LB |
| 61 | DNA | PHP95990 | RB + LOXP + NOS PRO::ZM-WUS2::PINII |
| | | | TERM + UBI1ZM PRO::UBI1ZM |
| | | | 5UTR::UBI1ZM INTRON1::AT-RAP2.6L |
| | | | (MO)::SB-GKAF TERM + ZM-HSP17.7 |
| | | | PRO::MO-CRE-EXON1::ST-LS1 |
| | | | INTRON1::MO-CRE EXON2::PINII TERM::OS- |
| | | | UBI TERM + LOXP + SI-UBI3 PRO::SI-UBI3 |
| | | | INTRON1::ZS-GREEN1::PINII TERM + SB- |
| | | | ALS PRO::ZM-ALS (HRA)::SB-PEPC1 TERM + |
| | | | LB |
| 62 | DNA | PHP96030 | RB + LOXP + NOS PRO::ZM-WUS2::PINII |
| | | | TERM + UBI1ZM PRO::UBI1ZM |
| | | | 5UTR::UBI1ZM INTRON1:RLD1::SB-GKAF |
| | | | TERM + ZM-HSP17.7 PRO::MO-CRE- |
| | | | EXON1::ST-LS1 INTRON1::MO-CRE |
| | | | EXON2::PINII TERM::OS-UBI TERM + LOXP + |
| | | | SI-UBI3 PRO::SI-UBI3 INTRON1::ZS- |
| | | | GREEN1::PINII TERM + SB-ALS PRO::ZM- |
| | | | ALS (HRA)::SB-PEPC1 TERM + LB |
| 63 | DNA | PHP96031 | RB + LOXP + ZM-GOS2 PRO::ZM-GOS2 |
| | | | 5UTR1::ZM-GOS2 INTRON1::ZM-GOS2 |
| | | | 5UTR2::ZM-WUS2::PINII TERM + UBI1ZM |
| | | | PRO::UBI1ZM 5UTR::UBI1ZM INTRON1::ZM- |
| | | | ODP2::PINII TERM + ZM-HSP17.7 PRO::MO- |
| | | | CRE-EXON1::ST-LS1 INTRON1::MO-CRE |
| | | | EXON2::PINII TERM::OS-UBI TERM + LOXP + |
| | | | SI-UBI3 PRO::SI-UBI3 INTRON1::ZS- |
| | | | GREEN1::PINII TERM + SB-ALS PRO::ZM- |
| | | | ALS (HRA)::SB-PEPC1 TERM + LB |
| 64 | DNA | PHP96032 | RB + LOXP + ZM-DIURNAL 11 PRO::ZM- |
| | | | WUS2::PINII TERM + UBI1ZM PRO::UBI1ZM |
| | | | 5UTR::UBI1ZM INTRON1::ZM-ODP2::PINII |
| | | | TERM + ZM-HSP17.7 PRO::MO-CRE- |
| | | | EXON1::ST-LS1 INTRON1::MO-CRE |
| | | | EXON2::PINII TERM::OS-UBI TERM + LOXP + |
| | | | SI-UBI3 PRO::SI-UBI3 INTRON1::ZS- |
| | | | GREEN1::PINII TERM + SB-ALS PRO::ZM- |
| | | | ALS (HRA)::SB-PEPC1 TERM + LB |
| 65 | DNA | PHP96036 | RB + LOXP + NOS PRO::ZM-WUS2::PINII |
| | | | TERM + UBI1ZM PRO::UBI1ZM |
| | | | 5UTR::UBI1ZM INTRON1::ZM-KN1::PINII |
| | | | TERM + ZM-HSP17.7 PRO::MO-CRE- |
| | | | EXON1::ST-LS1 INTRON1::MO-CRE |
| | | | EXON2::PINII TERM::OS-UBI TERM + LOXP + |
| | | | SI-UBI3 PRO::SI-UBI3 INTRON1::ZS- |
| | | | GREEN1::PINII TERM + SB-ALS PRO::ZM- |
| | | | ALS (HRA)::SB-PEPC1 TERM + LB |
| 66 | DNA | PHP96037 | RB + LOXP + NOS PRO::ZM-WUS2::IN2-1 |
| | | | TERM + FMV ENH::PCSV ENH::MMV |
| | | | ENH::UBI1ZM PRO::UBI1ZM 5UTR::UBI1ZM |
| | | | INTRON1::ZM-ODP2::OS-T28 TERM + AT-5- |
| | | | IV-2 INS + ZM-HSP17.7 PRO::MO-CRE- |
| | | | EXON1::ST-LS1 INTRON1::MO-CRE |
| | | | EXON2::PINII TERM + AT-5-IV-2 INS + LOXP + |
| | | | SB-UBI PRO::SB-UBI INTRON1::ZS- |
| | | | GREEN1::OS-UBI TERM + SB-ALS PRO::ZM- |
| | | | ALS (HRA)::SB-PEPC1 TERM + LB |
| 67 | DNA | PHP96277 | RB + LOXP + OS-ACTIN PRO::OS-ACTIN |
| | | | INTRON1::ZM-WUS2::IN2-1 TERM + FMV |
| | | | ENH::PCSV ENH::MMV ENH::UBI1ZM |
| | | | PRO::UBI1ZM 5UTR::UBI1ZM INTRON1::ZM- |
| | | | ODP2::OS-T28 TERM + AT-5-IV-2 INS + ZM- |
| | | | HSP17.7 PRO::MO-CRE-EXON1::ST-LS1 |
| | | | INTRON1::MO-CRE EXON2::PINII TERM + |
| | | | AT-5-IV-2 INS + LOXP + SB-UBI PRO::SB-UBI |
| | | | INTRON1::ZS-GREEN1::OS-UBI TERM + SB- |
| | | | ALS PRO::ZM-ALS (HRA)::SB-PEPC1 TERM + |
| | | | LB |
| 68 | DNA | PHP96425 | RB + LOXP + NOS PRO::ZM-WUS2::IN2-1 |
| | | | TERM + FMV ENH::PCSV ENH::MMV |
| | | | ENH::UBI1ZM PRO::UBI1ZM 5UTR::UBI1ZM |
| | | | INTRON1::ZM-ODP2::OS-T28 TERM + AT-5- |
| | | | IV-7 INS + ZM-HSP17.7 PRO::MO-CRE- |
| | | | EXON1::ST-LS1 INTRON1::MO-CRE |
| | | | EXON2::PINII TERM + LOXP + SB-UBI |
| | | | PRO::SB-UBI INTRON1::ZS-GREEN1::OS-UBI |
| | | | TERM + SB-ALS PRO::ZM-ALS (HRA)::SB- |
| | | | PEPC1 TERM + LB |
| 69 | DNA | PHP96664 | RB + LOXP + ZM-HSP17.7 PRO::MO-CRE- |
| | | | EXON1::ST-LS1 INTRON1::MO-CRE |
| | | | EXON2::PINII TERM + NOS PRO::ZM- |
| | | | WUS2::IN2-1 TERM + UBI1ZM PRO::UBI1ZM |
| | | | 5UTR::UBI1ZM INTRON1::ZM-ODP2::OS-T28 |
| | | | TERM + SB-UBI PRO::SB-UBI INTRON1::ZS- |
| | | | GREEN1::OS-UBI TERM + SB-ALS PRO::ZM- |
| | | | ALS (HRA)::SB-PEPC1 TERM + LB |
| 70 | DNA | PHP96695 | RB + LOXP + NOS PRO::ZM-WUS2::IN2-1 |
| | | | TERM + UBI1ZM PRO (3X ZM-AS2 |
| | | | EME)::UBI1ZM INTRON1::ZM-ODP2::OS-T28 |
| | | | TERM + ZM-HSP17.7 PRO::MO-CRE- |
| | | | EXON1::ST-LS1 INTRON1::MO-CRE |
| | | | EXON2::PINII TERM + LOXP + SB-UBI |
| | | | PRO::SB-UBI INTRON1::ZS-GREEN1::OS-UBI |
| | | | TERM + SB-ALS PRO::ZM-ALS (HRA)::SB- |
| | | | UBI TERM + LB |
| 71 | DNA | PHP96716 | RB + LOXP + NOS PRO::ZM-WUS2::IN2-1 |
| | | | TERM + UBI1ZM PRO::UBI1ZM |
| | | | 5UTR::UBI1ZM INTRON1::ZM-ODP2::OS-T28 |
| | | | TERM + UBI1ZM PRO::UBI1ZM |
| | | | 5UTR::UBI1ZM INTRON1::ZM-KN1::PINII |
| | | | TERM + ZM-HSP17.7 PRO::MO-CRE- |
| | | | EXON1::ST-LS1 INTRON1::MO-CRE |
| | | | EXON2::PINII TERM::OS-UBI TERM + LOXP + |
| | | | SI-UBI3 PRO::SI-UBI3 INTRON1::ZS- |
| | | | GREEN1::PINII TERM + SB-ALS PRO::ZM- |
| | | | ALS (HRA)::SB-PEPC1 TERM + LB |
| 72 | DNA | PHP96730 | RB + LOXP + ZM-SWEET11 PRO::ZM- |
| | | | WUS2::IN2-1 TERM + UBI1ZM PRO::UBI1ZM |
| | | | 5UTR::UBI1ZM INTRON1::ZM-ODP2::PINII |
| | | | TERM + ZM-HSP17.7 PRO::MO-CRE- |
| | | | EXON1::ST-LS1 INTRON1::MO-CRE |
| | | | EXON2::PINII TERM::OS-UBI TERM + LOXP + |
| | | | SI-UBI3 PRO::SI-UBI3 INTRON1::ZS- |
| | | | GREEN1::PINII TERM + SB-ALS PRO::ZM- |
| | | | ALS (HRA)::SB-PEPC1 TERM + LB |
| 73 | DNA | PHP96731 | RB + LOXP + ZM-DIURNAL10 PRO::ZM- |
| | | | WUS2::IN2-1 TERM + UBI1ZM PRO::UBI1ZM |
| | | | 5UTR::UBI1ZM INTRON1::ZM-ODP2::PINII |
| | | | TERM + ZM-HSP17.7 PRO::MO-CRE- |
| | | | EXON1::ST-LS1 INTRON1::MO-CRE |
| | | | EXON2::PINII TERM::OS-UBI TERM + LOXP + |
| | | | SI-UBI3 PRO::SI-UBI3 INTRON1::ZS- |
| | | | GREEN1::PINII TERM + SB-ALS PRO::ZM- |
| | | | ALS (HRA)::SB-PEPC1 TERM + LB |
| 74 | DNA | PHP96751 | RB + LOXP + NOS PRO::ZM-WUS2::IN2-1 |
| | | | TERM + FMV ENH::PCSV ENH::MMV |
| | | | ENH::UBI1ZM PRO::UBI1ZM 5UTR::UBI1ZM |
| | | | INTRON1::ZM-ODP2::OS-T28 TERM + AT-5- |
| | | | IV-2 INS + ZM-HSP17.7 PRO::MO-CRE- |
| | | | EXON1::ST-LS1 INTRON1::MO-CRE |
| | | | EXON2::PINII TERM + LOXP + SB-UBI |
| | | | PRO::SB-UBI INTRON1::ZS-GREEN1::OS-UBI |
| | | | TERM + SB-ALS PRO::ZM-ALS (HRA)::SB- |
| | | | UBI TERM + LB |
| 75 | DNA | PHP96919 | RB + LOXP + NOS PRO (3X ZM-AS2 |
| | | | EME)::ZM-WUS2::IN2-1 TERM + UBI1ZM |
| | | | PRO::UBI1ZM 5UTR::UBI1ZM INTRON1::ZM- |
| | | | ODP2::OS-T28 TERM + ZM-HSP17.7 |
| | | | PRO::MO-CRE-EXON1::ST-LS1 |
| | | | INTRON1::MO-CRE EXON2::PINII TERM + |
| | | | LOXP + SB-UBI PRO::SB-UBI INTRON1::ZS- |
| | | | GREEN1::OS-UBI TERM + SB-ALS PRO::ZM- |
| | | | ALS (HRA)::SB-UBI TERM + LB |
| 76 | DNA | PHP96942 | RB + UBI1ZM PRO::UBI1ZM 5UTR::UBI1ZM |
| | | | INTRON1::FLPM-EXON1::ST-LS1 |
| | | | INTRON2::FLPM-EXON2::PINII TERM::AT-T9 |
| | | | TERM + FRT1::PMI::PINII TERM::CZ19B1 |
| | | | TERM + NOS PRO::ZM-WUS2::IN2-1 TERM + |
| | | | FMV ENH::PCSV ENH::MMV ENH::UBI1ZM |
| | | | PRO::UBI1ZM 5UTR::UBI1ZM INTRON1::ZM- |
| | | | ODP2::OS-T28 TERM + ZM-HSP17.7 |
| | | | PRO::MO-CRE-EXON1::ST-LS1 |
| | | | INTRON1::MO-CRE EXON2::SB-CPI8 TERM + |
| | | | LOXP + SB-UBI PRO::SB-UBI INTRON1::ZS- |
| | | | GREEN1::OS-UBI TERM + FRT6 + LB |
| 77 | DNA | PHP97334 | RB + LOXP + NOS PRO::ZM-WUS2::IN2-1 |
| | | | TERM + FMV ENH::PCSV ENH::MMV |
| | | | ENH::UBI1ZM PRO::UBI1ZM 5UTR::UBI1ZM |
| | | | INTRON1::ZM-ODP2::OS-T28 TERM + AT-5- |
| | | | IV-2 INS + ZM-HSP17.7 PRO::MO-CRE- |
| | | | EXON1::ST-LS1 INTRON1::MO-CRE |
| | | | EXON2::PINII TERM + AT-5-IV-2 INS + LOXP + |
| | | | SB-UBI PRO::SB-UBI INTRON1::ZS- |
| | | | GREEN1::OS-UBI TERM + SB-UBII PRO::SB- |
| | | | UBI1 INTRON1::NPTII::SB-UBI TERM + LB |
| 78 | DNA | PHP97335 | RB + LOXP + SB-UBII PRO::SB-UBI1 |
| | | | INTRON1::NPTII::SB-UBI TERM + NOS |
| | | | PRO::ZM-WUS2::IN2-1 TERM + FMV |
| | | | ENH::PCSV ENH::MMV ENH::UBI1ZM |
| | | | PRO::UBI1ZM 5UTR::UBI1ZM INTRON1::ZM- |
| | | | ODP2::OS-T28 TERM + AT-5-IV-2 INS + ZM- |
| | | | HSP17.7 PRO::MO-CRE-EXON1::ST-LS1 |
| | | | INTRON1::MO-CRE EXON2::PINII TERM + |
| | | | AT-5-IV-2 INS + LOXP + SB-UBI PRO::SB-UBI |
| | | | INTRON1::ZS-GREEN1::OS-UBI TERM + LB |
| 79 | DNA | PHP97417 | RB + LOXP + UBI1ZM PRO::UBI1ZM |
| | | | 5UTR::UBI1ZM INTRON1::ZM-WUS2::IN2-1 |
| | | | TERM + FMV ENH::PCSV ENH::MMV |
| | | | ENH::UBI1ZM PRO::UBI1ZM 5UTR::UBI1ZM |
| | | | INTRON1::ZM-ODP2::OS-T28 TERM + AT-5- |
| | | | IV-2 INS + ZM-HSP17.7 PRO::MO-CRE- |
| | | | EXON1::ST-LS1 INTRON1::MO-CRE |
| | | | EXON2::PINII TERM + AT-5-IV-2 INS + LOXP + |
| | | | SB-UBI PRO::SB-UBI INTRON1::ZS- |
| | | | GREEN1::OS-UBI TERM + SI-ALS PRO::SI- |
| | | | ALS 5UTR::ZM-ALS (HRA)::SB-UBI TERM + |
| | | | LB |
| 80 | DNA | PHP97453 | RB + LOXP + UBI1ZM PRO::UBI1ZM |
| | | | 5UTR::ADH1 INTRON1::ZM-WUS2::IN2-1 |
| | | | TERM + UBI1ZM PRO::UBI1ZM |
| | | | 5UTR::UBI1ZM INTRON1::ZM-ODP2::OS-T28 |
| | | | TERM::CZ19B1 TERM + ZM-HSP17.7 |
| | | | PRO::MO-CRE-EXON1::ST-LS1 |
| | | | INTRON1::MO-CRE EXON2::PINII TERM + |
| | | | LOXP + SB-UBI PRO::SB-UBI INTRON1::ZS- |
| | | | GREEN1::OS-UBI TERM + SB-ALS PRO::ZM- |
| | | | ALS (HRA)::SB-UBI TERM + LB |
| 81 | DNA | PHP97458 | RB + LOXP + FT-MEM1::NOS PRO::ZM- |
| | | | WUS2::PINII TERM + UBI1ZM PRO (3X ZM- |
| | | | AS2 EME)::UBI1ZM INTRON1::ZM-ODP2::OS- |
| | | | T28 TERM::GZ-W64A TERM::FL2 TERM + |
| | | | ZM-HSP17.7 PRO::MO-CRE-EXON1::ST-LS1 |
| | | | INTRON1::MO-CRE EXON2::PINII TERM::OS- |
| | | | UBI TERM + LOXP + SI-UBI3 PRO::SI-UBI3 |
| | | | INTRON1::ZS-GREEN1::PINII TERM + SB- |
| | | | ALS PRO::ZM-ALS (HRA)::SB-PEPC1 TERM + |
| | | | LB |
| 82 | DNA | PHP97725 | RB + LOXP + AT-5-IV-2 INS + ZM-HSP17.7 |
| | | | PRO::MO-CRE-EXON1::ST-LS1 |
| | | | INTRON1::MO-CRE EXON2::PINII TERM + |
| | | | AT-5-IV-2 INS + NOS PRO:: ZM-WUS2::IN2-1 |
| | | | TERM + AT-5-IV-2 INS + FMV ENH::PCSV |
| | | | ENH::MMV ENH::UBI1ZM PRO::UBI1ZM |
| | | | 5UTR::UBI1ZM INTRON1::ZM-ODP2::OS-T28 |
| | | | TERM + LOXP + SB-UBI PRO::SB-UBI |
| | | | INTRON1::ZS-GREEN1::OS-UBI TERM + SI- |
| | | | ALS PRO::SI-ALS 5UTR::ZM-ALS (HRA)::SB- |
| | | | UBI TERM + LB |
| 83 | DNA | PHP97726 | RB + LOXP + AT-5-IV-2 INS + ZM-HSP17.7 |
| | | | PRO::MO-CRE-EXON1::ST-LS1 |
| | | | INTRON1::MO-CRE EXON2::PINII TERM + |
| | | | NOS PRO::ZM-WUS2::IN2-1 TERM + AT-5- |
| | | | IV-2 INS + FMV ENH::PCSV ENH::MMV |
| | | | ENH::UBI1ZM PRO::UBI1ZM 5UTR::UBI1ZM |
| | | | INTRON1::ZM-ODP2::OS-T28 TERM + LOXP + |
| | | | SB-UBI PRO::SB-UBI INTRON1::ZS- |
| | | | GREEN1::OS-UBI TERM + SI-ALS PRO::SI- |
| | | | ALS 5UTR::ZM-ALS (HRA)::SB-UBI TERM + |
| | | | LB |
| 84 | DNA | PHP97933 | RB + LOXP + NOS PRO::ZM-WUS2::IN2-1 |
| | | | TERM + FMV ENH::PCSV ENH::MMV |
| | | | ENH::UBI1ZM PRO::UBI1ZM 5UTR::UBI1ZM |
| | | | INTRON1::ZM-ODP2::OS-T28 TERM + AT-5- |
| | | | IV-2 INS + ZM-HSP17.7 PRO::MO-CRE- |
| | | | EXON1::ST-LS1 INTRON1::MO-CRE |
| | | | EXON2::PINII TERM + AT-5-IV-2 INS + |
| | | | UBI1ZM PRO::UBI1ZM 5UTR::UBI1ZM |
| | | | INTRON1::SV40 NLS::CAS9 EXON1 |
| | | | (SP)(MO)::ST-LS1 INTRON2::CAS9 EXON2 |
| | | | (SP)(MO)::VIRD2 NLS::PINII TERM + ZM-U6 |
| | | | POLIII CHR8 PRO::ZM-WXY-CR4::GUIDE |
| | | | RNA::ZM-U6 POLIII CHR8 TERM + ZM-U6 |
| | | | POLIII CHR8 PRO::ZM-WXY-CR4::GUIDE |
| | | | RNA::ZM-U6 POLIII CHR8 TERM + LOXP + |
| | | | FL2 TERM + UBI1ZM 5UTR::UBI1ZM |
| | | | INTRON1::NPTII::PINII TERM + SB-UBI |
| | | | PRO::SB-UBI INTRON1::ZS-GREEN1::OS-UBI |
| | | | TERM + LB |
| 85 | DNA | PHP98248 | RB + LOXP + NOS PRO::ZM-WUS2::IN2-1 |
| | | | TERM + UBI1ZM PRO::UBI1ZM |
| | | | 5UTR::UBI1ZM INTRON1::ZM-ODP2::OS-T28 |
| | | | TERM + UBI1ZM PRO::UBI1ZM |
| | | | 5UTR::UBI1ZM INTRON1::ZM-GRF5::SB- |
| | | | GKAF TERM + ZM-HSP17.7 PRO::MO-CRE- |
| | | | EXON1::ST-LS1 INTRON1::MO-CRE |
| | | | EXON2::PINII TERM::OS-UBI TERM + LOXP + |
| | | | SI-UBI3 PRO::SI-UBI3 INTRON1::ZS- |
| | | | GREEN1::PINII TERM + SB-ALS PRO::ZM- |
| | | | ALS (HRA)::SB-PEPC1 TERM + LB |
| 86 | DNA | PHP98283 | RB + LOXP + NOS PRO::ZM-WUS2::IN2-1 |
| | | | TERM + FMV ENH::PCSV ENH::MMV |
| | | | ENH::UBI1ZM PRO::UBI1ZM 5UTR::UBI1ZM |
| | | | INTRON1::ZM-ODP2::OS-T28 TERM + |
| | | | UBI1ZM PRO::UBI1ZM 5UTR::UBI1ZM |
| | | | INTRON1::ZM-GRF5::SB-GKAF TERM + ZM- |
| | | | HSP17.7 PRO::MO-CRE-EXON1::ST-LS1 |
| | | | INTRON1::MO-CRE EXON2::PINII TERM::OS- |
| | | | UBI TERM + LOXP + SI-UBI3 PRO::SI-UBI3 |
| | | | INTRON1::ZS-GREEN1::PINII TERM + SB- |
| | | | ALS PRO::ZM-ALS (HRA)::SB-PEPC1 TERM + |
| | | | LB |
| 87 | DNA | PHP98310 | RB + LOXP + NOS PRO::ZM-WUS2::IN2-1 |
| | | | TERM + UBI1ZM PRO::UBI1ZM |
| | | | 5UTR::UBI1ZM INTRON1::ZM-GRF5::SB- |
| | | | GKAF TERM + ZM-HSP17.7 PRO::MO-CRE- |
| | | | EXON1::ST-LS1 INTRON1::MO-CRE |
| | | | EXON2::PINII TERM::OS-UBI TERM + LOXP + |
| | | | SI-UBI3 PRO::SI-UBI3 INTRON1::ZS- |
| | | | GREEN1::PINII TERM + SB-ALS PRO::ZM- |
| | | | ALS (HRA)::SB-PEPC1 TERM + LB |
| 88 | DNA | PHP98392 | RB + UBI1ZM PRO::UBI1ZM 5UTR::UBI1ZM |
| | | | INTRON1::LOXP + NOS PRO::ZM-WUS2::IN2- |
| | | | 1 TERM + FMV ENH::PCSV ENH::MMV |
| | | | ENH::UBI1ZM PRO::UBI1ZM 5UTR::UBI1ZM |
| | | | INTRON1::ZM-ODP2::OS-T28 TERM + ZM- |
| | | | HSP17.7 PRO::MO-CRE-EXON1::ST-LS1 |
| | | | INTRON1::MO-CRE EXON2::PINII TERM::OS- |
| | | | UBI TERM + LOXP::ZM-GRF5::SB-GKAF |
| | | | TERM + SB-UBI PRO::SB-UBI INTRON1::ZS- |
| | | | GREEN1::OS-UBI TERM + SI-ALS PRO::SI- |
| | | | ALS 5UTR::ZM-ALS (HRA)::SB-UBI TERM + |
| | | | LB |
| 89 | DNA | PHP98393 | RB + FMV ENH::PCSV ENH::MMV |
| | | | ENH::UBI1ZM PRO::UBI1ZM 5UTR::UBI1ZM |
| | | | INTRON1::LOXP::ZM-ODP2::OS-T28 |
| | | | TERM:TAV-T2A:ZM-WUS2::IN2-1 TERM + |
| | | | AT-5-IV-2 INS + ZM-HSP17.7 PRO::MO-CRE- |
| | | | EXON1::ST-LS1 INTRON1::MO-CRE |
| | | | EXON2::PINII TERM + AT-5-IV-2 INS + |
| | | | LOXP:: ZM-GRF5::SB-GKAF TERM + SB-UBI |
| | | | PRO::SB-UBI INTRON1::ZS-GREEN1::OS-UBI |
| | | | TERM + SI-ALS PRO::SI-ALS 5UTR::ZM-ALS |
| | | | (HRA)::SB-UBI TERM + LB |
| 90 | DNA | PHP98407 | RB + LOXP + UBI1ZM PRO::UBI1ZM |
| | | | 5UTR::UBI1ZM INTRON1::ZM-GRF5::SB- |
| | | | GKAF TERM + ZM-HSP17.7 PRO::MO-CRE- |
| | | | EXON1::ST-LS1 INTRON1::MO-CRE |
| | | | EXON2::PINII TERM::OS-UBI TERM + |
| | | | LOXP:: +SI-UBI3 PRO::SI-UBI3 INTRON1::ZS- |
| | | | GREEN1::PINII TERM + SB-ALS PRO::ZM- |
| | | | ALS (HRA)::SB-PEPC1 TERM + LB |
| 91 | DNA | PHP98784 | RB + LOXP + NOS PRO::ZM-WUS2::IN2-1 |
| | | | TERM + FMV ENH::PCSV ENH::MMV |
| | | | ENH::UBI1ZM PRO::UBI1ZM 5UTR::UBI1ZM |
| | | | INTRON1::ZM-ODP2::OS-T28 TERM + AT-5- |
| | | | IV-2 INS + ZM-HSP17.7 PRO::MO-CRE- |
| | | | EXON1::ST-LS1 INTRON1::MO-CRE |
| | | | EXON2::PINII TERM + AT-5-IV-2 INS + LOXP + |
| | | | UBI1ZM PRO::UBI1ZM 5UTR::UBI1ZM |
| | | | INTRON1::SV40 NLS::CAS9 EXON1 |
| | | | (SP)(MO)::ST-LS1 INTRON2::CAS9 EXON2 |
| | | | (SP)(MO)::VIRD2 NLS:: PINII TERM + ZM-U6 |
| | | | POLIII CHR8 PRO::ZM-WXY-CR4::GUIDE |
| | | | RNA::ZM-U6 POLIII CHR8 TERM + ZM-U6 |
| | | | POLIII CHR8 PRO::ZM-WXY-CR4::GUIDE |
| | | | RNA::ZM-U6 POLIII CHR8 TERM + FL2 TERM + |
| | | | UBI1ZM 5UTR::UBI1ZM |
| | | | INTRON1::NPTII::PINII TERM + SB-UBI |
| | | | PRO::SB-UBI INTRON1::ZS-GREEN1::OS-UBI |
| | | | TERM + LB |
| 92 | DNA | PHP8418- | FRT1::PMI::PINII TERM::CZ19B1 TERM + |
| | | 0004 | UBI1ZM PRO::UBI1ZM 5UTR::UBI1ZM |
| | | | INTRON1::DS-RED2::PINII TERM + FRT6 |
| 93 | DNA | PHP54733 | RB + LOXP + RAB17 PRO:: MO-CRE- |
| | | | EXON1::ST-LS1 INTRON1::MO-CRE |
| | | | EXON2::PINII TERM + NOS PRO::ZM- |
| | | | WUS2::PINII TERM + UBI1ZM PRO |
| | | | PRO::UBI1ZM 5UTR::UBI1ZM INTRON1::ZM- |
| | | | ODP2::PINII TERM + LOXP + UBI1ZM PRO |
| | | | PRO::UBI1ZM 5UTR::UBI1ZM INTRON1::ZS- |
| | | | GREEN1::PINII TERM::SB-ACTIN TERM_SB- |
| | | | UBI PRO::SB-INTRON1::PMI::SB-UBI TERM + |
| | | | FRT87 + LB |
| 94 | DNA | ATPeF1D | Promoter and 5UTR sequence from Gene Model |
| | | PRO | GRMZM2G171628 |
| 95 | DNA | EIF4a PRO | Promoter and 5UTR sequence from Gene Model |
| | | | GRMZM2G116034 |
| 96 | DNA | RRM PRO | Promoter and 5UTR sequence from Gene Model |
| | | | GRMZM2G102829 |
| 97 | DNA | EF1A PRO | Promoter and 5UTR sequence from Gene Model |
| | | | GRMZM2G343543 |
| 98 | DNA | RPL10A | Promoter and 5UTR sequence from Gene Model |
| | | PRO | GRMZM2G144387 |
| 99 | DNA | APX2 PRO | Promoter and 5UTR sequence from Gene Model |
| | | | GRMZM2G140667 |
| 100 | DNA | VDAC1a | Promoter and 5UTR sequence from Gene Model |
| | | PRO | GRMZM2G150616 |
| 101 | DNA | EF1A-Tu | Promoter and 5UTR sequence from Gene Model |
| | | PRO | GRMZM2G153541 |
| 102 | DNA | LEA-14 PRO | Promoter and 5UTR sequence from Gene Model |
| | | | GRMZM2G352415 |
| 103 | DNA | RP-S7 PRO | Promoter and 5UTR sequence from Gene Model |
| | | | GRMZM2G156673 |
| 104 | DNA | RP-L5 PRO | Promoter and 5UTR sequence from Gene Model |
| | | | GRMZM5G815894 |
| 105 | DNA | ENO2 PRO | Promoter and 5UTR sequence from Gene Model |
| | | | GRMZM2G048371 |
| 106 | DNA | RP-L28 PRO | Promoter and 5UTR sequence from Gene Model |
| | | | GRMZM2G088060 |
| 107 | DNA | OS-ACTIN | Promoter sequence from rice actin |
| | | PRO | |
| 108 | DNA | ZM-UBI2 | Promoter and 5UTR sequence from |
| | | PRO | GRMZM2G419891 |
| 109 | DNA | UBI1ZM | Promoter and 5UTR sequence from UBI1ZM PRO |
| | | PRO | |
| 110 | DNA | GRP1 PRO | Promoter and 5UTR sequence from Gene Model |
| | | | GRMZM2G080603 |
| 111 | DNA | RP-L1 PRO | Promoter and 5UTR sequence from Gene Model |
| | | | GRMZM2G144387 |
| 112 | DNA | DNAJ2 PRO | Promoter and 5UTR sequence from Gene Model |
| | | | GRMZM2G364069 |
| 113 | DNA | SAMDC2 | Promoter and 5UTR sequence from Gene Model |
| | | | GRMZM2G154397 |
| 114 | DNA | CPPIase | Promoter and 5UTR sequence from Gene Model |
| | | PRO | GRMZM2G326111 |
| 115 | DNA | ZM-GRF5 | Maize Growth Regulating Factor5 coding |
| | | | sequence |
| 116 | PRT | ZM-GRF5 | Maize Growth Regulating Factor5 encoded protein |
| 117 | DNA | ZM-GRF4 | Maize Growth Regulating Factor4 coding |
| | | | sequence |
| 118 | PRT | ZM-GRF4 | Maize Growth Regulating Factor4 encoded protein |
| 119 | DNA | ZM-GIF1 | Maize GRF-Interacting Factor1 coding sequence |
| 120 | PRT | ZM-GIF1 | Maize GRF-Interacting Factor1 encoded protein |
| 121 | DNA | GRF4~GIF1 | Fusion between GRF4 and GIF1 coding sequences |
| 122 | PRT | GRF4~GIF1 | Encoded protein for fusion between GRF4 and |
| | | | GIF1 gene |
| 123 | DNA | Corngrass1 | ZM-MIR156B, MicroRNA156b also known as |
| | | (Cg1) | Corngrass1 |
| 124 | DNA | ZM- | Zea mays ortholog of Physcomitrella patens |
| | | STEMIN1 | STEMIN1 gene |
| 125 | DNA | ZM- | Zea mays ortholog of the Arabidopsis |
| | | REVOLUTA | REVOLUTA gene |
| 126 | DNA | ZM-ESR1 | Zea mays ortholog of the AT-ESRI gene |
| 127 | DNA | ZM-LAS1 | Zea mays ortholog of AT-LAS1 gene |
| 128 | DNA | ZM-CUC3 | Zea mays ortholog of the Arabidopsis AT-CUC3 |
| | | | gene |
| 129 | DNA | ZM- | Maize ortholog of the Arabidopsis |
| | | SuperShoot1 | SUPERSHOOT1 gene |
| 130 | DNA | ZM-MAX1 | Maize ortholog of the Arabidopsis MORE |
| | | | AXILLARY GROWTH1 gene |
| 131 | DNA | ZM-MAX4 | Maize ortholog of Arabidopsis MORE |
| | | | AXILLARY GROWTH4 gene |
| 132 | DNA | ZM-MIR- | Micro-RNA sequence used to target the transcript |
| | | SPS1 | of the SuperShoot1 gene |
| 133 | DNA | ZM-MIR- | Micro-RNA sequence used to target the transcript |
| | | MAX1 | of the Zm-MAX1 gene |
| 134 | DNA | ZM-MIR- | Micro-RNA sequence used to target the transcript |
| | | MAX4 | of the Zm-MAX4 gene |
| 135 | DNA | ZM-CUC1 | Zea mays ortholog of the Arabidopsis CUC1 gene |
| 136 | DNA | Plasmid C | Expression cassettes for Cas9 and gRNA for |
| | | | Targeted SDN2 |
| 137 | DNA | Plasmid B | Donor template sequence for Targeted SDN2 |
| 138 | DNA | Plasmid D | Expression cassette 3xENH::UBI PRO::ZM- |
| | | | ODP2::OS-T28 TERM for Targeted SDN2 |
| 139 | DNA | Plasmid E | Expression cassette OS-ACTIN PRO::ZM- |
| | | | WUS2::PINII TERM for Targeted SDN2 |
| 140 | DNA | GRF5~GIF1 | Fusion between GRF5 and GIF1 coding sequences |
| | | | (GRF5-GIF1) with intervening sequence encoding |
| | | | a flexible polylinker |
| 141 | PRT | GRF5~GIF1 | Encoded protein for fusion between GRF5 and |
| | | | GIF1 gene (GRF4-GIF1) with intervening |
| | | | sequence encoding a flexible polylinker |
| 142 | DNA | ZM-CUC2 | Zea mays ortholog of the Arabidopsis CUC2 gene |
| 143 | DNA | AT-WUS | Arabidopsis thaliana WUS coding sequence |
| 144 | PRT | AT-WUS | Arabidopsis thaliana WUS protein sequence |
| 145 | DNA | LJ-WUS | Lotus japonicus WUS coding sequence |
| 146 | PRT | LJ-WUS | Lotus japonicus WUS protein sequence |
| 147 | DNA | GM-WUS | Glycine max WUS coding sequence |
| 148 | PRT | GM-WUS | Glycine max WUS protein sequence |
| 149 | DNA | CS-WUS | Camelina sativa WUS coding sequence |
| 150 | PRT | CS-WUS | Camelina sativa WUS protein sequence |
| 151 | DNA | CR-WUS | Capsella rubella WUS coding sequence |
| 152 | PRT | CR-WUS | Capsella rubella WUS protein sequence |
| 153 | DNA | AA-WUS | Arabis alpina WUS coding sequence |
| 154 | PRT | AA-WUS | Arabis alpina WUS protein sequence |
| 155 | DNA | RS-WUS | Raphanus sativus WUS coding sequence |
| 156 | PRT | RS-WUS | Raphanus sativus WUS protein sequence |
| 157 | DNA | BN-WUS | Brassica napus WUS coding sequence |
| 158 | PRT | BN-WUS | Brassica napus WUS protein sequence |
| 159 | DNA | BO-WUS | Brassica oleracea var. oleracea WUS coding |
| | | | sequence |
| 160 | PRT | BO-WUS | Brassica oleracea var. oleracea WUS protein |
| | | | sequence |
| 161 | DNA | HA-WUS | Helianthus annuus WUS coding sequence |
| 162 | PRT | HA-WUS | Helianthus annuus WUS protein sequence |
| 163 | DNA | PT-WUS | Populus trichocarpa WUS coding sequence |
| | | (POPTR- | |
| | | WUS) | |
| 164 | PRT | PT-WUS | Populus trichocarpa WUS protein sequence |
| | | (POPTR- | |
| | | WUS) | |
| 165 | DNA | VV-WUS | Vitis vinifera WUS coding sequence |
| | | (VITVI- | |
| | | WUS) | |
| 166 | PRT | VV-WUS | Vitis vinifera WUS protein sequence |
| | | (VITVI- | |
| | | WUS) | |
| 167 | DNA | AT-WUS | Arabidopsis thaliana WUS coding sequence (soy |
| | | | optimized) |
| 168 | PRT | AT-WUS | Arabidopsis thaliana WUS protein sequence |
| 169 | DNA | LJ-WUS | Lotus japonicus WUS coding sequence (soy |
| | | | optimized) |
| 170 | PRT | LJ-WUS | Lotus japonicus WUS protein sequence |
| 171 | DNA | MT-WUS | Medicago truncatula WUS coding sequence (soy |
| | | | optimized) |
| 172 | PRT | MT-WUS | Medicago truncatula WUS protein sequence |
| 173 | DNA | PH-WUS | Petunia × hybrida WUS coding sequence (soy |
| | | (PETHY- | optimized) |
| | | WUS) | |
| 174 | PRT | PH-WUS | Petunia × hybrida WUS protein sequence |
| | | (PETHY- | |
| | | WUS) | |
| 175 | DNA | PV-WUS | Phaseolus vulgaris WUS coding sequence (soy |
| | | | optimized) |
| 176 | PRT | PV-WUS | Phaseolus vulgaris WUS protein sequence |
| 177 | DNA | ZM-WUS1 | Zea mays WUS1 coding sequence |
| 178 | PRT | ZM-WUS1 | Zea mays WUS1 protein sequence |
| 179 | DNA | ZM-WUS2 | Zea mays WUS2 coding sequence |
| 180 | PRT | ZM-WUS2 | Zea mays WUS2 protein sequence |
| 181 | DNA | ZM-WUS3 | Zea mays WUS3 coding sequence |
| 182 | PRT | ZM-WUS3 | Zea mays WUS3 protein sequence |
| 183 | DNA | ZM-WOX2A | Zea mays WOX2A coding sequence |
| 184 | PRT | ZM-WOX2A | Zea mays WOX2A protein sequence |
| 185 | DNA | ZM-WOX4 | Zea mays WOX4 coding sequence |
| 186 | PRT | ZM-WOX4 | Zea mays WOX4 protein sequence |
| 187 | DNA | ZM-WOX5A | Zea mays WOX5A coding sequence |
| 188 | PRT | ZM-WOX5A | Zea mays WOX5A protein sequence |
| 189 | DNA | ZM-WOX9 | Zea mays WOX9 coding sequence |
| 190 | PRT | ZM-WOX9 | Zea mays WOX9 protein sequence |
| 191 | DNA | GG-WUS | Gnetum gnemon WUS coding sequence |
| | | (GNEGN- | |
| | | WUS) | |
| 192 | PRT | GG- | Gnetum gnemon WUS protein sequence |
| | | WUS(GNEG | |
| | | N-WUS) | |
| 193 | DNA | MD-WUS | Malus domestica WUS coding sequence |
| | | (MALDO- | |
| | | WUS) | |
| 194 | PRT | MD-WUS | Malus domestica WUS protein sequence |
| | | (MALDO- | |
| | | WUS) | |
| 195 | DNA | ME-WUS | Manihot esculenta WUS coding sequence |
| | | (MANES- | |
| | | WUS) | |
| 196 | PRT | ME-WUS | Manihot esculenta WUS protein sequence |
| | | (MANES- | |
| | | WUS) | |
| 197 | DNA | KF-WUS | Kalanchoe fedtschenkoi WUS coding sequence |
| | | (KALFE- | |
| | | WUS) | |
| 198 | PRT | KF-WUS | Kalanchoe fedtschenkoi WUS protein sequence |
| | | (KALFE- | |
| | | WUS) | |
| 199 | DNA | GH-WUS | Gossypium hirsutum WUS coding sequence |
| | | (GOSHI- | |
| | | WUS) | |
| 200 | PRT | GH-WUS | Gossypium hirsutum WUS protein sequence |
| | | (GOSHI- | |
| | | WUS) | |
| 201 | DNA | ZOSMA- | Zostera marina WUS coding sequence |
| | | WUS | |
| 202 | PRT | ZOSMA- | Zostera marina WUS protein sequence |
| | | WUS | |
| 203 | DNA | AMBTR- | Amborella trichopoda WUS coding sequence |
| | | WUS | |
| 204 | PRT | AMBTR- | Amborella trichopoda WUS protein sequence |
| | | WUS | |
| 205 | DNA | AC-WUS | Aquilegia coerulea WUS coding sequence |
| | | (AQUCO- | |
| | | WUS) | |
| 206 | PRT | AC-WUS | Aquilegia coerulea WUS protein sequence |
| | | (AQUCO- | |
| | | WUS) | |
| 207 | DNA | AH-WUS | Amaranthus hypochondriacus WUS coding |
| | | (AMAHY- | sequence |
| | | WUS) | |
| 208 | PRT | AH-WUS | Amaranthus hypochondriacus WUS protein |
| | | (AMAHY- | sequence |
| | | WUS) | |
| 209 | DNA | CUCSA- | Cucumis sativus WUS coding sequence |
| | | WUS | |
| 210 | PRT | CUCSA - | Cucumis sativus WUS protein sequence |
| | | WUS | |
| 211 | DNA | PINTA- | Pinus taeda WUS coding sequence |
| | | WUS | |
| 212 | PRT | PINTA- | Pinus taeda WUS protein sequence |
| | | WUS | |
| 213 | DNA | SL-WUS | WUS ortholog of Solanum lycopersicum with |
| | | | KpnI site replaced by changing C to T at 762 bp |
| | | | coding sequence |
| 214 | PRT | SL-WUS | Solanum lycopersicum WUS protein sequence |
| 215 | DNA | ZM-ODP2 | Z. mays ODP2 coding sequence |
| 216 | PRT | ZM-ODP2 | Z. mays ODP2 protein sequence |
| 217 | DNA | ZM-BBM2 | Z. mays BBM2 coding sequence |
| 218 | PRT | ZM-BBM2 | Z. mays BBM2 protein sequence |
| 219 | DNA | ZM-ODP2 | Z. mays ODP2 coding sequence (synthetic) |
| 220 | DNA | OS-BBM1 | Oryza sativa BBM1 coding sequence |
| 221 | PRT | OS-BBM1 | Oryza sativa BBM1 protein sequence |
| 222 | DNA | OS-BBM2 | Oryza sativa BBM2 coding sequence |
| 223 | PRT | OS-BBM2 | Oryza sativa BBM2 protein sequence |
| 224 | DNA | OS-BBM3 | Oryza sativa BBM3 coding sequence |
| 225 | PRT | OS-BBM3 | Oryza sativa BBM3 protein sequence |
| 226 | DNA | SB-BBM2 | Sorghum bicolor BBM2 coding sequence |
| 227 | PRT | SB-BBM2 | Sorghum bicolor BBM2 protein sequence |
| 228 | DNA | SB-ODP2 | Sorghum bicolor ODP2 coding sequence |
| 229 | PRT | SB-ODP2 | Sorghum bicolor ODP2 protein sequence |
| 230 | DNA | SI-ODP2 | Setaria italica ODP2 coding sequence |
| 231 | PRT | SI-ODP2 | Setaria italica ODP2 protein sequence |
| 232 | DNA | 234 | Brachypodium distachyom ODP2 coding sequence |
| 233 | PRT | BD-ODP2 | Brachypodium distachyom ODP2 protein sequence |
| 234 | DNA | SB-ODP2 | Sorghum bicolor ODP2 genomic sequence |
| 235 | DNA | PHP8418- | RB + LOXP + NOS PRO::WUS2::IN2-1 TERM + |
| | | 0005 | FMV ENH::PVSC ENH::MMV ENH::UBI1ZM |
| | | | PRO::UBI1ZM 5UTR::UBI1ZM |
| | | | INTRON1::ZM-ODP2::OS-T28 TERM + AT5- |
| | | | IV-7 INS + HSP17.7 PRO::MO-CRE |
| | | | EXON1::ST-LS1 INTRON1::MO-CRE |
| | | | EXON2::PINII TERM + OS-UBI TERM + LOXP + |
| | | | UBI1ZM PRO::UBI1ZM 5UTR::UBI1ZM |
| | | | INTRON1::SV40 NLS::CAS9 EXON1::ST-LS1 |
| | | | INTRON1::CAS9 EXON2::VIRD2 NLS::ZM- |
| | | | UBI TERM + ZM-U6 POLII CHR8 PRO::ZM- |
| | | | CHR1-53.66-45CR1::GUIDE RNA::ZM-U6 |
| | | | POLII CHR8 PRO TERM + ZM-ALS PRO::ZM- |
| | | | ALS (HRA)-V2::SB-UBI TERM + ZM CHR1- |
| | | | 53.66-45CR1 TARGET SITE + ZM-SEQ11 |
| | | | (GENOMIC)(EDH5G) + SB-UBI |
| | | | PRO::NPTII::SI-UBI TERM (MOD1) + ZM- |
| | | | SEQ12 (GENOMIC)(EDH5G) + ZM CHR1- |
| | | | 53.66-45CR1 TARGET SITE + SB-UBI |
| | | | PRO::ZS-GREEN::OS-UBI TERM + LB |
| 236 | DNA | PHP8418- | RB + LOXP + NOS PRO::WUS2::IN2-1 TERM + |
| | | 0006 | FMV ENH::PVSC ENH::MMV ENH::UBI1ZM |
| | | | PRO::UBI1ZM 5UTR::UBI1ZM |
| | | | INTRON1::ZM-ODP2::OS-T28 TERM LOXP + |
| | | | AT5-IV-7 INS + HSP17.7 PRO::MO-CRE |
| | | | EXON1::ST-LS1 INTRON1::MO-CRE |
| | | | EXON2::PINII TERM + OS-UBI TERM + |
| | | | UBI1ZM PRO::UBI1ZM 5UTR::UBI1ZM |
| | | | INTRON1::SV40 NLS::CAS9 EXON1:: ST-LS1 |
| | | | INTRON1::CAS9 EXON2::VIRD2 NLS::ZM- |
| | | | UBI TERM + ZM-U6 POLII CHR8 PRO::ZM- |
| | | | CHR1-53.66-45CR1::GUIDE RNA:: ZM-U6 |
| | | | POLII CHR8 PRO TERM + ZM-ALS PRO::ZM- |
| | | | ALS (HRA)-V2::SB-UBI TERM + ZM CHR1- |
| | | | 53.66-45CR1 TARGET SITE + ZM-SEQ11 |
| | | | (GENOMIC)(EDH5G) + SB-UBI |
| | | | PRO::NPTII::SI-UBI TERM (MOD1) + ZM- |
| | | | SEQ12 (GENOMIC)(EDH5G) + ZM CHR1- |
| | | | 53.66-45CR1 TARGET SITE + SB-UBI |
| | | | PRO::ZS-GREEN::OS-UBI TERM + LB |
| 237 | DNA | PHP70298 | VIRB1 + VIRB2 + VIRB3 + VIRB4 + VIRB5 + |
| | | | VIRB6 + VIRB7 + VIRB8 + VIRB9 + VIRB10 + |
| | | | VIRB11 + VIRG + VIRC2 + VIRC1 + VIRD1 + |
| | | | VIRD2 + GENT + COLE1 ORI + PVS1 ORI |
| 238 | DNA | RV005393 | VIRA + VIRJ + VIRB1 + VIRB2 + VIRB3 + |
| | | | VIRB4 + VIRB5 + VIRB6 + VIRB7 + VIRB8 + |
| | | | VIRB9 + VIRB10 + VIRB11 + VIRG-V1 + |
| | | | VIRC2 + VIRC1(FL) + VIRD1 + VIRD2 + |
| | | | VIRD3 + VIRD4 + VIRD5 + VIRE1 + VIRE2 + |
| | | | VIRE3 + GENT + ORI V + CTL + TRF A + |
| | | | PARDE |
| 239 | DNA | RV007497 | AR-VIRA-ALT1 + AR-VIRB1 + AR-VIRB2 + |
| | | | AR-VIRB3 + AR-VIRB4-ALT1 + AR-VIRB5-V1 + |
| | | | AR-VIRB6 + AR-VIRB7 + AR-VIRB8 + AR- |
| | | | VIRB9 + AR-VIRB10 + AR-VIRB11 + AR-VIRG + |
| | | | AR-VIRC2 + AR-VIRC1-V1 + AR-VIRD1 + |
| | | | AR-VIRD2 + AR-VIRD3-V1 + AR-VIRD4 + AR- |
| | | | VIRD5-ALT1 + AR-VIRF + AR-VIRE3 + AR- |
| | | | GALLS-V1 + GENT + COLE1 ORI + PVS1 ORI |
| 240 | DNA | PHP71193 | UBI1ZM PRO::UBI1ZM 5UTR:: UBI1ZM |
| | | | INTRON1::SV40 NLS::CAS9 EXON1:: ST-LS1 |
| | | | INTRON1::CAS9 EXON2::VIRD2 NLS::PINII |
| | | | TERM + ZM-U6 POLIII CHR8 PRO::ZM-CHR1- |
| | | | 52.56-8CR1::GUIDE RNA:: ZM-U6 POLIII |
| | | | CHR8 PRO TERM + PUC ORI + AMP + F1 ORI |
| 241 | DNA | PHP71788 | RB + ZM-SEQ80 + LOXP + UBI1ZM |
| | | | PRO::UBI1ZM 5UTR::UBI1ZM |
| | | | INTRON1::FRT1 + NPTII::PINII TERM + |
| | | | FRT87 + ZM-SEQ81 + LB |
| 242 | DNA | PHP21875 | UBI1ZM PRO::UBI1ZM 5UTR:: UBI1ZM |
| | | | INTRON1::ZM-ODP2::PINII TERM + PUC ORI + |
| | | | KAN + F1 ORI |
| 243 | DNA | PHP40428 | RB + H2B PRO:: UBI1ZM 5UTR:: UBI1ZM |
| | | | INTRON1::ZS-GREEN::PINII TERM + DMMV |
| | | | PRO::DMMV5UTR:: |
| | | | ATTB4::UNISCN-22::ATTB3::ST-LS1 |
| | | | INTRON2::ATTB3::UNISCN-22::ATTB4::NOS |
| | | | TERM + LB |
| 244 | DNA | PHP93586 | RB + PLTP PRO::ZM-WUS2::TAV- |
| | | | T2A::REPA::OS-T28 TERM + SB-UBI PRO::SB- |
| | | | UBI INTRON1::ZSGREEN1::OS-UBI TERM + |
| | | | SB-ALS PRO::ZM-ALS::SB-PEPC1 TERM + LB |
| 245 | DNA | PHP93742 | RB + LOXP + ZM-EXP13262.1 PRO::ZM- |
| | | | WUS2::TAV-T2A::ZM-ODP2::IN2 TERM + ZM- |
| | | | EXP11232.1 PRO::ZM-MPKL-A::ZM MiRNA |
| | | | PRECURSOR 396H::ZM-MPKL-A STAR |
| | | | SEQ::PINII TERM + LOXP + SB-UBI PRO::SB- |
| | | | UBI INTRON1::ZSGREEN1::OS-UBI TERM + |
| | | | SI-ALS PRO::SI-ALS 5 UTR::ZM-ALS::SB-UBI |
| | | | TERM + LB |
| 246 | DNA | PHP93937 | RB + LOXP + ZM-EXP11232.1 PRO::ZM- |
| | | | WUS2::IN2 TERM + ZM-EXP13262 PRO::ZM- |
| | | | MPKL-A::ZM MIRNA PRECURSOR 396H::ZM- |
| | | | MPKL-A STAR SEQ::ZM-EXP23070 TERM + |
| | | | LOXP + SB-UBI PRO::SB-UBI |
| | | | INTRON1::ZSGREEN1::OS-UBI TERM + SB- |
| | | | ALS PRO::ZM-ALS::SB-UBI TERM + LB |
| 247 | DNA | PHP94638 | RB + LOXP + ZM-HSP17.7 PRO::MO-CRE |
| | | | EXON1:: ST-LS1 INTRON1::MO-CRE |
| | | | EXON2::PINII TERM + IN2 TERM::ZM- |
| | | | WUS2::ZM-UBI1 INTRON1::ZM-UBI1 |
| | | | MINPRO::ZM-UBI1 5UTR + UBI1ZM |
| | | | PRO::UBI1ZM 5UTR:: UBI1ZM INTRON1::ZM- |
| | | | ODP2::ZM-UBI TERM + LOXP + SB-UBI |
| | | | PRO::SB-UBI INTRON1::ZM-MPKL-A::ZM |
| | | | MiRNA PRECURSOR 396H::ZM-MPKL-A |
| | | | STAR SEQ::SB-GKAF TERM + LB |
| 248 | DNA | PHP98567 | RB + LOXP + UBI1ZM PRO (3X ZM-AS2 |
| | | | EME)::UBI1ZM INTRON1::ZM-WUS2::IN2 |
| | | | TERM + UBI1ZM PRO (3X ZM-AS2 |
| | | | EME)::UBI1ZM INTRON1::ZM-ODP2::OS-T28 |
| | | | TERM + CZ19B1 TERM + ZM-HSP17.7 |
| | | | PRO::MO-CRE EXON1:: ST-LS1 |
| | | | INTRON1::MO-CRE EXON2::PINII TERM + |
| | | | LOXP + SB-UBI PRO::SB-UBI |
| | | | INTRON1::ZSGREEN1::OS-UBI TERM + SB- |
| | | | ALS PRO::ZM-ALS::SB-UBI TERM + LB |
| 249 | DNA | PHP97452 | RB + LOXP + UBI1ZM PRO (3X ZM-AS2 |
| | | | EME)::UBI1ZM INTRON1::ZM-WUS2::IN2 |
| | | | TERM + UBI1ZM PRO::UBI1ZM |
| | | | 5UTR::UBI1ZM INTRON1::ZM-ODP2::OS-T28 |
| | | | TERM + CZ19B1 TERM + ZM-HSP17.7 |
| | | | PRO::MO-CRE EXON1::ST-LS1 |
| | | | INTRON1::MO-CRE EXON2::PINII TERM + |
| | | | LOXP + SB-UBI PRO::SB-UBI |
| | | | INTRON1::ZSGREEN1::OS-UBI TERM + SB- |
| | | | ALS PRO::ZM-ALS::SB-UBI TERM + LB |
| 250 | DNA | PHP97456 | RB + LOXP + UBI1ZM PRO (3X ZM-AS2 |
| | | | EME)::UBI1ZM INTRON1::ZM-WUS2::IN2 |
| | | | TERM + UBI1ZM PRO::UBI1ZM 5UTR::ADH1 |
| | | | INTRON1::ZM-ODP2::OS-T28 TERM + |
| | | | CZ19B1 TERM + ZM-HSP17.7 PRO::MO-CRE |
| | | | EXON1:: ST-LS1 INTRON1::MO-CRE |
| | | | EXON2::PINII TERM + LOXP + SB-UBI |
| | | | PRO::SB-UBI INTRON1::ZSGREEN1::OS-UBI |
| | | | TERM + SB-ALS PRO::ZM-ALS::SB-UBI |
| | | | TERM + LB |
| 251 | DNA | PHP97977 | RB + LOXP + UBI1ZM PRO (3X ZM-AS2 |
| | | | EME)::UBI1ZM INTRON1::ZM-WUS2::IN2 |
| | | | TERM + UBI1ZM PRO::UBI1ZM |
| | | | 5UTR(TR1)::ZM-ODP2::OS-T28 TERM + |
| | | | CZ19B1 TERM + ZM-HSP17.7 PRO::MO-CRE |
| | | | EXON1:: ST-LS1 INTRON1::MO-CRE |
| | | | EXON2::PINII TERM + LOXP + SB-UBI |
| | | | PRO::SB-UBI INTRON1:: ZSGREEN1::OS-UBI |
| | | | TERM + SB-ALS PRO::ZM-ALS::SB-UBI |
| | | | TERM + LB |
| 252 | DNA | PHP97449 | RB + LOXP + UBI1ZM PRO::UBI1ZM |
| | | | 5UTR(TR1)::ZM-WUS2::IN2 TERM + UBI1ZM |
| | | | PRO (3X ZM-AS2 EME)::UBI1ZM |
| | | | INTRON1::ZM-ODP2::OS-T28 TERM + |
| | | | CZ19B1 TERM + ZM-HSP17.7 PRO::MO-CRE |
| | | | EXON1::ST-LS1 INTRON1::MO-CRE EXON2:: |
| | | | PINII TERM + LOXP + SB-UBI PRO::SB-UBI |
| | | | INTRON1::ZSGREEN1::OS-UBI TERM + SB- |
| | | | ALS PRO::ZM-ALS::SB-UBI TERM + LB |
| 253 | DNA | PHP98680 | RB + FMV ENHANCER + PCSV ENH + MMV |
| | | | ENH + UBI1ZM PRO::UBI1ZM 5UTR::UBI1ZM |
| | | | INTRON1::LOXP::ZM-ODP2::TAV-T2A::ZM- |
| | | | WUS2::IN2 TERM + AT-5-IV-2 INS + ZM- |
| | | | HSP17.7 PRO::MO-CRE EXON1:: ST-LS1 |
| | | | INTRON1::MO-CRE EXON2:: PINII TERM + |
| | | | AT-5-IV-2 INS + LOXP + ZM-MIR 156B + SB- |
| | | | GKAF TERM + SB-UBI PRO::SB-UBI |
| | | | INTRON1:: ZSGREEN1::OS-UBI TERM + SI- |
| | | | ALS PRO::SI-ALS 5 UTR::ZM-ALS::SB-UBI |
| | | | TERM + LB |
| 254 | DNA | PHP98681 | RB + UBI1ZM PRO::UBI1ZM 5UTR::UBI1ZM |
| | | | INTRON1::LOXP::NOS PRO:: ZM-WUS2::IN2 |
| | | | TERM + FMV ENHANCER + PCSV ENH + |
| | | | MMV ENH + UBI1ZM PRO::UBI1ZM |
| | | | 5UTR::UBI1ZM INTRON1::ZM-ODP2::OS-T28 |
| | | | TERM + AT-5-IV-2 INS + ZM-HSP17.7 |
| | | | PRO::MO-CRE EXON1:: ST-LS1 |
| | | | INTRON1::MO-CRE EXON2:: PINII TERM + |
| | | | AT-5-IV-2 INS + LOXP + ZM-MIR 156B + SB- |
| | | | GKAF TERM + SB-UBI PRO::SB-UBI |
| | | | INTRON1:: ZSGREEN1::OS-UBI TERM + SI- |
| | | | ALS PRO::SI-ALS 5 UTR::ZM-ALS::SB-UBI |
| | | | TERM + LB |
| 255 | DNA | PHP98328 | RB + LOXP + BD-CAB2 UARI::OC EME1::OC |
| | | | EME1::BD-CAB2 PRO::ZM-HPLV9 |
| | | | INTRON1::ZM-WUS2::PINII TERM + UBI1ZM |
| | | | PRO::UBI1ZM 5UTR::UBI1ZM INTRON1::ZM- |
| | | | ODP2::PINII TERM + ZM-HSP17.7 PRO::MO- |
| | | | CRE EXON1:: ST-LS1 INTRON1::MO-CRE |
| | | | EXON2:: PINII TERM + LOXP + SB-UBI3 |
| | | | PRO::SB-UBI3 INTRON1:: ZSGREEN1::PINII |
| | | | TERM + SB-ALS PRO:: ZM-ALS::SB-PEPC1 |
| | | | TERM + LB |
| 256 | DNA | PHP98329 | RB + LOXP + ZM-GOS2 PRO (UAR):: OC |
| | | | EME1::OC EME1::ZM-GOS2 PRO (CORE)::ZM- |
| | | | GOS2 INTRON1::ZM-WUS2::PINII TERM + |
| | | | UBI1ZM PRO::UBI1ZM 5UTR::UBI1ZM |
| | | | INTRON1::ZM-ODP2::PINII TERM + ZM- |
| | | | HSP17.7 PRO::MO-CRE EXON1:: ST-LS1 |
| | | | INTRON1::MO-CRE EXON2:: PINII TERM + |
| | | | OS-UBI TERM + LOXP + SB-UBI3 PRO::SB- |
| | | | UBI3 INTRON1:: ZSGREEN1::PINII TERM + |
| | | | SB-ALS PRO:: ZM-ALS::SB-PEPC1 TERM + |
| | | | LB |
| 257 | DNA | PHP98327 | RB + LOXP + BD-CAB2 UARI::OC EME1::OC |
| | | | EME1::BD-CAB2 PRO::ZM-HPLV9 |
| | | | INTRON1::ZM-WUS2::PINII TERM + FMV |
| | | | ENHANCER + PCSV ENH + MMV ENH + |
| | | | UBI1ZM PRO::UBI1ZM 5UTR::UBI1ZM |
| | | | INTRON1::ZM-ODP2::OS-T28 TERM + AT-5- |
| | | | IV-7 INS + ZM-HSP17.7 PRO::MO-CRE |
| | | | EXON1:: ST-LS1 INTRON1::MO-CRE EXON2:: |
| | | | PINII TERM + OS-UBI TERM + LOXP + SI- |
| | | | UBI3 PRO::SI-UBI3 INTRON1:: |
| | | | ZSGREEN1::PINII TERM + SB-ALS PRO:: ZM- |
| | | | ALS::SB-PEPC1 TERM + LB |
| 258 | DNA | PHP98370 | RB + LOXP + ZM-GOS2 PRO (UAR):: OC |
| | | | EME1::OC EME1::ZM-GOS2 PRO (CORE)::ZM- |
| | | | GOS2 INTRON1::ZM-WUS2::PINII TERM + |
| | | | FMV ENHANCER + PCSV ENH + MMV ENH + |
| | | | UBI1ZM PRO::UBI1ZM 5UTR::UBI1ZM |
| | | | INTRON1::ZM-ODP2::OS-T28 TERM + AT-5- |
| | | | IV-7 INS + ZM-HSP17.7 PRO::MO-CRE |
| | | | EXON1:: ST-LS1 INTRON1::MO-CRE EXON2:: |
| | | | PINII TERM + OS-UBI TERM + LOXP + SI- |
| | | | UBI3 PRO::SI-UBI3 INTRON1:: |
| | | | ZSGREEN1::PINII TERM + SB-ALS PRO:: ZM- |
| | | | ALS::SB-PEPC1 TERM + LB |
| 259 | DNA | PHP98564 | RB + LOXP + ZM-PLTP PRO::ZM-PLTP |
| | | | 5UTR::ZM-WUS2::IN2 TERM + UBI1ZM |
| | | | PRO::UBI1ZM 5UTR::UBI1ZM INTRON1::ZM- |
| | | | ODP2::PINII TERM + ZM-HSP17.7 PRO::MO- |
| | | | CRE EXON1:: ST-LS1 INTRON1::MO-CRE |
| | | | EXON2:: PINII TERM + OS-UBI TERM + |
| | | | LOXP + SB-UBI3 PRO::SB-UBI3 INTRON1:: |
| | | | ZSGREEN1::PINII TERM + SB-ALS PRO:: ZM- |
| | | | ALS::SB-PEPC1 TERM + LB |
| 260 | DNA | PHP98565 | RB + LOXP + ZM-PLTP PRO::ZM-PLTP |
| | | | 5UTR::ZM-WUS2::IN2 TERM + FMV |
| | | | ENHANCER + PCSV ENH + MMV ENH + |
| | | | UBI1ZM PRO::UBI1ZM 5UTR::UBI1ZM |
| | | | INTRON1::ZM-ODP2::OS-T28 TERM + AT-5- |
| | | | IV-7 INS + ZM-HSP17.7 PRO::MO-CRE |
| | | | EXON1:: ST-LS1 INTRON1::MO-CRE EXON2:: |
| | | | PINII TERM + OS-UBI TERM + LOXP + SI- |
| | | | UBI3 PRO::SI-UBI3 INTRON1:: |
| | | | ZSGREEN1::PINII TERM + SB-ALS PRO:: ZM- |
| | | | ALS::SB-PEPC1 TERM + LB |
| 261 | DNA | PHP97447 | RB + LOXP + ZM-HSP17.7 PRO::MO-CRE |
| | | | EXON1:: ST-LS1 INTRON1::MO-CRE EXON2:: |
| | | | PINII TERM + UBI1ZM PRO::UBI1ZM |
| | | | 5UTR::UBI1ZM INTRON1::ZM-WUS2::IN2 |
| | | | TERM + UBI1ZM PRO (3X ZM-AS2 EME):: |
| | | | UBI1ZM INTRON1::ZM-ODP2::OS-T28 TERM + |
| | | | LOXP + SB-UBI PRO::SB-UBI INTRON1:: |
| | | | ZSGREEN1::OS-UBI TERM + SI-ALS PRO::SI- |
| | | | ALS 5UTR::ZM-ALS::SB-UBI TERM + LB |
| 262 | DNA | PHP97881 | RB + LOXP + UBI1ZM PRO::UBI1ZM |
| | | | 5UTR::UBI1ZM INTRON1::ZM-WUS2::IN2 |
| | | | TERM + UBI1ZM PRO (3X ZM-AS2 EME):: |
| | | | UBI1ZM INTRON1::ZM-ODP2::OS-T28 TERM + |
| | | | ZM-HSP17.7 PRO::MO-CRE EXON1:: ST-LS1 |
| | | | INTRON1::MO-CRE EXON2:: PINII TERM + |
| | | | LOXP + SB-UBI PRO::SB-UBI INTRON1:: |
| | | | ZSGREEN1::OS-UBI TERM + SI-ALS PRO::SI- |
| | | | ALS 5UTR::ZM-ALS::SB-UBI TERM + LB |
| 263 | DNA | PHP99676 | RB + LOXP + NOS PRO::ZM-WUS2::PINII |
| | | | TERM + ZM-GRP1 PRO::ZM-ODP2::PINII |
| | | | TERM + AT-5-IV-7 INS + ZM-HSP17.7 |
| | | | PRO::MO-CRE EXON1:: ST-LS1 |
| | | | INTRON1::MO-CRE EXON2:: PINII TERM + |
| | | | OS-UBI TERM + LOXP + SI-UBI3 PRO::SI- |
| | | | UBI3 INTRON1::ZSGREEN1::PINII TERM + |
| | | | SB-ALS PRO::ZM-ALS::SB-PEPC1 TERM + LB |
| 264 | DNA | PHP99677 | RB + LOXP + NOS PRO::ZM-WUS2::PINII |
| | | | TERM + ZM-RPL1 PRO::ZM-ODP2::PINII |
| | | | TERM + AT-5-IV-7 INS + ZM-HSP17.7 |
| | | | PRO::MO-CRE EXON1:: ST-LS1 |
| | | | INTRON1::MO-CRE EXON2:: PINII TERM + |
| | | | OS-UBI TERM + LOXP + SI-UBI3 PRO::SI- |
| | | | UBI3 INTRON1::ZSGREEN1::PINII TERM + |
| | | | SB-ALS PRO::ZM-ALS::SB-PEPC1 TERM + LB |
| 265 | DNA | PHP99678 | RB + LOXP + NOS PRO::ZM-WUS2::PINII |
| | | | TERM + ZM-DNAJ PRO::ZM-ODP2::PINII |
| | | | TERM + AT-5-IV-7 INS + ZM-HSP17.7 |
| | | | PRO::MO-CRE EXON1:: ST-LS1 |
| | | | INTRON1::MO-CRE EXON2:: PINII TERM + |
| | | | OS-UBI TERM + LOXP + SI-UBI3 PRO::SI- |
| | | | UBI3 INTRON1::ZSGREEN1::PINII TERM + |
| | | | SB-ALS PRO::ZM-ALS::SB-PEPC1 TERM + LB |
| 266 | DNA | PHP99679 | RB + LOXP + NOS PRO::ZM-WUS2::PINII |
| | | | TERM + ZM-SAMDC2 PRO::ZM-ODP2::PINII |
| | | | TERM + AT-5-IV-7 INS + ZM-HSP17.7 |
| | | | PRO::MO-CRE EXON1:: ST-LS1 |
| | | | INTRON1::MO-CRE EXON2:: PINII TERM + |
| | | | OS-UBI TERM + LOXP + SI-UBI3 PRO::SI- |
| | | | UBI3 INTRON1::ZSGREEN1::PINII TERM + |
| | | | SB-ALS PRO::ZM-ALS::SB-PEPC1 TERM + LB |
| 267 | DNA | PHP99680 | RB + LOXP + NOS PRO::ZM-WUS2::PINII |
| | | | TERM + ZM-PPISO PRO::ZM-ODP2::PINII |
| | | | TERM + AT-5-IV-7 INS + ZM-HSP17.7 |
| | | | PRO::MO-CRE EXON1:: ST-LS1 |
| | | | INTRON1::MO-CRE EXON2:: PINII TERM + |
| | | | OS-UBI TERM + LOXP + SI-UBI3 PRO::SI- |
| | | | UBI3 INTRON1::ZSGREEN1::PINII TERM + |
| | | | SB-ALS PRO::ZM-ALS::SB-PEPC1 TERM + LB |
| 268 | DNA | PHP99569 | RB + LOXP + NOS PRO::ZM-WUS2::PINII |
| | | | TERM + ZM-EF1A PRO::ZM-ODP2::PINII |
| | | | TERM + AT-5-IV-7 INS + ZM-HSP17.7 |
| | | | PRO::MO-CRE EXON1:: ST-LS1 |
| | | | INTRON1::MO-CRE EXON2:: PINII TERM + |
| | | | OS-UBI TERM + LOXP + SI-UBI3 PRO::SI- |
| | | | UBI3 INTRON1::ZSGREEN1::PINII TERM + |
| | | | SB-ALS PRO::ZM-ALS::SB-PEPC1 TERM + LB |
| 269 | DNA | PHP100011 | RB + LOXP + NOS PRO::ZM-WUS2::PINII |
| | | | TERM + FMV ENHANCER + PCSV ENH + |
| | | | MMV ENH + ZM-RPL1 PRO::ZM-ODP2::PINII |
| | | | TERM + AT-5-IV-7 INS + ZM-HSP17.7 |
| | | | PRO::MO-CRE EXON1:: ST-LS1 |
| | | | INTRON1::MO-CRE EXON2:: PINII TERM + |
| | | | OS-UBI TERM + LOXP + SI-UBI3 PRO::SI- |
| | | | UBI3 INTRON1::ZSGREEN1::PINII TERM + |
| | | | SB-ALS PRO::ZM-ALS::SB-PEPC1 TERM + LB |
| 270 | DNA | PHP100012 | RB + LOXP + NOS PRO::ZM-WUS2::PINII |
| | | | TERM + FMV ENHANCER + PCSV ENH + |
| | | | MMV ENH + ZM-DNAJ PRO::ZM-ODP2::PINII |
| | | | TERM + AT-5-IV-7 INS + ZM-HSP17.7 |
| | | | PRO::MO-CRE EXON1:: ST-LS1 |
| | | | INTRON1::MO-CRE EXON2:: PINII TERM + |
| | | | OS-UBI TERM + LOXP + SI-UBI3 PRO::SI- |
| | | | UBI3 INTRON1::ZSGREEN1::PINII TERM + |
| | | | SB-ALS PRO::ZM-ALS::SB-PEPC1 TERM + LB |
| 271 | DNA | PHP100013 | RB + LOXP + NOS PRO::ZM-WUS2::PINII |
| | | | TERM + FMV ENHANCER + PCSV ENH + |
| | | | MMV ENH + ZM-SAMDC2 PRO::ZM- |
| | | | ODP2::PINII TERM + AT-5-IV-7 INS + ZM- |
| | | | HSP17.7 PRO::MO-CRE EXON1:: ST-LS1 |
| | | | INTRON1::MO-CRE EXON2:: PINII TERM + |
| | | | OS-UBI TERM + LOXP + SI-UBI3 PRO::SI- |
| | | | UBI3 INTRON1::ZSGREEN1::PINII TERM + |
| | | | SB-ALS PRO::ZM-ALS::SB-PEPC1 TERM + LB |
| 272 | DNA | PHP100056 | RB + LOXP + NOS PRO::ZM-WUS2::PINII |
| | | | TERM + FMV ENHANCER + PCSV ENH + |
| | | | MMV ENH + ZM-PPISO PRO::ZM-ODP2::PINII |
| | | | TERM + AT-5-IV-7 INS + ZM-HSP17.7 |
| | | | PRO::MO-CRE EXON1:: ST-LS1 |
| | | | INTRON1::MO-CRE EXON2:: PINII TERM + |
| | | | OS-UBI TERM + LOXP + SI-UBI3 PRO::SI- |
| | | | UBI3 INTRON1::ZSGREEN1::PINII TERM + |
| | | | SB-ALS PRO::ZM-ALS::SB-PEPC1 TERM + LB |
| 273 | DNA | PHP100057 | RB + LOXP + NOS PRO::ZM-WUS2::PINII |
| | | | TERM + FMV ENHANCER + PCSV ENH + |
| | | | MMV ENH + ZM-EF1A PRO::ZM-ODP2::PINII |
| | | | TERM + AT-5-IV-7 INS + ZM-HSP17.7 |
| | | | PRO::MO-CRE EXON1:: ST-LS1 |
| | | | INTRON1::MO-CRE EXON2:: PINII TERM + |
| | | | OS-UBI TERM + LOXP + SI-UBI3 PRO::SI- |
| | | | UBI3 INTRON1::ZSGREEN1::PINII TERM + |
| | | | SB-ALS PRO::ZM-ALS::SB-PEPC1 TERM + LB |
| 274 | DNA | PHP100158 | RB + LOXP + NOS PRO::ZM-WUS2::PINII |
| | | | TERM + FMV ENHANCER + PCSV ENH + |
| | | | MMV ENH + ZM-GRP1 PRO::ZM-ODP2::PINII |
| | | | TERM + AT-5-IV-7 INS + ZM-HSP17.7 |
| | | | PRO::MO-CRE EXON1:: ST-LS1 |
| | | | INTRON1::MO-CRE EXON2:: PINII TERM + |
| | | | OS-UBI TERM + LOXP + SI-UBI3 PRO::SI- |
| | | | UBI3 INTRON1::ZSGREEN1::PINII TERM + |
| | | | SB-ALS PRO::ZM-ALS::SB-PEPC1 TERM + LB |
| 275 | DNA | PHP98229 | RB + LOXP + NOS PRO::ZM-WUS2::IN2 |
| | | | TERM + AT-5-IV-2 INS + FMV ENHANCER + |
| | | | PCSV ENH + MMV ENH + UBI1ZM |
| | | | PRO::UBI1ZM 5UTR::UBI1ZM INTRON1::ZM- |
| | | | ODP2::OS-T28 TERM + AT-5-IV-2 INS + ZM- |
| | | | HSP17.7 PRO::MO-CRE EXON1:: ST-LS1 |
| | | | INTRON1::MO-CRE EXON2:: PINII TERM + |
| | | | LOXP + SB-UBI PRO::SB-UBI INTRON1:: |
| | | | ZSGREEN1::OS-UBI TERM + SI-ALS PRO::SI- |
| | | | ALS 5 UTR::ZM-ALS::SB-UBI TERM + LB |
| 276 | DNA | PHP100159 | RB + LOXP + NOS PRO::ZM-WUS2::IN2 |
| | | | TERM + FMV ENHANCER + PCSV ENH + |
| | | | MMV ENH + UBI1ZM PRO::UBI1ZM |
| | | | 5UTR::UBI1ZM INTRON1::ZM-ODP2::OS-T28 |
| | | | TERM + UBI1ZM PRO::UBI1ZM |
| | | | 5UTR::UBI1ZM INTRON1::ZM-CYCD2::SB- |
| | | | GKAF TERM + AT-5-IV-7 INS + ZM-HSP17.7 |
| | | | PRO::MO-CRE EXON1:: ST-LS1 |
| | | | INTRON1::MO-CRE EXON2:: PINII TERM + |
| | | | OS-UBI TERM + LOXP + SB-UBI3 PRO::SB- |
| | | | UBI3 INTRON1::ZSGREEN1::PINII TERM + |
| | | | SB-ALS PRO:: ZM-ALS::SB-PEPC1 TERM + LB |
| 277 | DNA | PHP100160 | RB + LOXP + NOS PRO::ZM-WUS2::IN2 |
| | | | TERM + FMV ENHANCER + PCSV ENH + |
| | | | MMV ENH + UBI1ZM PRO::UBI1ZM |
| | | | 5UTR::UBI1ZM INTRON1::ZM-ODP2::OS-T28 |
| | | | TERM + UBI1ZM PRO::UBI1ZM |
| | | | 5UTR::UBI1ZM INTRON1::REPA(WDV)::SB- |
| | | | GKAF TERM + AT-5-IV-7 INS + ZM-HSP17.7 |
| | | | PRO::MO-CRE EXON1:: ST-LS1 |
| | | | INTRON1::MO-CRE EXON2:: PINII TERM + |
| | | | OS-UBI TERM + LOXP + SB-UBI3 PRO::SB- |
| | | | UBI3 INTRON1:: ZSGREEN1::PINII TERM + |
| | | | SB-ALS PRO::ZM-ALS::SB-PEPC1 TERM + LB |
| 278 | DNA | PHP100229 | RB + LOXP + ZM-ATP SYN PRO::ZM- |
| | | | WUS2::PINII TERM + FMV ENHANCER + |
| | | | PCSV ENH + MMV ENH + UBI1ZM |
| | | | PRO::UBI1ZM 5UTR::UBI1ZM INTRON1::ZM- |
| | | | ODP2::OS-T28 TERM + AT-5-IV-7 INS + ZM- |
| | | | HSP17.7 PRO::MO-CRE EXON1:: ST-LS1 |
| | | | INTRON1::MO-CRE EXON2:: PINII TERM + |
| | | | OS-UBI TERM + LOXP + SB-UBI3 PRO::SB- |
| | | | UBI3 INTRON1:: ZSGREEN1::PINII TERM + |
| | | | SB-ALS PRO::ZM-ALS::SB-PEPC1 TERM + LB |
| 279 | DNA | PHP99971 | RB + LOXP + ZM-EF4A PRO::ZM-WUS2::PINII |
| | | | TERM + FMV ENHANCER + PCSV ENH + |
| | | | MMV ENH + UBI1ZM PRO::UBI1ZM |
| | | | 5UTR::UBI1ZM INTRON1::ZM-ODP2::OS-T28 |
| | | | TERM + AT-5-IV-7 INS + ZM-HSP17.7 |
| | | | PRO::MO-CRE EXON1:: ST-LS1 |
| | | | INTRON1::MO-CRE EXON2:: PINII TERM + |
| | | | OS-UBI TERM + LOXP + SB-UBI3 PRO::SB- |
| | | | UBI3 INTRON1:: ZSGREEN1::PINII TERM + |
| | | | SB-ALS PRO::ZM-ALS::SB-PEPC1 TERM + LB |
| 280 | DNA | PHP99809 | RB + LOXP + ZM-PABP PRO::ZM- |
| | | | WUS2::PINII TERM + FMV ENHANCER + |
| | | | PCSV ENH + MMV ENH + UBI1ZM |
| | | | PRO::UBI1ZM 5UTR::UBI1ZM INTRON1::ZM- |
| | | | ODP2::OS-T28 TERM + AT-5-IV-7 INS + ZM- |
| | | | HSP17.7 PRO::MO-CRE EXON1:: ST-LS1 |
| | | | INTRON1::MO-CRE EXON2:: PINII TERM + |
| | | | OS-UBI TERM + LOXP + SB-UBI3 PRO::SB- |
| | | | UBI3 INTRON1:: ZSGREEN1::PINII TERM + |
| | | | SB-ALS PRO::ZM-ALS::SB-PEPC1 TERM + LB |
| 281 | DNA | PHP99810 | RB + LOXP + ZM-VDACIA PRO::ZM- |
| | | | WUS2::PINII TERM + FMV ENHANCER + |
| | | | PCSV ENH + MMV ENH + UBI1ZM |
| | | | PRO::UBI1ZM 5UTR::UBI1ZM INTRON1::ZM- |
| | | | ODP2::OS-T28 TERM + AT-5-IV-7 INS + ZM- |
| | | | HSP17.7 PRO::MO-CRE EXON1:: ST-LS1 |
| | | | INTRON1::MO-CRE EXON2:: PINII TERM + |
| | | | OS-UBI TERM + LOXP + SB-UBI3 PRO::SB- |
| | | | UBI3 INTRON1:: ZSGREEN1::PINII TERM + |
| | | | SB-ALS PRO::ZM-ALS::SB-PEPC1 TERM + LB |
| 282 | DNA | PHP99716 | RB + LOXP + ZM-LEA14 PRO::ZM- |
| | | | WUS2::PINII TERM + FMV ENHANCER + |
| | | | PCSV ENH + MMV ENH + UBI1ZM |
| | | | PRO::UBI1ZM 5UTR::UBI1ZM INTRON1::ZM- |
| | | | ODP2::OS-T28 TERM + AT-5-IV-7 INS + ZM- |
| | | | HSP17.7 PRO::MO-CRE EXON1:: ST-LS1 |
| | | | INTRON1::MO-CRE EXON2:: PINII TERM + |
| | | | OS-UBI TERM + LOXP + SB-UBI3 PRO::SB- |
| | | | UBI3 INTRON1:: ZSGREEN1::PINII TERM + |
| | | | SB-ALS PRO::ZM-ALS::SB-PEPC1 TERM + LB |
| 283 | DNA | PHP99721 | RB + LOXP + NOS::WUS2::IN2 TERM + FMV |
| | | | ENHANCER + PCSV ENH + MMV ENH + |
| | | | UBI1ZM PRO::UBI1ZM 5UTR::UBI1ZM |
| | | | INTRON1::ZM-ODP2::OS-T28 TERM + AT-5- |
| | | | IV-7 INS + HSP17.7 PRO::MO-CRE::PINII |
| | | | TERM + UBI1ZM PRO::CAS9::ZM-UBI TERM + |
| | | | ZM-U6 PRO::gRNA-CHR1-53.66 + ZM-ALS |
| | | | PRO::HRA::SB-UBI TERM + CHR1-53.66 |
| | | | TARGET SITE + HOMOLOGY SEQ1 + SI-UBI |
| | | | PRO::NPTII::SI-UBI TERM + HOMOLOGY |
| | | | SEQ2 + CHR1-53.66 TARGET SITE + SB-UBI |
| | | | PRO::ZS-GREEN1::OS-UBI TERM + LB |
| 284 | DNA | PHP97978 | RB + LOXP + NOS::WUS2::IN2 TERM + |
| | | | UBI1ZM PRO::UBI1ZM 5UTR::UBI1ZM |
| | | | INTRON1::ZM-ODP2::OS-T28 TERM + |
| | | | CZ19B1 TERM + HSP17.7 PRO::MO- |
| | | | CRE::PINII TERM + LOXP + SB-UBI PRO::SB- |
| | | | UBI INTRON1:: ZSGREEN1::OS-UBI TERM + |
| | | | SB-ALS PRO::ZM-ALS::SB-UBI TERM + LB |
| 285 | DNA | PHP101270 | RB + LOXP + NOS::WUS2::IN2 TERM + SCBV |
| | | | PRO::SCBV 5UTR::ZM-ODP2::PINII TERM + |
| | | | AT-5-IV-7 INS + ZM-HSP17.7 PRO::MO-CRE |
| | | | EXON1::ST-LS1 INTRON1::MO-CRE EXON2:: |
| | | | PINII TERM + OS-UBI TERM + LOXP + SB- |
| | | | UBI3 PRO::SB-UBI3 INTRON1:: |
| | | | ZSGREEN1::PINII TERM + SB-ALS PRO::ZM- |
| | | | ALS::SB-PEPC1 TERM + LB |
| 286 | DNA | PHP102481 | RB + LOXP + NOS::WUS2::IN2 TERM + BD- |
| | | | CAB2 UAR1::OC EME 1::OC EME 1::BD-CAB2 |
| | | | PRO::ZM-HPLV9 INTRON::ZM-ODP2::OS-T28 |
| | | | TERM + AT-5-IV-7 INS + ZM-HSP17.7 |
| | | | PRO::MO-CRE EXON1:: ST-LS1 |
| | | | INTRON1::MO-CRE EXON2:: PINII TERM + |
| | | | OS-UBI TERM + LOXP + SB-UBI PRO::SB-UBI |
| | | | INTRON1:: ZSGREEN1::OS-UBI TERM + SI- |
| | | | UBII PRO::SI-UBI1 INTRON::NPTII::SB-UBI |
| | | | TERM + LB |
| 287 | DNA | BD-UBI1 | Promoter for Ubiquitin 1 from Brachypodium |
| | | | distachyon |
| 288 | DNA | BD-UBIIC | Promoter for Ubiquitin 1C from Brachypodium |
| | | | distachyon |
| 289 | DNA | BSV(AY) | Promoter from Banana streak virus |
| 290 | DNA | AT-NOS | Nopaline Synthase promoter from Agrobacterium |
| | | PRO | tumefaciens |
| 291 | DNA | ZM-AXIG1 | Zea mays promoter upregulated by banveland |
| | | PRO | auxin |
| 292 | DNA | ZM-PLTP | Zea mays promoter from phospholipid transfer |
| | | PRO | protein (PLTP) homolog |
| 293 | DNA | 35S | Cauliflower mosaic virus enhancer element |
| | | Enhancer | |
| 294 | DNA | ZM-CAB | Zea mays cab-1 gene for chlorophyll a/b-binding |
| | | PRO | protein |
| 295 | DNA | SCBV PRO | Promoter from an Australian isolate of Sugarcane |
| | | | bacilliform virus |
| 296 | DNA | 8xDR5 PRO | Synthetic promoter |
| 297 | DNA | FT-MEM1 | Flaveria trinervia transciption factor binding site |
| 298 | DNA | ZM-PEPC1 | Zea mays Phospoenolpyruvate Carboxylase1 |
| | | PRO | promoter |
| 299 | DNA | DIURNAL12 | Zea mays thiazole biosynthetic enzyme 1-1, |
| | | Promoter | chloroplast promoter |
| 300 | DNA | RUBISCO | Zea mays promoter for the Ribulose bisphosphate |
| | | SSU PROr | carboxylase (RUBISCO) Small Subunit protein |
| 301 | DNA | CSVMV | Cassava vein mosaic virus promoter |
| | | PRO | |
| 302 | DNA | FT-PPCA1 | Flaveria trinervia Phosphoenolpyruvate |
| | | PRO | carboxylase A1 promoter |
| 303 | DNA | ZM-GOS2 | Zea mays GOS2 promoter |
| | | PRO | |
| 304 | DNA | ZM- | Zea mays SWEET11 promoter |
| | | SWEET11 | |
| | | PRO | |
| 305 | DNA | ZM- | Zea mays diurnal promoter #10 |
| | | DIURNAL10 | |
| | | PRO | |
| 306 | DNA | ZM- | Zea mays diurnal promoter #11 |
| | | DIURNAL11 | |
| | | PRO | |
| 307 | DNA | ZM-ADH | Zea mays alcohol dehydrogenase intron1 |
| | | INTRON | |
| 308 | DNA | ZM-LEC1 | Zea mays LEC1 (Leafy cotyledon 1) gene |
| 309 | PRT | ZM-LEC1 | Encoded protein of the Zea mays LEC1 gene |
| 310 | DNA | PLTP2 PPO | Zea mays promoter from phospholipid transfer |
| | | | protein2 (PLTP2) |
| 311 | DNA | REPA | Wheat dwarf virus REPA gene |
| 312 | PRT | REPA | Encoded protein of the Wheat dwarf virus REPA |
| | | | gene |
| 313 | DNA | amiPKL-A | Synthetic artificial micro-RNA that targets the Zea |
| | | | mays PICKLE (PKL) transcript. |
| 314 | DNA | ZM- | Full-length Zea mays Grain Protein Content NAC |
| | | GPCNAC-1 | transcription factor gene |
| 315 | PRT | ZM- | Encoded protein for the Zea mays Grain Protein |
| | | GPCNAC-1 | Content NAC transcription factor gene |
| 316 | DNA | RKD4 | Maize-optimized version of the Arabidopsis RWP- |
| | | | RK-type transcription factor |
| 317 | PRT | AT-RKD4 | Encoded protein for the maize-optimized version |
| | | | of the Arabidopsis RWP-RK-type transcription |
| | | | factor |
| 318 | DNA | MO-LEC2 | Maize codon-optimized version of the Arabidopsis |
| | | | thaliana AtLEC2 LEAFY COTYLEDON 2 gene |
| 319 | PRT | AT-LEC2 | Encoded protein of the maize codon-optimized |
| | | | version of the Arabidopsis thaliana LEC2 LEAFY |
| | | | COTYLEDON 2 gene |
| 320 | DNA | RAP2.6L | Maize codon-optimized version of the Arabidopsis |
| | | | thaliana RAP2.6L gene |
| 321 | PRT | AT-RAP2.6L | Encoded protein of the maize codon-optimized |
| | | | version of the Arabidopsis thaliana RAP2.6L gene |
| 322 | DNA | AT-5-IV-2 | Sequence from Arabidopsis thaliana with insulator |
| | | | properties |
| 323 | DNA | ZM-RLD1 | Zea mays Rolled Leaf 1 homolog of Revoluta |
| | | | from Arabidopsis thaliana |
| 324 | PRT | ZM-RLD1 | Encoded protein of the Zea mays Rolled Leaf 1 |
| | | | homolog of Revoluta from Arabidopsis thaliana |
| 325 | DNA | ZM-KN1 | Zea mays class I homeobox transcription factor |
| | | | Knotted1 gene |
| 326 | PRT | KN1 | Encoded protein of the Zea mays class I homeobox |
| | | | transcription factor Knotted1 gene |
| 327 | DNA | AT-5-IV-7 | Sequence from Arabidopsis with insulator |
| | | | properties |
| 328 | DNA | ZM-CYCD2 | Zea mays Cyclin delta-2 gene |
| 329 | PRT | ZM-CYCD2 | Encoded protein of the Zea mays Cyclin delta-2 |
| | | | gene |
| 330 | DNA | HSP17.7 | Zea mays promoter for Heat Shock Protein 17.7 |
| | | PRO | |
| 331 | DNA | RAB 17 PRO | Zea mays promoter for RAB17 |
| 332 | DNA | GLB1 PRO | Zea mays globulin 1 promoter |
| 333 | DNA | ZM-UBI1 | Zea mays ubiquitin1 promoter |
| | | PRO | |
| | | (UBI1ZM | |
| | | PRO) | |
| 334 | DNA | ZM-UBI1 | Zea mays ubiquitin1 5′ untranslated region |
| | | 5UTR | |
| | | (UBI1ZM | |
| | | 5UTR) | |
| 335 | DNA | ZM-UBI1 | Zea mays ubiquitin1 intron1 |
| | | INTRON1 | |
| | | (UBI1ZM | |
| | | INTRON1) | |
| 336 | DNA | FMV ENH | Figwort mosaic virus enhancer |
| 337 | DNA | PCSV ENH | Peanut Chlorotic Streak Caulimovirus enhancer |
| 338 | DNA | MMV ENH | Mirabilis mosaic virus enhancer |
| 339 | DNA | ZM-UBI1 | Zea mays ubiquitin1 promoter (SEQ ID NO: 333) + |
| | | PRO | Zea mays ubiquitin1 intron1 (SEQ ID NO: 334) + |
| | | Complete | Zea mays ubiquitin1 intron1 (SEQ ID NO: 335) |
| 340 | DNA | 3xENH | Figwort mosaic virus enhancer (SEQ ID NO: 336) + |
| | | | Peanut Chlorotic Streak Caulimovirus enhancer |
| | | | (SEQ ID NO: 337) + Mirabilis Mosaic Virus |
| | | | enhancer (SEQ ID NO: 338) |
| 341 | DNA | PHP40828 | NOS PRO::ZM-WUS2::PINII TERM |
| 342 | DNA | PHP100712 | RB + LOXP + UBI1ZM PRO::UBI1ZM |
| | | | 5UTR::UBI1ZM INTRON1::WUS2::IN2 TERM + |
| | | | FMV ENHANCER + PCSV ENH + MMV ENH + |
| | | | SI-UBII PRO::SI-UBI1 INTRON1::ZM- |
| | | | ODP2::ZM-UBI TERM TERM + LOXP + NOS |
| | | | PRO::CRC::SB-GKAF TERM + LB |
| 343 | DNA | PHV00001 | RB + LOXP + FMV ENH:PSCV ENH:MMV |
| | | | ENH:UBI1ZM PRO::UBI1ZM 5UTR:UBI1ZM |
| | | | INTRON1::ZM-ODP2::OS-T28 TERM + |
| | | | HSP17.7 PRO::CRE EXON1:ST-LS1 |
| | | | INTRON2:CRE EXON2::PINII TERM + LOXP + |
| | | | SB-UBI PRO::SB-UBI INTRON1::ZS- |
| | | | GREEN::OS-UBI TERM + SI-UBI PRO::SI-UBI |
| | | | INTRON1::NPTII::SB-UBI TERM + LB |
| 344 | DNA | PHV00002 | RB + LOXP + FMV ENH:PSCV ENH:MMV |
| | | | ENH:UBI1ZM PRO::UBI1ZM 5UTR:UBI1ZM |
| | | | INTRON1::ZM-WUS2::OS-T28 TERM + |
| | | | HSP17.7 PRO::CRE EXON1:ST-LS1 |
| | | | INTRON2:CRE EXON2::PINII TERM + LOXP + |
| | | | SB-UBI PRO::SB-UBI INTRON1::ZS- |
| | | | GREEN::OS-UBI TERM + SI-UBI PRO::SI-UBI |
| | | | INTRON1::NPTII::SB-UBI TERM + LB |
| 345 | DNA | PHV00003 | RB + LOXP + ZM-GOS2 PRO::SB-UBI |
| | | | INTRON1::MO-LEXA:MO-CBF1A::SB-ACTIN |
| | | | TERM + 6xREC:MIN35S PRO::ZM-ODP2::OS- |
| | | | UBI TERM + HSP17.7 PRO::CRE EXON1:ST- |
| | | | LS1 INTRON2:CRE EXON2::PINII TERM + |
| | | | LOXP + SB-UBI PRO::SB-UBI INTRON1::ZS- |
| | | | GREEN::OS-UBI TERM + SI-UBI PRO::SI-UBI |
| | | | INTRON1::NPTII::SB-UBI TERM + LB |
| 346 | DNA | PHV00004 | RB + LOXP + ZM-GOS2 PRO::SB-UBI |
| | | | INTRON1::MO-LEXA:MO-CBF1A::SB-ACTIN |
| | | | TERM + 6xREC:MIN35S PRO::ZM-WUS2::OS- |
| | | | UBI TERM + HSP17.7 PRO::CRE EXON1:ST- |
| | | | LS1 INTRON2:CRE EXON2::PINII TERM + |
| | | | LOXP + SB-UBI PRO::SB-UBI INTRON1::ZS- |
| | | | GREEN::OS-UBI TERM + SI-UBI PRO::SI-UBI |
| | | | INTRON1::NPTII::SB-UBI TERM + LB |
| 347 | DNA | 3xENH-UBI | 3xENH-UBI |
| 348 | DNA | MO-LEXA- | Fusion protein coding sequence composed of the |
| | | MO-CBF1A | maize-optimized LEXA gene via a flexible protein |
| | | | linker peptide to a maize-optimized CBF1A gene |
| 349 | PRT | MO-LEXA- | Encoded fusion protein composed of the maize- |
| | | MO-CBF1A | optimized LEXA DNA-binding polypeptide, a |
| | | PRT | flexible protein linker peptide, and the CBF1A |
| | | | activation domain |
| 350 | DNA | 6xREC- | Six repeats of the LEXA binding motif plus the 45 |
| | | MIN35S | base-pair minimal 35S promoter core |
| 351 | DNA | PHP101093 | RB + LOXP + NOS::ZM-WUS2::IN2 TERM + |
| | | | FMV ENHANCER + PCSV ENH + MMV ENH + |
| | | | UBI1ZM PRO::UBI1ZM 5UTR::UBI1ZM |
| | | | INTRON1::ZM-ODP2::OS-T28 TERM + AT-5- |
| | | | IV-7 INS + HSP17.7 PRO::MO-CRE::PINII |
| | | | TERM + OS-UBI TERM + LOXP + SI-UBI3 |
| | | | PRO:: SI-UBI3 INTRON1:: ZS-GREEN1::OS- |
| | | | UBI TERM + SI-UBI1 PRO::SI-UBI1 |
| | | | INTRON1::NPTII (MO)::SB-UBI TERM + LB |
| 352 | DNA | PHP104215 | RB + LOXP + OS-ACTIN PRO::OS-ACTIN |
| | | | INTRON1::ZM-WUS2::IN2 TERM + GZ-W64A |
| | | | TERM + FL TERM + FMV ENHANCER + PCSV |
| | | | ENH + MMV ENH + UBI1ZM PRO::UBI1ZM |
| | | | 5UTR::UBI1ZM INTRON1::ZM-ODP2::OS-T28 |
| | | | TERM + AT-5-IV-7 INS + RAB17 PRO::RAB17 |
| | | | 5UTR::MO-CRE::PINII TERM + OS-UBI TERM + |
| | | | LOXP + SB-UBI PRO:: SB-UBIINTRON1:: ZS- |
| | | | GREEN1::OS-UBI TERM + SI-UBII PRO::SI- |
| | | | UBI1 INTRON1::NPTII (MO)::SB-UBI TERM + |
| | | | LB |
| 353 | DNA | PHP104222 | RB + LOXP + OS-ACTIN PRO::OS-ACTIN |
| | | | INTRON1::ZM-WUS2::IN2 TERM + GZ-W64A |
| | | | TERM + FL TERM + FMV ENHANCER + PCSV |
| | | | ENH + MMV ENH + UBI1ZM PRO::UBI1ZM |
| | | | 5UTR::UBI1ZM INTRON1::ZM-ODP2::OS-T28 |
| | | | TERM + AT-5-IV-7 INS + ZM-HSP17.7 |
| | | | PRO::MO-CRE::PINII TERM + OS-UBI TERM + |
| | | | LOXP + SB-UBI PRO:: SB-UBI INTRON1:: ZS- |
| | | | GREEN1::OS-UBI TERM + SI-UBII PRO::SI- |
| | | | UBI1 INTRON1::NPTII (MO)::SB - UBI TERM + |
| | | | LB |

### Example 2: Media Compositions

[0178] Various media are referenced in the Examples for use in transformation and cell culture. The compositions of these media are provided below in Tables 3-14.

TABLE 3
Medium Composition

PHI-I: 4.3 g/l MS salts (Phytotechnology Laboratories, Shawnee Mission, KS, catalog
number M524), 0.5 mg/l nicotinic acid, 0.5 mg/l pyridoxine HCl, 1 mg/l thiamine HCl,
0.1 g/l myo-inositol, 1 g/l casamino acids (Becton Dickinson and Company, BD
Diagnostic Systems, Sparks, MD, catalog number 223050), 1.5 mg/l 2,4-
dichlorophenoxyacetic acid (2,4-D), 68.5 g/l sucrose, 36 g/l glucose, pH 5.2; with
100 μM acetosyringone added before using.
PHI-T: PHI-I with 20 g/l sucrose, 10 g/l glucose, 2 mg/l 2,4-D, no casamino acids,
0.5 g/l MES buffer, 0.7 g/l L-proline, 10 mg/l ascorbic acid, 100 μM acetosyringone,
8 g/l agar, pH 5.8.
PHI-U: PHI-T with 1.5 mg/l 2,4-D 100 mg/l carbenicillin, 30 g/l sucrose, no glucose
and acetosyringone; 5 mg/l PPT, pH 5.8.
PHI-UM: PHI-U with 12.5 g/l mannose and 5 g/l maltose, no sucrose, no PPT, pH 5.8
PHI-V: PHI-U with 10 mg/l PPT
DBC3: 4.3 g/l MS salts, 0.25 g/l myo-inositol, 1.0 g/l casein hydrolysate, 1.0 mg/l
thiamine HCL, 1.0 mg/l 2,4-D, 30 g/l maltose, 0.69 g/l L-proline, 1.22 mg/l cupric
sulfate, 0.5 mg/l BAP, 3.5 g/l phytagel, pH 5.8
PHI-X: 4.3 g/l MS salts, 0.1 g/l myo-inositol, 5.0 ml MS vitamins stock^{a}, 0.5 mg/l
zeatin, 700 mg/l L-proline, 60 g/l sucrose, 1 mg/l indole-3-acetic acid, 0.1 μM abscisic
acid, 0.1 mg/l thidiazuron, 100 mg/l carbenicillin, 5 mg/l PPT, 8 g/l agar, pH 5.6.
PHI-XM: PHI-X with no PPT; added 1.25 mg/l cupric sulfate, pH 5.6.
PHI-Z: 2.15 g/l MS salts, 0.05 g/l myo-inositol, 2.5 ml MS vitamins stock^{a}, 20 g/l
sucrose, 3 g/l phytagel, pH 5.6
^{a}MS vitamins stock: 0.1 g/l nicotinic acid, 0.1 g/l pyridoxine HCl, 0.02 g/l thiamine HCl, 0.4 g/l glycine.

TABLE 4

| WI 4 | | |
|---|---|---|
| DI water | 1000 | mL |
| MS salt + Vitamins(M519) | 4.43 | g |
| Maltose | 30 | g |
| Glucose | 10 | g |
| MES | 1.95 | g |
| 2,4-D (0.5 mg/L) | 1 | ml |
| Picloram (10 mg/ml) | 200 | μl |
| BAP (1 mg/L) | 0.5 | ml |
| Adjust PH to 5.8 with KOH | | |
| Post-sterilization add: | | |
| Acetosyringone (400 μM) | 400 | μl |

TABLE 5

| WC # 10 | | |
|---|---|---|
| DI water | 1000 | mL |
| MS salt + Vitamins(M519) | 4.43 | g |
| Maltose | 30 | g |
| Glucose | 1 | g |
| MES | 1.95 | g |
| 2,4-D (0.5 mg/L) | 1 | ml |
| Picloram (10 mg/ml) | 200 | μl |
| BAP (1 mg/L) | 0.5 | ml |
| 50X CuSO4 (.1M) | 49 | μl |
| Adjust PH to 5.8 with KOH and add 2.5 g/L of Phytagel. | | |
| Post-sterilization add: | | |
| Acetosyringone (400 μM) | 400 | μl |

TABLE 6

| DBC4 | | |
|---|---|---|
| dd H20 | 1000 | mL |
| MS salt | 4.3 | g |
| Maltose | 30 | g |
| Myo-inositol | 0.25 | g |
| N-Z-Amine-A | 1 | g |
| Proline | 0.69 | g |
| Thiamine-HCl (0.1 mg/mL) | 10 | mL |
| 50X CuSO4 (0.1M) | 49 | μL |
| 2,4-D (0.5 mg/mL) | 2 | mL |
| BAP | 1 | mL |
| Adjust PH to 5.8 with KOH and then add 3.5 g/L of Phytagel. | | |
| Post-sterilization add: | | |
| Cef (100 mg/mL) | 1 | mL |

TABLE 7
DBC6

| dd H20 | 1000 | mL |
|---|---|---|
| MS salt | 4.3 | g |
| Maltose | 30 | g |
| Myo-inositol | 0.25 | g |
| N-Z-Amine-A | 1 | g |
| Proline | 0.69 | g |
| Thiamine-HCl (0.1 mg/mL) | 10 | mL |
| 50X CuSO4 (0.1M) | 49 | μL |
| 2,4-D (0.5 mg/mL) | 1 | mL |
| BAP | 2 | mL |
| Adjust PH to 5.8 with KOH and then add 3.5 | | |
| g/L of Phytagel. | | |
| Post-sterilization add: | | |
| Cef (100 mg/mL) | 1 | mL |

TABLE 8
MSA

| dd H20 | 1000 | mL |
|---|---|---|
| MS salt + Vitamins(M519) | 4.43 | g |
| Sucorse | 20 | g |
| Myo- Inositol | 1 | g |
| Adjust PH to 5.8 with KOH and then add 3.5 | | |
| g/L of Phytagel. | | |
| Post-sterilization add: | | |
| Cef (100 mg/mL) | 1 | mL |

TABLE 9
MSB

| dd H20 | 1000 | mL |
|---|---|---|
| MS salt + Vitamins(M519) | 4.43 | g |
| Sucorse | 20 | g |
| Myo- Inositol | 1 | g |
| Adjust PH to 5.8 with KOH and then add 3.5 | | |
| g/L of Phytagel. | | |
| Post-sterilization add: | | |
| Cef (100 mg/mL) | 1 | mL |
| IBA | 0.5 | mL |

TABLE 10

| | Units per | | | | | | | |
|---|---|---|---|---|---|---|---|---|
| Medium Components | liter | 12V | 810I | 700A | 710I | 605J | 605T | 289Q |
| MS BASAL SALT | g | | | 4.3 | 4.3 | 4.3 | 4.3 | 4.3 |
| MIXTURE | | | | | | | | |
| N6 | mL | | | | | 60.0 | 60.0 | |
| MACRONUTRIENTS | | | | | | | | |
| 10X | | | | | | | | |
| POTASSIUM NITRATE | g | | | | | 1.7 | 1.7 | |
| B5H MINOR SALTS | mL | | | | | 0.6 | 0.6 | |
| 1000X | | | | | | | | |
| NaFe EDTA FOR B5H | mL | | | | | 6.0 | 6.0 | |
| 100X | | | | | | | | |
| ERIKSSON'S | mL | | | | | 0.4 | 0.4 | |
| VITAMINS 1000X | | | | | | | | |
| S&H VITAMIN STOCK | mL | | | | | 6.0 | 6.0 | |
| 100X | | | | | | | | |
| THIAMINE .HCL | mg | | | 10.0 | 10.0 | 0.5 | 0.5 | |
| L-PROLINE | g | | | | 0.7 | 2.0 | 2.0 | 0.7 |
| CASEIN | g | | | | | 0.3 | 0.3 | |
| HYDROLYSATE | | | | | | | | |
| (ACID) | | | | | | | | |
| SUCROSE | g | | | 68.5 | 20.0 | 20.0 | 20.0 | 60.0 |
| GLUCOSE | g | 5.0 | | 36.0 | 10.0 | 0.6 | 0.6 | |
| MALTOSE | g | | | | | | | |
| 2,4-D | mg | | | 1.5 | 2.0 | 0.8 | 0.8 | |
| AGAR | g | 15.0 | 15.0 | | 8.0 | 6.0 | 6.0 | 8.0 |
| PHYTAGEL | g | | | | | | | |
| DICAMBA | g | | | | | 1.2 | 1.2 | |
| SILVER NITRATE | mg | | | | | 3.4 | 3.4 | |
| AGRIBIO Carbenicillin | mg | | | | | 100.0 | | |
| Timentin | mg | | | | | | 150.0 | 150.0 |
| Cefotaxime | mg | | | | | | 100.0 | 100.0 |
| MYO-INOSITOL | g | | | 0.1 | 0.1 | | | 0.1 |
| NICOTINIC ACID | mg | | | 0.5 | 0.5 | | | |
| PYRIDOXINE.HCL | mg | | | 0.5 | 0.5 | | | |
| VITAMIN ASSAY | g | | | 1.0 | | | | |
| CASAMINO ACIDS | | | | | | | | |
| MES BUFFER | g | | | | 0.5 | | | |
| ACETOSYRINGONE | μM | | | | 100.0 | | | |
| ASCORBIC ACID | mg | | | | 10.0 | | | |
| 10 MG/ML (7S) | | | | | | | | |
| MS VITAMIN STOCK | mL | | | | | | | 5.0 |
| SOL. | | | | | | | | |
| ZEATIN | mg | | | | | | | 0.5 |
| CUPRIC SULFATE | mg | | | | | | | 1.3 |
| IAA 0.5 MG/ML (28A) | mL | | | | | | | 2.0 |
| ABA 0.1 mm | mL | | | | | | | 1.0 |
| THIDIAZURON | mg | | | | | | | 0.1 |
| AGRIBIO Carbenicillin | mg | | | | | | | 100.0 |
| PPT(GLUFOSINATE- | mg | | | | | | | |
| NH4) | | | | | | | | |
| BAP | mg | | | | | | | 1.0 |
| YEAST EXTRACT (BD | g | | 5.0 | | | | | |
| Difco) | | | | | | | | |
| PEPTONE | g | | 10.0 | | | | | |
| SODIUM CHLORIDE | g | | 5.0 | | | | | |
| SPECTINOMYCIN | mg | 50.0 | 100.0 | | | | | |
| FERROUS | mL | 2.0 | | | | | | |
| SULFATE.7H20 | | | | | | | | |
| AB BUFFER 20X (12D) | mL | 50.0 | | | | | | |
| AB SALTS 20X (12E) | mL | 50.0 | | | | | | |
| Benomyl | mg | | | | | | | |
| pH | | | | | | | | 5.6 |

TABLE 11

| | Units | | | |
|---|---|---|---|---|
| | per | | | |
| Medium Components | liter | 289R | 13158H | 13224B |
| MS BASAL SALT MIXTURE | g | 4.3 | 4.3 | |
| N6 MACRONUTRIENTS 10X | mL | | | 4.0 |
| POTASSIUM NITRATE | g | | | |
| B5H MINOR SALTS 1000X | mL | | | |
| NaFe EDTA FOR B5H 100X | mL | | | |
| ERIKSSON'S VITAMINS 1000X | mL | | | 1.0 |
| S&H VITAMIN STOCK 100X | mL | | | |
| THIAMINE•HCL | mg | | | 0.5 |
| L-PROLINE | g | 0.7 | 0.7 | 2.9 |
| CASEIN HYDROLYSATE (ACID) | g | | | |
| SUCROSE | g | 60.0 | 60.0 | 190.0 |
| GLUCOSE | g | | | |
| MALTOSE | g | | | |
| 2,4-D | mg | | | |
| AGAR | g | | 8.0 | 6.4 |
| PHYTAGEL | g | | | |
| DICAMBA | g | | | |
| SILVER NITRATE | mg | | | 8.5 |
| AGRIBIO Carbenicillin | mg | | | |
| Timentin | mg | 150.0 | 150.0 | |
| Cefotaxime | mg | 100.0 | 100.0 | 25 |
| MYO-INOSITOL | g | 0.1 | 0.1 | |
| NICOTINIC ACID | mg | | | |
| PYRIDOXINE•HCL | mg | | | |
| VITAMIN ASSAY CASAMINO | g | | | |
| ACIDS | | | | |
| MES BUFFER | g | | | |
| ACETOSYRINGONE | μM | | | |
| ASCORBIC ACID 10 MG/ML (7S) | mg | | | |
| MS VITAMIN STOCK SOL. | mL | 5.0 | 5.0 | |
| ZEATIN | mg | 0.5 | 0.5 | |
| CUPRIC SULFATE | mg | 1.3 | 1.3 | |
| IAA 0.5 MG/ML (28A) | mL | 2.0 | 2.0 | |
| ABA 0.1 mm | mL | 1.0 | 1.0 | |
| THIDIAZURON | mg | 0.1 | 0.1 | |
| AGRIBIO Carbenicillin | mg | | | |
| PPT(GLUFOSINATE-NH4) | mg | | | |
| BAP | mg | | | |
| YEAST EXTRACT (BD Difco) | g | | | |
| PEPTONE | g | | | |
| SODIUM CHLORIDE | g | | | |
| SPECTINOMYCIN | mg | | | |
| FERROUS SULFATE•7H20 | mL | | | |
| AB BUFFER 20X (12D) | mL | | | |
| AB SALTS 20X (12E) | mL | | | |
| Benomyl | mg | | | |
| pH | | | | |

TABLE 12

| | Units | | | | |
|---|---|---|---|---|---|
| | per | | | | |
| Medium Components | liter | 13266K | 272X | 272V | 13158 |
| MS BASAL SALT MIXTURE | g | 4.3 | 4.3 | 4.3 | 4.3 |
| N6 MACRONUTRIENTS 10X | mL | 60.0 | | | |
| POTASSIUM NITRATE | g | 1.7 | | | |
| B5H MINOR SALTS 1000X | mL | 0.6 | | | |
| NaFe EDTA FOR B5H 100X | mL | 6.0 | | | |
| ERIKSSON'S VITAMINS | mL | 0.4 | | | |
| 1000X | | | | | |
| S&H VITAMIN STOCK 100X | mL | 6.0 | | | |
| THIAMINE•HCL | mg | 0.5 | | | |
| L-PROLINE | g | 2.0 | | | |
| CASEIN HYDROLYSATE | g | 0.3 | | | |
| (ACID) | | | | | |
| SUCROSE | g | 20.0 | 40.0 | 40.0 | 40.0 |
| GLUCOSE | g | 0.6 | | | |
| MALTOSE | g | | | | |
| 2,4-D | mg | 1.6 | | | |
| AGAR | g | 6.0 | 6.0 | 6.0 | 6.0 |
| PHYTAGEL | g | | | | |
| DICAMBA | g | 1.2 | | | |
| SILVER NITRATE | mg | 1.7 | | | |
| AGRIBIO Carbenicillin | mg | 2.0 | | | |
| Timentin | mg | | | | |
| Cefotaxime | mg | 25 | | | |
| MYO-INOSITOL | g | | 0.1 | 0.1 | 0.1 |
| NICOTINIC ACID | mg | | | | |
| PYRIDOXINE•HCL | mg | | | | |
| VITAMIN ASSAY | g | | | | |
| CASAMINO ACIDS | | | | | |
| MES BUFFER | g | | | | |
| ACETOSYRINGONE | μM | | | | |
| ASCORBIC ACID 10 | mg | | | | |
| MG/ML (7S) | | | | | |
| MS VITAMIN STOCK SOL. | mL | | 5.0 | 5.0 | 5.0 |
| ZEATIN | mg | | | | |
| CUPRIC SULFATE | mg | | | | |
| IAA 0.5 MG/ML (28A) | mL | | | | |
| ABA 0.1 mm | mL | | | | |
| THIDIAZURON | mg | | | | |
| AGRIBIO Carbenicillin | mg | | | | |
| PPT(GLUFOSINATE-NH4) | mg | | | | |
| BAP | mg | | | | |
| YEAST EXTRACT (BD Difco) | g | | | | |
| PEPTONE | g | | | | |
| SODIUM CHLORIDE | g | | | | |
| SPECTINOMYCIN | mg | | | | |
| FERROUS SULFATE•7H20 | mL | | | | |
| AB BUFFER 20X (12D) | mL | | | | |
| AB SALTS 20X (12E) | mL | | | | |
| Benomyl | mg | | | | 100.0 |
| pH | | | 0.5 | 5.6 | |

TABLE 13

| | Units | | | | |
|---|---|---|---|---|---|
| | per | | | | |
| Medium Components | liter | 12R | 810K | 700J | 710N |
| 404 Modified MS Basal Salts | | | | | |
| MS BASAL SALT MIXTURE | g | | | | 4.3 |
| N6 BASAL SALTS | g | | | | |
| N6 MACRONUTRIENTS 10X | mL | | | | |
| POTASSIUM NITRATE | g | | | | |
| B5H MINOR SALTS 1000X | mL | | | | |
| NaFe EDTA FOR B5H 100X | mL | | | | |
| ERIKSSON'S VITAMINS | mL | | | | |
| 1000X | | | | | |
| S&H VITAMIN STOCK | g | | | | |
| THIAMINE•HCL | mg | | | | 1.0 |
| L-PROLINE | g | | | | 0.7 |
| CASEIN HYDROLYSATE | g | | | | |
| (ACID) | | | | | |
| SUCROSE | g | | | | |
| GLUCOSE | g | 5.0 | | | 10.0 |
| MALTOSE | g | | | 5.0 | 20.0 |
| 2,4-D | mg | | | | 2.0 |
| AGAR | g | 15.0 | | | 8.0 |
| BACTO-AGAR | g | | 15.0 | | |
| PHYTAGEL | g | | | | |
| DICAMBA | g | | | | |
| SILVER NITRATE | mg | | | | |
| AGRIBIO Carbenicillin | mg | | | | |
| Timentin | mg | | | | |
| Cefotaxime | mg | | | | |
| MYO-INOSITOL | g | | | | 0.1 |
| NICOTINIC ACID | mg | | | | 0.5 |
| PYRIDOXINE•HCL | mg | | | | 0.5 |
| VITAMIN ASSAY CASAMINO | g | | | | |
| ACIDS | | | | | |
| MES BUFFER | g | | | | 0.5 |
| ACETOSYRINGONE | μM | | | | 100.0 |
| ASCORBIC ACID 10 | mg | | | | 10.0 |
| MG/ML (7S) | | | | | |
| MS VITAMIN STOCK SOL. | mL | | | | |
| ZEATIN | mg | | | | |
| CUPRIC SULFATE | μM | | | | 100.0 |
| IAA 0.5 MG/ML (28A) | mL | | | | |
| ABA 0.1 mm | mL | | | | |
| 12N-a-NAA 1 MG/ML | mg | | | | |
| THIDIAZURON | mg | | | | |
| PPT(GLUFOSINATE-NH4) | mg | | | | |
| BAP | mg | | | | 1.0 |
| YEAST EXTRACT (BD Difco) | g | | 5.0 | | |
| PEPTONE | g | | 10.0 | | |
| SODIUM CHLORIDE | g | | 5.0 | | |
| SPECTINOMYCIN | mg | 50.0 | 50.0 | | |
| FERROUS SULFATE•7H20 | mL | 2.0 | | | |
| AB BUFFER 20X (12D) | mL | 50.0 | | | |
| AB SALTS 20X (12E) | mL | 50.0 | | | |
| THYMIDINE | mg | 50.0 | 50.0 | 50.0 | 50.0 |
| GENTAMYCIN | mg | 50.0 | 50.0 | | |
| Benomyl | mg | | | | |
| Magnesium Sulfate, Anhydrous | g | | | 1.204 | |
| 17F-MEROPENEM | mg | | | | |
| 7V-Vitamin E in EtOH 1 mg/mL | mg | | | | |
| 28E-IBA 1 MG/ML | mg | | | | |
| pH | | | 6.8 | | 5.8 |

TABLE 14

| | Units | | | | |
|---|---|---|---|---|---|
| | per | | | | |
| Medium Components | liter | 605B | 13329B | 404J | 900 |
| 404 Modified MS Basal Salts | | | | 4.96 | |
| MS BASAL SALT MIXTURE | g | 4.3 | 4.3 | | 2.165 |
| N6 BASAL SALTS | g | | | | |
| N6 MACRONUTRIENTS 10X | mL | 60.0 | | | |
| POTASSIUM NITRATE | g | 1.7 | | | |
| B5H MINOR SALTS 1000X | mL | 0.6 | | | |
| NaFe EDTA FOR B5H 100X | mL | 6.0 | | | |
| ERIKSSON'S VITAMINS | mL | 0.4 | | | |
| 1000X | | | | | |
| S&H VITAMIN STOCK | g | 0.6 | | | |
| THIAMINE•HCL | mg | 0.2 | | 0.1 | |
| L-PROLINE | g | 2.0 | 0.7 | | |
| CASEIN HYDROLYSATE | g | 0.3 | | | |
| (ACID) | | | | | |
| SUCROSE | g | 20.0 | 60.0 | 65.0 | 20 |
| GLUCOSE | g | 0.6 | | | |
| MALTOSE | g | | | | |
| 2,4-D | mg | 0.8 | | | |
| AGAR | g | 6.0 | 8.0 | 6.0 | 5 |
| BACTO-AGAR | g | | | | |
| PHYTAGEL | g | | | | |
| DICAMBA | g | 1.2 | | | |
| SILVER NITRATE | mg | 3.4 | | | |
| AGRIBIO Carbenicillin | mg | | | | |
| Timentin | mg | | | | |
| Cefotaxime | mg | | | | |
| MYO-INOSITOL | g | | 0.1 | 0.1 | |
| NICOTINIC ACID | mg | | | | |
| PYRIDOXINE•HCL | mg | | | | |
| VITAMIN ASSAY | g | | | | |
| CASAMINO ACIDS | | | | | |
| MES BUFFER | g | | | | |
| ACETOSYRINGONE | μM | | | | |
| ASCORBIC ACID 10 | mg | | | | |
| MG/ML (7S) | | | | | |
| MS VITAMIN STOCK SOL. | mL | | 5 | 5 | |
| ZEATIN | mg | | 0.5 | | |
| CUPRIC SULFATE | μM | | 4.0 | | |
| IAA 0.5 MG/ML (28A) | mL | | 1 | | |
| ABA 0.1 mm | mL | | | | |
| 12N-a-NAA 1 MG/ML | mg | | | 0.5 | |
| THIDIAZURON | mg | | | | |
| PPT(GLUFOSINATE-NH4) | mg | | | | |
| BAP | mg | | 1.0 | | |
| YEAST EXTRACT (BD Difco) | g | | | | |
| PEPTONE | g | | | | |
| SODIUM CHLORIDE | g | | | | |
| SPECTINOMYCIN | mg | | | | |
| FERROUS SULFATE•7H20 | mL | | | | |
| AB BUFFER 20X (12D) | mL | | | | |
| AB SALTS 20X (12E) | mL | | | | |
| THYMIDINE | mg | | | | |
| GENTAMYCIN | mg | | | | |
| Benomyl | mg | | | | 50 |
| Magnesium Sulfate, Anhydrous | g | | | | |
| 17F-MEROPENEM | mg | 10.0 | 10.0 | 10.0 | 10 |
| 7V-Vitamin E in EtOH 1 mg/mL | mg | | | 1.0 | |
| 28E-IBA 1 MG/ML | mg | | | 1.0 | |
| pH | | 5.8 | | 5.8 | |

### Example 3: Particle Bombardment

[0179] Standard protocols for particle bombardment (Finer and McMullen, 1991, In Vitro Cell Dev. Biol.—Plant 27:175-182) can be used with the methods of the disclosure.

### A. Particle-Mediated Delivery for Cas9-Mediated Donor Template Integration Via Homology-Dependent Repair (HDR)

[0180] Four plasmids were typically used for each particle bombardment; 1) the donor plasmid (50 ng/μl) containing the donor cassette flanked by homology-arms (genomic sequence) for CRISPR/Cas9-mediated homology-dependent SDN3, 2) a plasmid (50 ng/μl) containing the expression cassette UBI PRO::Cas9::pinII plus an expression cassette ZM-U6 PRO::gRNA::U6 TERM, 3) a plasmid (10 ng/μl) containing the expression cassette 3×ENH::UBI PRO::ODP2, and 4) a plasmid (5 ng/μl) containing the expression cassette NOS::WUS2::IN2 TERM. To attach the DNA to 0.6 μm gold particles, the four plasmids were mixed by adding 10 μl of each plasmid together in a low-binding microfuge tube (Sorenson Bioscience 39640T) for a total of 40 μl. To this suspension, 50 μl of 0.6 μm gold particles (30 μg/μl) and 1.0 μl of Transit 20/20 (Cat No MIR5404, Mirus Bio LLC) were added, and the suspension was placed on a rotary shaker for 10 minutes. The suspension was centrifuged at 10,000 RPM (˜9400×g) and the supernatant was discarded. The gold particles were re-suspended in 120 μl of 100% ethanol, briefly sonicated at low power and 10 μl was pipetted onto each carrier disc. The carrier discs were then air-dried to evaporate away all the remaining ethanol. Particle bombardment was performed using a PDF-1000/HE Particle Delivery Device, at 27 inches Hg using a 600 PSI rupture disc.

[0181] A transgenic Pioneer Stiff-Stalk inbred PHH5E was used in this experiment. Hemizygous seed was selected based on seed-specific expression of AM-CYAN1 and was surface sterilized using 80% ethanol for 3 minutes, followed by incubation in a solution of 50% bleach+0.1% Tween-20 while agitating with a stir-bar for 20 minutes. The sterile seed were then rinsed 3 times in sterile double-distilled water. Surface-sterilized seed were germinated on 13158F solid medium under (120 μE m-2 s-1) lights using an 18-hour photoperiod at 25° C.

[0182] Alternatively, chlorine gas or oxidizing agents can be used for seed sterilization. Chlorine gas can be generated using a variety of compounds (or agents), including bleaching powders, calcium hypochlorite, sodium hypochlorite, industrial bleach, household bleach, chlorine dioxide monochloramine, dichloramine, and trichloramine. Oxidizing agents that can be used in the method include but are not limited to, ozone, hydrogen peroxide, hypochlorous acid, hypobromous acid, chlorine dioxide, and ethylene dioxide.

[0183] After 14 days, the 3 cm segment directly above the seedling mesocotyl was excised (containing the leaf-whorl tissue directly above the apical meristem region of the stem). The 3 cm segment was bisected longitudinally using a scalpel. Then the outer layer of leaf tissue (coleoptile) was discarded. For the leaf tissue/segments derived from each seedling, the leaves were separated and laid flat within a 2 cm diameter in the middle of a culture plate containing one of the two following media; i) medium 13224 containing 12% sucrose for 3-4 hours before bombardment (10 plates, each containing segments/tissue from one of 10 seedlings and, ii) medium 13224C containing 12% sucrose+0.1 mg/l ethametsulfuron for 2-3 hours before bombardment (10 plates, each containing tissue/segments from one of 10 seedlings).

[0184] Preparation of DNA-functionalized gold particles was done as follows. Stock solutions of plasmids PHP71193 (SEQ ID NO:240) and PHP71788 (SEQ ID NO:241) (100 ng/μl) were diluted to 50 ng/μl with sterile water. Stock solutions of PHP21875 (SEQ ID NO:242) and PHP40828 (SEQ ID NO:341) (100 ng/μl) were diluted to 25 ng/μl with sterile water. Using sterile, low-binding Eppendorf tubes. Ten μl each of the diluted plasmids PHP71788 (50 ng/μl), PHP71193 (50 ng/μl), PHP21875 (25 ng/μl), and PHP40828 (25 ng/μl), were added to a sterile, low-binding Eppendorf tube (final ratio of plasmids was 50:50:25:25, respectively). This DNA mixture was then added to a sterile-low-binding Eppendorf tube containing 50 μl of 0.6 μM gold particles at a stock concentration of 10 mg/ml) and gently agitated to mix the DNA and gold in the suspension. One μl of Transit 20/20 was added and the tube again gently agitating. The tube was then placed on a 125 RPM rotator shaker for 10 minutes at room temperature. The tube was then centrifuged at 10,000 RPM in a microfuge. The supernatant was discarded and after adding 120 μl of 95% EtOH, the tube was sonicated briefly on a low setting to resuspend the particles and then 10 μl of the DNA/gold/EtOH suspension was pipetted onto the center of the carrier disc. The carrier discs were left exposed to the sterile air low in the laminar flow hood for approximately 10 minutes to evaporate the EtOH. The carrier discs with dried gold/DNA were then used for particle bombardment. For particle bombardment, a PDS-1000/He Particle Delivery System (Bio-Rad, Hercules, CA) was used, with 425 psi rupture disc, and the petri dish containing the target tissue/segments positioned two shelves below the carrier-holder, and a vacuum of approximately 27 mg Hg.

[0185] When expression of Wus2 and Odp2 was induced by addition of ethametsulfuron, somatic embryogenesis was stimulated in leaf segments/tissue. Using this inducible Wus2/Odp2 germplasm as the starting point for a new experiment, seedling-derived leaf segments/tissue was then used as the target explant for particle bombardment. As mentioned above, in one treatment the leaf segments/tissue was incubated on culture medium with 12% sucrose (to plasmolyze the leaf cells) prior to particle bombardment, and in the second treatment the leaf pieces/segments were exposed to culture medium with 12% sucrose plus 0.1 mg/l ethametsulfuron prior to particle delivery (providing an earlier exposure to the inductive treatment to begin stimulation of Wus2/Odp2 expression). To further enhance morphogenesis (beyond that provided by inducible expression), plasmids containing constitutive Wus2 and ODP2 expression cassettes were co-delivered with Cas9 and gRNA, as well as the template DNA (the genomic-sequence-flanked NPTII expression cassette). After DNA delivery, successful NPTII coding sequence integration via homology-dependent recombination (HDR) permitted regeneration of HDR events using both the inducing ligand (0.1 mg/l ethametsulfuron) and G418 for selection. Due to high levels of Wus2 and Bbm expression (inducible-expression from pre-integrated 60850-T-DNA plus constitutive provided by PHP21875 and PHP40828), selection using NPTII and G418 became less efficient, resulting in escape (wild type) plants being recovered. Thus, at lower levels of G418 selective agent (150 or 200 mg/l), when leaf tissue/segments from 9 seedlings was used as starting explants for each treatment, 46 and 34 T0 plants containing the NPTII gene were recovered but none were observed to contain perfect HDR integrations. In contrast, when 9 seedlings were again used for particle delivery of the plasmids followed by increased selective pressure due to higher G418 (250 mg/l), selection became more stringent and three perfect HDR integration events were recovered from a total of 38 T0 plants that were regenerated and analyzed.

[0186] Thus, using this combination of Wus2 and Odp2 expression cassettes to stimulate growth while also delivering the SDN3 donor DNA, the Cas9 expression cassette, and the guide-RNA expression cassette resulted in efficient homology-dependent targeted integration. Thus, three perfect HDR events were recovered from particle bombardment of leaf segments derived from only 34 starting seedlings.

[0187] In comparison, when wild-type maize Stiff-Stalk inbred PHH5G was transformed in a similar manner but without the use of Wus2 and Odp2, transgenic events were not recovered. Thus, particle delivery of the plasmids PHP71193 and PHP71788 into seedling-derived leaf segments/tissue (with no Wus2 or Odp2) does not result in transgenic or edited T0 plants.

### B. Site-Specific Integration

[0188] Pioneer inbred PH184C (disclosed in U.S. Pat. No. 8,445,763, incorporated herein by reference in its entirety) that contains in chromosome-1 a pre-integrated Site-Specific Integration (SSI) target site (Chrom-1 target site) composed of UBI PRO:FRT1:NPTII::PINII TERM+FRT87 is used. Prior to bombardment, 10-12 DAP (days after pollination) immature embryos are isolated from ears of Pioneer inbred PH184C and placed on 605J culture medium plus 16% sucrose for three hours to plasmolyze the scutellar cells. Alternatively, the first 2-3 cm of seedling-derived leaf-whorl tissue is bisected longitudinally and sliced into approximately 0.5-3.0 mm leaf segments, and these leaf segments are plasmolyzed on 605J medium plus 16% sucrose for three hours prior to particle bombardment.

[0189] Four plasmids are typically used for each particle bombardment:
[0190] 1) a donor plasmid (100 ng/μl) containing a FRT-flanked donor cassette for Recombinase-Mediated Cassette Exchange, for example a plasmid containing FRT1:PMI::PINII TERM::CZ19B1 TERM+UBI1ZM PRO::UBI1ZM 5 UTR::UBI1ZM INTRON1::DS-RED2::PINII TERM+FRT6 (PHP8418-0004; SEQ ID NO:92);
[0191] 2) a plasmid (2.5 ng/μl) containing the expression cassette UBI1ZM PRO::UBI1ZM 5 UTR::UBI1ZM INTRON1::FLPm::PINII TERM (PHP5096; SEQ ID NO:3);

[0192] 3) a plasmid (10 ng/μl) containing the expression cassette ZM-PLTP PRO::ZM-ODP2::OS-T28 TERM+FMV & PCSV ENHANCERS (PHP89030; SEQ ID NO:12); and
[0193] 4) a plasmid (5 ng/μl) containing the expression cassette ZM-PLTP PRO::ZM-WUS2::IN2-1 TERM+PSW1+GZ-W64A TERM+FL2 TERM (PHP89179; SEQ ID NO:13).

[0194] To attach the DNA to 0.6 μm gold particles, the four plasmids are mixed by adding 10 μl of each plasmid together in a low-binding microfuge tube (Sorenson Bioscience 39640T) for a total of 40 μl. To this suspension, 50 μl of 0.6 μm gold particles (30 μg/μl) and 1.0 μl of Transit 20/20 (Cat No MIR5404, Mirus Bio LLC) are added, and the suspension is placed on a rotary shaker for 10 minutes. The suspension is centrifuged at 10,000 RPM (˜9400×g) and the supernatant is discarded. The gold particles are re-suspended in 120 μl of 100% ethanol, briefly sonicated at low power and 10 μl is pipetted onto each carrier disc. The carrier discs are then air-dried to remove all remaining ethanol. Particle bombardment is performed using a Biolistics PDF-1000, at 28 inches of Mercury using a 200 PSI rupture disc. After particle bombardment, the immature embryos or leaf segments are selected on 605J medium modified to contain 12.5 g/l mannose and 5 g/l maltose and no sucrose. After 10-12 weeks on selection, plantlets are regenerated and analyzed using qPCR. Co-delivery of PLTP::ODP2 (PHP89030; SEQ ID NO: 12) and PLTP::WUS2 (PHP89179; SEQ ID NO:13) along with the SSI components (Donor DNA (PHP8418-0004; SEQ ID NO:92)+UBI::FLP (PHP5096; SEQ ID NO:3) is observed to produce high frequencies of site-specific integration of the donor fragment into the Chrom-1 target site (i.e. at rates of 4-7% relative to the number of bombarded immature embryos).

[0195] Particle bombardment methodologies described herein, in combination with any pre-treatment of seedlings described in the present application is observed to produce high transformation frequencies due to leaf segments that exhibit an improvement in frequencies of T-DNA delivery, somatic embryo response (more rapid growth and higher numbers), production of T0 plants, and single-copy integration frequencies.

### Example 4: Agrobacterium-Mediated Transformation of Corn

### A. Preparation of Agrobacterium Master Plate.

[0196] Agrobacterium tumefaciens harboring a binary donor vector was streaked out from a −80° C. frozen aliquot onto solid 12R medium and cultured at 28° C. in the dark for 2-3 days to make a master plate.

### B. Growing Agrobacterium on Solid Medium.

[0197] A single colony or multiple colonies of Agrobacterium were picked from the master plate and streaked onto a second plate containing 810K medium and incubated at 28° C. in the dark overnight.

[0198] Agrobacterium infection medium (700A; 5 ml) and 100 mM 3′-5′-Dimethoxy-4′-hydroxyacetophenone (acetosyringone; 5 μL) were added to a 14 mL conical tube in a hood. About 3 full loops of Agrobacterium from the second plate were suspended in the tube and the tube was then vortexed to make an even suspension. The suspension (1 ml) was transferred to a spectrophotometer tube and the optical density (550 nm) of the suspension was adjusted to a reading of about 0.35-1.0. The Agrobacterium concentration was approximately 0.5 to 2.0×10⁹ cfu/mL. The final Agrobacterium suspension was aliquoted into 2 mL microcentrifuge tubes, each containing about 1 mL of the suspension. The suspensions were then used as soon as possible.

### C. Growing Agrobacterium on Liquid Medium.

[0199] Alternatively, Agrobacterium can be prepared for transformation by growing in liquid medium. One day before infection, a 125 ml flask was prepared with 30 ml of 557A medium (10.5 g/l potassium phosphate dibasic, 4.5 g/l potassium phosphate monobasic anhydrous, 1 g/l ammonium sulfate, 0.5 g/l sodium citrate dehydrate, 10 g/l sucrose, 1 mM magnesium sulfate) and 30 μL spectinomycin (50 mg/mL) and 30 μL acetosyringone (20 mg/mL). A half loopful of Agrobacterium from a second plate was suspended into the flasks and placed on an orbital shaker set at 200 rpm and incubated at 28° C. overnight. The Agrobacterium culture was centrifuged at 5000 rpm for 10 min. The supernatant was removed and the Agrobacterium infection medium (700A) with acetosyringone solution was added. The bacteria were resuspended by vortex and the optical density (550 nm) of the Agrobacterium suspension was adjusted to a reading of about 0.35 to 2.0.

### D. Maize Transformation.

[0200] Maize seed was surface-sterilized for 15-20 min in 20% (v/v) bleach (5.25% sodium hypochlorite) plus 1 drop of Tween 20 followed by 3 washes in sterile water, germinated and allowed to grow into seedlings for approximately 14 days, and then prepared to produce leaf segments/fragments as described above. Leaf segments were placed in the Agrobacterium infection medium (700A) with 200 μM acetosyringone solution+0.02% surfactant solution (Break-Thru® surfactant, Plant Health Technologies, Boise, ID). The Agrobacterium infection medium was drawn off and 1 ml of the Agrobacterium suspension was added to the leaf segments and was allowed to stand for 20 min. The suspension of Agrobacterium and leaf segments were poured through a sterile metal sieve and the liquid was discarded. The leaf segments/pieces collected on the metal sieve were transferred using a spatula onto a stack of 3 sterile Whatman #2 filter papers, used to wick off excess Agrobacterium-containing liquid, and then again, a spatula was used to transfer the leaf pieces/segments onto a filter paper lying on co-cultivation medium. The plate was incubated in the dark at 21° C. for 1-3 days of co-cultivation.

[0201] The filter papers supporting the leaf segments were then transferred to resting medium (605T medium) without selection. Seven days later, the filter papers supporting the leaf segments were transferred to selection medium for three weeks. After selection, healthy growing somatic embryos were transferred using forceps onto maturation medium for two weeks in the dark, at which point the maturation plates were transferred in to (still containing the maturing somatic embryos) into the light for an addition week. After one week in the light, regenerating plantlets were transferred to rooting medium. After rooting, plantlets were ready for transplanting to the greenhouse.

### Example 5: Transformation of Maize Leaf Segments

[0202] Constitutive expression of WUS2 and ODP2 after Agrobacterium-mediated transformation of maize leaf segments resulted in production of embryogenic callus and/or rapidly formed somatic embryos which regenerate into healthy, fertile T0 plants.

[0203] The general protocol for Agrobacterium-mediated maize transformation described in Example 4 was used, with the modifications described below for using leaf tissue/segments as the target explant.

### A. In Vitro Seed Germination to Produce Seedling Target Tissue

[0204] Mature seeds were surface sterilized by immersion in a series of solutions under agitation using a magnetic stir bar; first in an 80% ethanol solution for 3 minutes, the ethanol solution was decanted and replaced with a 30% Clorox bleach solution containing 0.1% Tween-20 for 20 minutes, the Clorox bleach solution was decanted, and the mature seeds were rinsed (three 5-minute rinses) in autoclaved sterile water. The sterilized seeds were transferred onto solid 900 medium after the final sterile water rinse. In vitro germination and seedling growth were carried out at 26° C. with a 16 h light/8 h dark photoperiod. The first 2.5 to 3 cm of leaf whorl above the mesocotyl was removed from each 12-18 day-old seedling for further processing for transformation.

### B. Agrobacterium Preparation

[0205] Agrobacterium tumefaciens strain LBA4404 TD THY-harboring PHP71539 (SEQ ID NO: 4; pVIR9, see US20190078106A1, herein incorporated by reference in its entirety) and a binary donor vector, PHP96037 (SEQ ID NO:66), containing a WUS2/ODP2 T-DNA with a selectable marker (ZM-ALS (HRA)) and a screenable marker (ZS-GREEN1) or a binary donor control vector containing a selectable marker and/or a screenable marker T-DNA (lacking WUS2/ODP2) was streaked out from a −80° C. frozen aliquot onto solid 12V medium and cultured at 28° C. in the dark for 2 days to make a master plate. A working plate was prepared by streaking 4-5 colonies from the 12V-grown master plate across fresh 810K media, incubating overnight in the dark at 28° C. prior to using for Agrobacterium infection.

[0206] Agrobacterium infection medium (700J medium, 10 ml) with the addition of 20 μL of acetosyringone and 20 μL of a previously 10-fold-diluted surfactant solution (Break Thru S 233, Evonik Industries GmbH, Goldschmidtstraße 100, 45127 Essen, Germany) was added to a 50 mL conical tube in a hood. About 5 full loops of Agrobacterium were collected from the working plate, transferred to the infection medium in the 50 ml tube, and then vortexed until uniformly suspended. The suspension (1 ml) was transferred to a spectrophotometer tube and the optical density (550 nm) of the suspension was adjusted to a reading of 0.6. The final Agrobacterium suspension was aliquoted into Corning eight-well plates containing 0.4 μm permeable culture inserts (Falcon, Part Numbers 353046 and 353090, respectively) with each well containing about 8 mL of the Agrobacterium suspension.

### C. Manual Preparation of Leaf Segments/Pieces and Transformation

[0207] Seed of maize inbred PH85E were surface sterilized as previously described, and then germinated at 28° C. under low light on solid 90B medium (½ strength MS salts plus 20 g/l sucrose and 50 mg/l benomyl). The leaf base segment (an approximate 2.5-3.0 cm section above the mesocotyl) was removed from each 12-18 day-old in vitro-germinated seedling with sterilized scissors. These leaf segments were placed into a 150 mm×15 mm Petri dish. Forceps were used to hold each leaf whorl section at the upper green end and the section was bisected longitudinally into 2 lengthwise halves using a sterile #10 scalpel blade. The outer leaf was removed and the inner leaves of the whorl were then cross-cut (diced) into smaller sections (approximately 1 to 3 mm in size, preferably 2.5-3.0 mm in size). Small leaf sections were collected and directly transferred into the permeable culture inserts containing the Agrobacterium suspension and incubated at room temperature (25° C.) for a 15-minute infection period.

[0208] After infection, the culture insert containing the Agrobacterium-infected leaf segments was removed from the 8-well plate and placed on an autoclaved dry filter paper to wick up and remove any residual Agrobacterium solution. The infected leaf segments were then transferred onto a fresh filter paper (VWR 7.5 CM) resting on 710N solid co-cultivation medium. Forceps were used to evenly disperse the leaf segments on the 710N plates and to ensure they have enough room to grow. The infected leaf segments/tissue was incubated at 21° C. in the dark for 2-3 days. After 2-3d co-cultivation, the paper supporting the leaf segments/tissue was removed from the 710N medium and transferred onto 605B medium for 4 week resting culture. Leaf segments/tissue was sub-cultured every 2 weeks. After the 4 weeks culture on resting medium (605B) the plates were placed into a controlled temperature/humidity incubator (45° C./70% RH) for a 2-hour heat treatment. The plates were removed from the incubator and kept at room temperature (25° C.) for 1-2 hours until the plates had cooled down. Depending on the maize inbred, a single two-hour heat treatment, or two 2-hour heat treatments on two consecutive days, were applied to stimulate the drought-inducible RAB17 promoter and induce CRE-mediated excision of WUS2, ODP2, and CRE recombinase.

### D. Mechanized Production of Leaf Segments/Pieces

[0209] As an alternative to manual slicing of longitudinally-bisected leaf whorl segments from seedlings, the final 0.5-3. mm leaf pieces/segments were mechanically produced as follows. First, the seedlings were cut above the mesocotyl (removing the aerial portions from the roots) and the first 3 cm of leaf whorl was harvested, discarding the remainder of the more mature leaf tissue. The 3-cm long leaf whorl was bisected longitudinally using a scalpel, and the halves were put into 100 ml of Agrobacterium suspension (OD=0.5-0.6 measured at 550 nm, with the bacterium suspended in medium 700J+100 mM AS+0.02% surfactant solution (Break-Thru® surfactant) in a food processor. The leaf tissue was pulse-blended on low speed (10 pulses) until the average size of leaf fragments/segments were approximately 0.5-3 mm in length/depth. The suspended leaf tissue/segments in the Agrobacterium suspension remained in the blender bowl for 20 minutes at room temperature with gentle swirling every 1-2 minutes, which constituted the “Agrobacterium Infection” step. After infection, the suspension was poured through a sterile stainless-steel screen, catching the leaf segments/fragments from the liquid that passed through for disposal. The leaf segments were then transferred from the screen onto three layers of dry Whatman's #2 filter papers which wicked away excess Agrobacterium suspension (but not being washed) so that a thin layer of bacterium remained on the surface of the leaf segments/pieces. The leaf segments/pieces were again transferred onto a single layer of Whatman's filter paper resting on solid co-cultivation medium (710N) and were then cultured in the dark at 210C for 24 hours. After co-cultivation, the filter papers with the supported leaf segments/pieces were transferred onto resting medium 605B and cultured in the dark at 28° C. for one week, at which point the filter papers were again transferred onto selection medium 13266N and cultured in the dark at 28° C. for 3 weeks. After selection, the selection plated (held in a translucent culture box, typically holding 12 plates in 6 stacks of 2 plates) was transferred into a 45° C., 70% relative humidity incubator for two hours, then removed and the box placed on a benchtop at 25° C. for 1.5 hours for the temperature to re-equilibrate to room temperature. After heat treatment (which activated HSP17.7 PRO::CRE expression for excision of WUS/BBM/CRE from the T-DNA) healthy somatic embryos were transferred from the subtending filter papers onto fresh maturation medium 13329B and cultured for 2 weeks at 28° C. in the dark, then the plates were transferred into the light (120 μE m-2 s-1, 18-hour photoperiod) at 25° C. for one additional week. Healthy mature somatic embryos that had begun producing shoots were then transferred onto rooting medium 404J for an additional 203 weeks of culture under lights. Plantlets were then transferred to soil in the greenhouse. When regenerated T0 plants were large enough for sampling, leaf tissue was punched for qPCR analysis for T-DNA and Agrobacterium plasmid backbone sequences.

[0210] After the heat treatment and temperature equilibration at room temperature, leaf segments with newly developed somatic embryos were transferred onto 13329B maturation medium without filter papers, cultured in the dark at 28° C. for 2 weeks, and then moved into a 26° C. light room for an additional week. Leaf segments that now supported small shoots were transferred onto 404J rooting medium for an additional 2-3 weeks until well formed roots had developed, at which point the plantlets were ready for transfer to the greenhouse.

[0211] Transformation efficiency (transformation frequency) was calculated as the number of independent transgenic T0 plants produced per number of starting seedlings used for leaf fragment/segment preparation on a percentage basis. For example, 50 seedlings were used and separated into 5 groups (for five different treatments in an experiment) of 10 seedlings/treatment (or experimental replicates as shown in Table 15). For each seedling within a group, a 3 cm cylinder of wrapped leaf tissue above the mesocotyl was excised and each cylinder was bisected longitudinally. These lengths of bisected leaf tissue were then manually sliced with a scalpel or placed into liquid within a food processor and pulsed, both methods produced leaf fragments/segments of between 0.5-3.0 mm in length on average. The number of final leaf segments (fragments) used for transformation per starting seedling could be variable depending on the size and breadth of the seedling leaves, the physical cutting process which varied slightly from batch to batch, etc. It should also be noted that based on this procedure the leaf segments/fragments from each cohort of 10 seedlings within each treatment (or replicate) were pooled for Agrobacterium-mediated transformation.

[0212] An independent transgenic T0 event identified by positive PCR analysis was tabulated as a molecularly unique T0 plant produced from a single leaf segment/fragment, which precluded counting clonal events (the same transgenic integration pattern for example) as separate events. Once the final number of molecularly characterized transgenic events for a given treatment had been determined, the final number of transgenic T0 plants (independent events) were totaled and divided by the number of starting seedlings for that replicate (10 in this Example 5) and the product was multiplied by 100 to provide a percentage. Thus, for experimental replicate 5 in Table 15, 30 T0 plants were produced from 10 starting seedlings, for a transformation frequency (T0% in Table 15) of (30/10)×100=300%.

[0213] Results from five experiments are shown in Table 15, in which 10 starting seedlings per experiment (50 total) were used to produce the starting leaf segments for Agrobacterium infection, the number of transgenic T0 plants recovered ranged from 18 (Exp. 1) to 51 (Exp. 4), resulting in a mean transformation frequency of 360%+/−112 Standard Deviation (SD). This is in contrast to experiments in which only a selectable marker gene and/or a screenable marker gene (fluorescent protein gene) were contained in the T-DNA, in which no culture response was observed and no T0 plants were produced.

[0214] In addition to a high transformation frequency, a high percentage of the recovered TO plants were single-copy (SC) for the T-DNA (containing the selectable marker and/or the screenable marker) with no contaminating sequences from Agrobacterium being detected. Such SC/No-Agro events (T0 plants) ranged from 23% to 37% with a mean of 31.4% (+/−5.2% SD). By comparing the number of high-quality transgenic T0 plants (SC for the T-DNA with no contaminating Agrobacterium backbone sequences) to the number of starting seedlings used in these experiments provided a clear measure of overall efficiency, with a mean frequency of 114% (+/−44% SD). This method using WUS2/ODP2 obviated the need for growing mature maize plants for 90-120 days in the greenhouse to produce immature embryo explants for transformation and provided transgenic events from leaf explants generated from germinated seed in the lab.

TABLE 15

| | | # T0 | | | | SC No- | |
|---|---|---|---|---|---|---|---|
| | # | plants | | # SC No- | SC No- | Agro | Escape |
| Exp | Seedlings | (events) | T0% | Agro Seq | Agro %* | %** | Freq. |
| 1 | 10 | 18 | 180% | 5 | 28% | 50% | 39% |
| 2 | 10 | 41 | 410% | 14 | 34% | 140% | 32% |
| 3 | 10 | 40 | 400% | 9 | 23% | 90% | 45% |
| 4 | 10 | 51 | 510% | 18 | 35% | 180% | 40% |
| 5 | 10 | 30 | 300% | 11 | 37% | 110% | 43% |
| Total | 50 | 180 | 360% | 57 | 29% | 114% | 39% |

*Frequency of T0 plants with single-copy T-DNA and no plasmid sequences, relative to the total number of T0 plants
**Frequency of T0 plants with single-copy T-DNA and no plasmid sequences, relative to the starting number of seedlings

### Example 6: Transformation of Sorghum Leaf Segments

[0215] Constitutive expression of WUS2 and ODP2 after Agrobacterium-mediated transformation of sorghum leaf segments results in production of embryogenic callus and/or rapidly formed somatic embryos which regenerate into healthy, fertile T0 plants.

[0216] Agrobacterium strain, constructs, growth of seedlings, preparation of leaf material for transformation, Agrobacterium infection, co-culture, resting culture, maturation and rooting for sorghum were all the same as the methods developed for maize in EXAMPLE 5. The purpose here was to determine how transferable the method was without any sorghum-specific optimization.

[0217] Results from four experiments using a WUS2/ODP2 T-DNA, along with one experiment in which the control T-DNA contained only a selectable marker and a fluorescent marker (HRA+ZS-GREEN) are shown in Table 16. Each experiment also contained a comparison between two resting media, 13266P (605B medium plus 50 mg/l meropenem) which contained no additional cupric sulfate or BAP and medium 13265L (13266P medium plus 100 μM cupric sulfate and 0.5 mg/l BAP).

[0218] As demonstrated for maize, sorghum treatments that contained WUS2 and ODP2 expression cassettes in the T-DNA (PHP96037; SEQ ID NO:66) also resulted in high transformation frequencies, calculated based on the number of transgenic T0 plants recovered per starting seedling, with a mean (+/−SD) for 13266P and 13265L of 36.5% (+/−4.1%) and 35.5% (+/−9.6%) respectively, with no significant difference between the two media compositions (p=0.05). In contrast, the control treatment containing the selectable marker and/or the screenable marker with no WUS2/ODP2 in the T-DNA produced no transgenic events. The mean frequency of obtaining high-quality TO sorghum plants (single copy with no Agrobacterium backbone (SC/NA %)) when transformed with PHP96037 (SEQ ID NO:66) was between 36% to 38% for the two media.

[0219] As with maize, this method obviated the need for growing mature sorghum plants for 90-120 days in the greenhouse to produce immature embryos explants for transformation and provided transgenic events from leaf explants generated from germinated seed in the lab.

TABLE 16

| | | | | | # | | | |
|---|---|---|---|---|---|---|---|---|
| | | | | | SC/No | | | |
| | # | Treatment | # T0 | | Agro | SC/NA | SC | # |
| Expt. No. | Seedlings | (Medium) | Plants | T0% | (NA) | % | % | Escapes |
| 1 | 15 | 13265L | 65 | 433% | 26 | 40% | 30% | 2 |
| | 13 | 13266P | 18 | 138% | 7 | 39% | 7% | 2 |
| 2 | 15 | 13265L | 56 | 373% | 18 | 32% | 28% | 2 |
| | 15 | 13266P | 46 | 307% | 19 | 41% | 28% | 5 |
| 3 | 15 | 13265L | 32 | 213% | 7 | 22% | 7% | 0 |
| | 15 | 13266P | 14 | 93% | 5 | 36% | 13% | 0 |
| 4 | 16 | 13265L | 27 | 169% | 13 | 48% | 13% | 9 |
| | 16 | 13266P | 20 | 125% | 6 | 30% | 6% | 3 |
| Total | 61 | 13265L | 180 | 295% | 64 | 36% | 78% | 13 |
| Total | 59 | 13266P | 97 | 164% | 37 | 38% | 54% | 10 |
| No | 15 | 13265L | 0 | 0% | 0 | 0% | 0% | 0 |
| WUS/ODP2 | | | | | | | | |
| Control | 15 | 13266P | 0 | 0% | 0 | 0% | 0% | 0 |

### Example 7: Promoter, Additional Helpers, Excision Components, and Selectable Marker Combinations

[0220] Using a variety of promoter, additional helpers, excision components, and selectable marker combinations for expression of WUS2 and ODP2 after Agrobacterium-mediated transformation of leaf segments results/resulted in production of embryogenic callus and/or rapidly formed somatic embryos which regenerate/regenerated into healthy, fertile T0 plants.

### A. Constitutive Promoters Combinations

[0221] As shown below numerous combinations of promoters, additional helpers, excision components, and selectable markers resulted in successful accelerated leaf transformation in maize.

[0222] Maize seedling-derived leaf segments were transformed using Agrobacterium strain LBA4404 TD THY—as described in Example 5. T-DNA delivery was evaluated based on transient expression of UBI-ZS-GREEN, which was present in all of the T-DNA variations tested. Fourteen to twenty-one days after transformation, growth responses were evaluated based on both the rate of growth and the morphology of the leaf segment/tissue (see Table 17 for rating scale). Leaf transformation assay scoring (Assay Score), as shown in Table 17, is based on morphology (early somatic embryo formation versus production of embryogenic callus) and growth rate, with increasing numerical scores indicating more rapid growth, and a concomitant progression from entirely callus growth (i.e., a score of 1) to rapidly producing single functional somatic embryos with no callus (i.e., a score of 4).

TABLE 17

| | Growth | | Percentage of | |
|---|---|---|---|---|
| TXN Resp. | at <21 | | Leaf Segments | |
| Assay Score | days | Morphology | Responding | Description |
| 0 | Single | NA | 0% | Good DNA delivery and transient |
| | Cells | | | expression, but no growth |
| 1 | Slow | Callus | <20% | Slow growing embryogenic callus |
| 2 | Moderate | Callus | 30-50% | Faster growth but still mixed |
| | | | | embryogenic callus |
| 3 | Fast | SE | 60-80% | Some Early Somatic Embryos |
| | | | | (ESE) with rapid growth |
| 4 | Most | SE | 60-80% | Highest density of rapidly growing |
| | Rapid | | | Early Somatic Embryos (ESE) |

[0223] Table 18 shows the growth response after Agrobacterium-mediated transformation of maize leaf segments with T-DNAs from plasmids containing different construct combinations of promoters, additional helpers, excision components, and selectable markers.

[0224] Of the various constructs tested, 29 constructs resulted in an Assay Score of “2”, while 23 constructs resulted in the rapid production of early somatic embryos within 14-21 days of starting the Agrobacterium infection (an Assay Score of either 3 or 4). These results demonstrated that various promoters, additional helpers, excision components, and selectable marker combinations for WUS2 and ODP2 used in leaf transformations produced a callus growth response and/or a rapid embryo response and resulted in an increased transformation efficiency (percentage of leaf segments responding). However, a subset of 23 plasmids resulted in rapid somatic embryo formation and substantially shortened the duration of the transformation process. This was manifested as a shortened time in culture. Constructs with an Assay Score of two (2) typically produced embryogenic callus that was ready for the maturation phase (where embryo regeneration of shoots begins) within about 6-8 weeks after Agrobacterium infection, while for Assay Scores of three (3) and four (4) this duration was further reduced to 5-7 and 4-6 weeks, respectively. This was compared to the published method of Lowe et al. (2016, Plant Cell 28:1998-2015) for leaf segment transformation where the duration of culture was between 10-12 weeks before somatic embryo maturation was started.

[0225] Compared to the Lowe et al. construct, PHP35648 (SEQ ID NO:1), and other constructs tested herein that produced a slow growing callus response requiring 10-12 weeks before somatic embryo maturation, many other constructs tested herein resulted in a shorter time frame to reach the somatic embryo maturation stage (8 weeks or less). Constructs that resulted in a shorter time frame to reach the somatic embryo maturation stage (8 weeks or less) included combinations containing various promoters driving WUS and ODP2 and additional helpers, excision components, and selectable marker combinations as shown in Table 18.

TABLE 18

| | | | | CRE | | |
|---|---|---|---|---|---|---|
| | | | | Position | | TXN |
| | | | | (Up- or | | Resp. |
| | WUS | BBM | Additional | down- | Selectable | Assay |
| Plasmid | Promoter | Promoter | Helper | stream) | Marker | Score |
| PHP46332 | NOS | 35SENH- | | RAB17-- | moPAT | 1 |
| | | UBI | | up | | |
| PHP83652 | AXIG1 | PLTP | | HSP17-- | HRA | 0 |
| | | | | down | | |
| PHP83475 | PLTP | | | HSP17-- | HRA | 0 |
| | | | | down | | |
| PHP83621 | PLTP | PLTP | | GLAB1-- | HRA | 0 |
| | | | | down | | |
| PHP81855 | 8xENH | PLTP: | | RAB17-- | NPTII | 1 |
| | 35S 2xop | 1xOP | | up | | |
| PHP81856 | AXIG1 | PLTP | | RAB17-- | NPTII | 0 |
| | | | | down | | |
| PHP81857 | NOS | PLTP | | RAB17-- | NPTII | 2 |
| | | | | down | | |
| PHP81858 | NOS | UBI | | RAB17-- | NPTII | 2 |
| | | | | down | | |
| PHP92365 | PLTP | | UBI:LEC1 | NO CRE | HRA | 0 |
| PHP92765 | PLTP | | PLTP2:PKL-A | RAB17-- | no | 0 |
| | | | | down | | |
| PHP92928 | 35S- | | UBI:LEC1 | NO CRE | HRA | 0 |
| | ENH:PLTP | | | | | |
| PHP93271 | PLTP | | UBI:REPA | NO CRE | HRA | 0 |
| PHP93559 | NOS | UBI | | RAB17--up | PMI | 1 |
| PHP93613 | ACTIN | | UBI:LEC1 | RAB17--up | HRA | 0 |
| PHP93696 | CAB:2xEME | | excision | HSP17--up | HRA | 0 |
| | | | activate | | | |
| | | | ubi:2xEME:LEC1 | | | |
| PHP93586 | PLTP:WUS-T2A | | PLTP:T2A-REPA | None | HRA | NT |
| pHP93742 | CAB:WUS-T2A | T2A-BBM | CAB:amiPKL-A | None | HRA | 0 |
| PHP93743 | SCBV | | UBI:REP-A | HSP17--up | HRA | 1 |
| PHP93738 | ACTIN | UBI | | HSP17--up | HRA | 2 |
| PHP95385 | ACTIN | UBI | | HSP17-- | HRA | 3 |
| | | | | down | | |
| PHP93766 | NOS | | UBI:LEC1 | HSP17--up | HRA | 0 |
| PHP93925 | UBI | 3xENH- | | NO CRE | HRA | 4 |
| | | UBI | | | | |
| PHP93926 | NOS | UBI | | HSP17--up | HRA | 1 |
| PHP93932 | 3xENH-CAB | | CAB-L:amiPKL-A | NO CRE | HRA | 2 |
| PHP93933 | NOS | 3xENH- | | NO CRE | HRA | 4 |
| | | UBI | | | | |
| PHP93937 | CAB | | CAB-L:amiPKL-A | | HRA | NT |
| PHP93739 | NOS | UBI | | HSP17--up | HRA | 2 |
| PHP94684 | UBI | BI-DIR-UBI | | HSP17--up | HRA | 1 |
| PHP94685 | 3xENH- | BI-DIR-UBI | | HSP17--up | HRA | 1 |
| | UBI | | | | | |
| PHP94638 | UBI | B-DIR- | UBI:amiPKL-A | HSP17--up | NO | 0 |
| | | UBI | | | | |
| PHP94636 | 8xDR5-35S | PLTP:1xop | | RAB17-- | NPTII | 1 |
| | | | | down | | |
| PHP94715 | 8xDR5-35S | UBI | | RAB17-- | NPTII | 2 |
| | | | | down | | |
| PHP94682 | SCBV | | UBI:LEC1 | RAB17-- | HRA | 0 |
| | | | | down | | |
| PHP95067 | NOS | | UBI:CUC1-2 | HSP17-- | HRA | 0 |
| | | | | down | | |
| PHP95068 | NOS | | UBI:CUC2 | HSP17-- | HRA | 0 |
| | | | | down | | |
| PHP95069 | NOS | | UBI:CUC3-2 | HSP17-- | HRA | 0 |
| | | | | down | | |
| PHP95070 | NOS | | UBI:zm-GPCNAC-1 | HSP17-- | HRA | 0 |
| | | | | down | | |
| PHP95071 | NOS | | UBI:RKD4 | HSP17-- | HRA | 0 |
| | | | | down | | |
| PHP95072 | FT-MEM1-NOS | UBI | | HSP17-- | HRA | 3 |
| | | | | down | | |
| PHP95073 | PEPC1 | UBI | | HSP17-- | HRA | 1 |
| | | | | down | | |
| PHP95074 | DIURNA | UBI | | HSP17-- | HRA | 1 |
| | L12 | | | down | | |
| PHP95075 | NOS | | 3xENH-UBI:LEC2 | HSP17-- | HRA | 0 |
| | | | | down | | |
| PHP95205 | RUBISCO | UBI | | HSP17-- | HRA | 1 |
| | SSU | | | down | | |
| PHP94331 | NOS | UBI | CAB:zm-MPKL-A | HSP17--up | HRA | 1 |
| PHP94332 | NOS | UBI | UBI:zm-MPKL-A | HSP17--up | HRA | 1 |
| PHP95393 | CSVMV | UBI | | HSP17-- | HRA | 1 |
| | | | | down | | |
| PHP95394 | CAB | UBI | | HSP17-- | HRA | 1 |
| | | | | down | | |
| PHP95502 | NOS | 3xEME- | | ins-HSP17-- | HRA | 2 |
| | | UBI | | up | | |
| PHP95503 | NOS | 3xEME- | | ins HSP17-- | HRA | 3 |
| | | UBI | | down | | |
| PHP95499 | ACTIN | 3xEME-UBI | | HSP17--up | HRA | 1 |
| PHP96664 | 3xEME-NOS | UBI | | HSP17--up | HRA | NT |
| PHP96695 | NOS | 3xEME- | | HSP17-- | HRA | 4 |
| | | UBI | | down | | |
| PHP97453 | UBI | 3xEME- | | HSP17-- | HRA | 3 |
| | | UBI | | down | | |
| PHP95886 | NOS | UBI | UBI:RKD4 | HSP17-- | HRA | 1 |
| | | | | down | | |
| PHP95892 | NOS | UBI | UBI:RAP2.6L | HSP17-- | HRA | 2 |
| | | | | down | | |
| PHP95881 | NOS | UBI | UBI:LEC2 | HSP17-- | HRA | 0 |
| | | | | down | | |
| PHP95882 | NOS | UBI | UBI:LEC1V1 | HSP17-- | HRA | 1 |
| | | | | down | | |
| PHP95893 | NOS | UBI | UBI:MIR156B | HSP17-- | HRA | 1 |
| | | | | down | | |
| PHP95990 | NOS | | UBIRAP2.6L | HSP17-- | HRA | 1 |
| | | | | down | | |
| PHP95989 | FT- | UBI | | HSP17-- | HRA | 1 |
| | PPCA1- | | | down | | |
| | NOS | | | | | |
| PHP95987 | SCBV | UBI | | HSP17-- | HRA | 1 |
| | | | | down | | |
| PHP96037 | NOS | 3xENH- | AT-5-IV-2 | ins HSP17-- | HRA | 4 |
| | | UBI | (two) | down | | |
| PHP96277 | ACTIN | 3xENH- | AT-5-IV-2 | ins HSP17-- | HRA | 4 |
| | | UBI | (two) | down | | |
| PHP95904 | NOS | UBI | UBI:RLD1 | HSP17--up | HRA | 1 |
| PHP96030 | NOS | | UBI:RLD1 | HSP17--up | HRA | 0 |
| PHP96036 | NOS | | KN1 | HSP17--up | HRA | 0 |
| PHP96716 | NOS | UBI | KN1 | HSP17--up | HRA | 1 |
| PHP96031 | GOS2 | UBI | | HSP17-- | HRA | 3 |
| | | | | down | | |
| PHP96730 | SWEET11 | UBI | | HSP17-- | HRA | 0 |
| | | | | down | | |
| PHP96731 | DIURNA | UBI | | HSP17-- | HRA | 0 |
| | L10 | | | down | | |
| PHP96032 | DIURNA | UBI | | HSP17-- | HRA | 1 |
| | L11 | | | down | | |
| PHP96425 | NOS | 3xENH- | AT-5-IV-7 1x* | ins-HSP17-- | HRA | 4 |
| | | UBI | | down | | |
| PHP96751 | NOS | 3xENH-UBI | AT-5-IV-2 1x* | ins-HSP17-- | HRA | 4 |
| | | | | down | | |
| PHP96919 | 3xEME- | 3xEME- | | HSP17-- | HRA | 3 |
| | NOS | UBI | | down | | |
| PHP97417 | UBI | 3xENH- | | ins-HSP17-- | HRA | 3 |
| | | UBI | | down | | |
| PHP97334 | NOS | 3xENH- | AT-5-IV-2 | ins-HSP17-- | NPTII-- | 4 |
| | | UBI | 2x** | down | down | |
| PHP97335 | NOS | 3xENH- | | ins-HSP17-- | NPTII-- | 2 |
| | | UBI | | down | up | |
| PHP97458 | FT- | 3xEME- | | HSP17-- | HRA | 1 |
| | MEM1- | UBI | | down | | |
| | nos | | | | | |
| PHP97725 | NOS- | 3xENH- | | ins-HSP17-- | HRA | 1 |
| | WUS-ins | UBI | | up | | |
| PHP97726 | NOS- | 3xENH- | | ins-HSP17-- | HRA | 1 |
| | WUS-ins | UBI | | up | | |
| PHP97933 | NOS | 3xENH- | AT-5-IV-2 | ins-HSP17-- | NPTII | 4 |
| | | UBI | 2x** | down | | |
| | | | CAS9 + gRNA *** | | | |
| PHP98784 | NOS | 3xENH- | AT-5-IV-2 | ins-HSP17-- | NPTII | 4 |
| | | UBI | 2x ** | down | | |
| | | | CAS9 + gRNA | | | |
| PHP98407 | | | UBI:ZM- | HSP17-- | HRA | 0 |
| | | | GRF5 | down | | |
| PHP98310 | NOS | | UBI:ZM- | HSP17-- | HRA | 0 |
| | | | GRF5 | down | | |
| PHP98248 | NOS | UBI | UBI:ZM- | HSP17-- | HRA | 1 |
| | | | GRF5 | down | | |
| PHP98283 | NOS | 3xENH- | UBI:ZM- | HSP17-- | HRA | 2 |
| | | UBI | GRF5 | down | | |
| PHP98393 | 3xENH- | 3xENH- | Excision- | HSP17-- | HRA | 1 |
| | UBI T2A | UBI | activate | down | | |
| | | | GRF5 | | | |
| PHP98392 | NOS | 3xENH- | UBI:GRF5 | HSP17-- | HRA | 2 |
| | | UBI | | down | | |
| PHP98567 | 3xEME- | 3xEME- | | HSP17-- | HRA | 2 |
| | UBI | UBI | | down | | |
| PHP97452 | 3xEME- | UBI | | HSP17-- | HRA | 1 |
| | UBI | | | down | | |
| PHP97456 | 3xEME- | UBI adh | | HSP17-- | HRA | 2 |
| | UBI | | | down | | |
| PHP97977 | 3xEME- | UBI TR | | HSP17-- | HRA | 1 |
| | UBI | | | down | | |
| PHP97453 | UBI Adh | 3xEME- | | HSP17-- | HRA | 2 |
| | | UBI | | down | | |
| PHP97449 | UBI TR | 3xEME- | | HSP17-- | HRA | 2 |
| | | UBI | | down | | |
| PHP98680 | 3xENH- | 3xENH- | Excision- | INS- | HRA | 2 |
| | UBI T2A | UBI T2A | activated | HSP17-- | | |
| | | | MIR156B | down | | |
| PHP98681 | UBI- | 3 XENH- | Excision- | INS- | HRA | 2 |
| | NOS- | UBI-BBM | activated | HSP17-- | | |
| | WUS | | MIR156B | down | | |
| PHP98328 | BDCAB2- | UBI | | HSP17-- | HRA | 1 |
| | 2xEME | | | down | | |
| PHP98329 | ZMGOS2- | UBI | | HSP17-- | HRA | 1 |
| | 2xEME | | | down | | |
| PHP98327 | BDCAB2- | 3xENH- | | HSP17-- | HRA | 2 |
| | 2xEME | UBI | | down | | |
| PHP98370 | ZM | 3xENH- | | HSP17-- | HRA | 2 |
| | GOS2- | UBI | | down | | |
| | 2xEME | | | | | |
| PHP98564 | PLTP | UBI | | HSP17-- | HRA | 2 |
| | | | | down | | |
| PHP98565 | PLTP | 3xENH- | | HSP17-- | HRA | 2 |
| | | UBI | | down | | |
| PHP96037 | NOS | 3xENH- | | HSP17-- | HRA | 3 |
| | | UBI | | down | | |
| PHP97447 | UBI | 3 XEME- | | HSP17-- | HRA | 1 |
| | | UBI | | UP | | |
| PHP97881 | UBI | 3 XEME- | | HSP17-- | HRA | 3 |
| | | UBI | | down | | |
| PHP97417 | UBI | 3xENH- | | HSP17-- | HRA | 3 |
| | | UBI | | down | | |
| PHP96037 | NOS | 3xENH- | | HSP17-- | HRA | 3 |
| | | UBI | | down | | |
| PHP81858 | NOS | UBI | | HSP17-- | HRA | 2 |
| | | | | down | | |
| PHP99676 | NOS | GRP1 | | HSP17-- | HRA | 0 |
| | | | | down | | |
| PHP99677 | NOS | RPL1 | | HSP17-- | HRA | 1 |
| | | | | down | | |
| PHP99678 | NOS | DNAJ | | HSP17-- | HRA | 0 |
| | | | | down | | |
| PHP99679 | NOS | SAMDC2 | | HSP17-- | HRA | 0 |
| | | | | down | | |
| PHP99680 | NOS | PPISO | | HSP17-- | HRA | 0 |
| | | | | down | | |
| PHP99569 | NOS | EF1A | | HSP17-- | HRA | 0 |
| | | | | down | | |
| PHP96037 | NOS | 3xENH- | | HSP17-- | HRA | 3 |
| | | UBI | | down | | |
| PHP100011 | NOS | 3xENH- | | HSP17-- | HRA | 1 |
| | | RPL1 | | down | | |
| PHP100012 | NOS | 3xENH- | | HSP17-- | HRA | 0 |
| | | DNAJ | | down | | |
| PHP100013 | NOS | 3xENH- | | HSP17-- | HRA | 1 |
| | | SAMDC2 | | down | | |
| PHP100056 | NOS | 3xENH- | | HSP17-- | HRA | 1 |
| | | ZMPPISO | | down | | |
| PHP100057 | NOS | 3xENH- | | HSP17-- | HRA | 1 |
| | | ZMEF1A | | down | | |
| PHP100158 | NOS | 3xENH- | | HSP17-- | HRA | 1 |
| | | GRP1 | | down | | |
| PHP98229 | NOS | 3xENH- | | HSP17-- | HRA | 3 |
| | | UBI:BBM | | down | | |
| PHP100159 | NOS | 3xENH- | UBI:CYCD2 | HSP17-- | HRA | 2 |
| | | UBI | | down | | |
| PHP100160 | NOS | 3xENH- | UBI:REPA | HSP17-- | HRA | 2 |
| | | UBI | | down | | |
| PHP100229 | ATPSYN | 3xENH- | | HSP17-- | HRA | 2 |
| | | UBI | | down | | |
| PHP99971 | EIF4A | 3xENH- | | HSP17-- | HRA | 2 |
| | | UBI | | down | | |
| PHP99809 | PABP | 3xENH- | | HSP17-- | HRA | 2 |
| | | UBI | | down | | |
| PHP99810 | VDAC1A | 3xENH- | | HSP17-- | HRA | 2 |
| | | UBI | | down | | |
| PHP99716 | LEA14 | 3xENH- | | HSP17-- | HRA | 2 |
| | | UBI | | down | | |

*Single Cross-Talk Blocker sequence upstream (5′) of the HSP17 promoter
**Two Cross-Talk Blocker sequences, one upstream and one downstream flanking the HSP17::CRE expression cassette
***CRE-mediated excision of Cas9 and gRNA

### B. Configurations of WUS/BBM Expression Cassettes

[0226] A comparison of the following is performed:

### i) PHP35648 (SEQ ID NO:1):UBI::CYAN+RAB17::CRE+NOS::WUS2+UBI::ODP2

[0227] The Ubiquitin (UBI) promoter from maize is a strong constitutive promoter, while the nopaline synthase (NOS) promoter derived from Agrobacterium is a constitutive promoter which in maize drives expression at approximately a 20% level compared to UBI. However, strong expression cassettes upstream of NOS::WUS (such as UBI::CYAN and RAB17::CRE) have the potential to down-regulate WUS expression, compared to a T-DNA where the strong upstream expression cassettes have been removed.

[0228] When maize seedling-derived leaf segments are transformed using Agrobacterium strain LBA4404 TD THY- and a T-DNA-containing plasmid with UBI::CYAN+RAB17::CRE+NOS::WUS2+UBI::ODP2 (PHP35648), expression of WUS2 and ODP2 is observed to slow initiation and growth of callus, which becomes increasingly embryogenic over time. Using this construct, 10-12 weeks of callus growth is required before RAB17::CRE-mediated excision and subsequent somatic embryo maturation and T0 plant regeneration (Assay Score=1).

### ii) PHP81858 (SEQ ID NO:8): NOS::WUS2+UBI::ODP2+RAB17::CRE

[0229] When maize seedling-derived leaf segments were transformed using Agrobacterium strain LBA4404 TD THY- and PHP81858, in which the upstream strong expression cassettes were not present, the combination of NOS::WUS2+UBI::ODP2 resulted in a moderate rate of embryogenic callus growth, with a higher percentage of leaf segments/pieces producing positive responses. Using this construct, 6-8 weeks of callus growth was required before RAB17::CRE-mediated excision and subsequent somatic embryo maturation and T0 plant regeneration (Assay

iii) PHP95385 (SEQ ID NO:47): ACTIN::WUS+UBI::ODP2+HSP::CRE

[0230] When maize seedling-derived leaf segments were transformed using Agrobacterium strain LBA4404 TD THY- and PHP95385 containing ACTIN PRO::WUS2+UBI PRO::ODP2+HSP17 PRO::CRE resulted in a moderate rate of embryogenic callus growth, with a higher percentage of leaf segments/pieces producing positive responses. Using this construct, 6-8 weeks of callus growth was required before CRE-mediated excision and subsequent somatic embryo maturation and T0 plant regeneration (Assay Score=2).

### iv) PHP81856 (SEQ ID NO:6): AXIG1::WUS2+PLTP::ODP2+RAB17::CRE

[0231] In contrast to constitutive promoters NOS and UBI, the maize AXIG1 promoter is induced by the presence of auxin in the medium and is generally about 20% as strong as the maize UBI promoter (in the presence of our standard concentrations of 2,4-D). The PLTP promoter appeared to be strong relative to UBI but expression of the PLTP promoter is not as constitutive as the UBI promoter. When PHP81856, AXIG1::WUS2+PLTP::ODP2, was used for Agrobacterium-mediated transformation, in immature embryos and in leaf segments similar levels of transient ZS-GREEN expression were observed indicating that T-DNA delivery occurred at an equivalent extent in both explants. However, the subsequent growth response from these two explants was different. In immature embryos, expression of AXIG1::WUS2+PLTP::ODP2 resulted in rapid somatic embryo formation. In contrast, when AXIG1::WUS2+PLTP::ODP2 was used in leaf segments, no growth of transgenic (green fluorescent) callus or somatic embryos occurred and no T0 plants were recovered because expression of WUS2 and ODP2 did not continue for a long enough duration (Assay Score=0).

### v) PHP96037 (SEQ ID NO:66): NOS::WUS2+3×ENH::UBI::ODP2

[0232] When maize seedling-derived leaf segments were transformed using Agrobacterium strain LBA4404 TD THY- and PHP96037, containing NOS::WUS2+3×ENH::UBI PRO::UBI::ODP2+HSP17 PRO::CRE, somatic embryos formed rapidly, emerging directly from the leaf segments with no intervening callus stage. Direct somatic embryo formation was observed between 10-14 days after Agrobacterium infection. Thus, the strength and longer duration of WUS2 and ODP2 expression provided by PHP96037 was sufficient to stimulate rapid somatic embryo formation. Using this construct, only 4-6 weeks of callus growth was required before CRE-mediated excision and subsequent somatic embryo maturation and T0 plant regeneration (Assay Score=4).

C. Testing New Promoters Driving Expression of WUS2 and/or ODP2

[0233] The results from experiments such as those summarized in Table 18 clearly demonstrated that strong constitutive promoters such as the maize UBI1ZM PRO (or enhanced versions of UBI1ZM PRO) driving expression of ODP2 in conjunction with various additional helpers, excision components, and selectable markers effectively stimulated rapid somatic embryo formation and T0 plant regeneration, while a range of constitutive promoters such as GOS2 or NOS (both around 15-20% as strong as UBI1ZM) up to the UBI PRO itself, and including the ACTIN PRO, the 8×DR5-35S PRO, and the FT-MEM1-NOS PRO when used for driving WUS2 expression in conjunction with various additional helpers, excision components, and selectable markers were effective to stimulate rapid somatic embryo formation and T0 plant regeneration. New promoter candidates were identified to be used in conjunction with various additional helpers, excision components, and selectable markers, resulting in the lists shown in Tables 198 and 2019.

[0234] To test these potential promoter candidates, T-DNAs with the following configurations are constructed:

$$R B + P R O - 1 \text{::} W U S 1 + 3 x E N H \text{::} U B I 1 Z M \text{::} O D P 2 + U B I \text{::} Z S - GREEN + U B I \text{::} N P T I I + L B ; \qquad Configuration 1.$$

$$R B + N O S \text{::} W U S 1 + 3 x E N H \text{::} P R O - 2 \text{::} O D P 2 + U B I \text{::} Z S - GREEN + U B I \text{::} N P T I I + L B ; and \qquad Configuration 2.$$

$$R B + N O S \text{::} W U S 1 + P R O - 2 \text{::} O D P 2 + U B I \text{::} Z S - GREEN + U B I \text{::} N P T I I + L B . \qquad Configuration 3.$$

[0235] Based on the experimental observations herein, the promoters in Table 19 are expected to produce positive results (Assay Scores of “2-4”) when used in the “PRO-1” position in Configuration 1 above to drive expression of WUS2. Promoters indicated in Table 19 by a single asterisk are expected to produce rapid embryogenic growth (scores of 2-4) when substituted for PRO-2 in Configuration 2, and promoters indicated by a double asterisk are expected to produce rapid embryo formation in Configurations 2 or 3. Likewise, the six new promoters listed in Table 20 are expected to perform equal to or better than UBI1ZM when substituted in Configurations 2 and 3 (driving expression of ODP2).

TABLE 19

| SEQ | Promoter | |
|---|---|---|
| ID NO: | Alias | Gene Description |
| 94 | ATPeF1D ** | ATP synthase, delta/epsilon chain |
| 95 | EIF4a ** | EIF4a translation initiation factor |
| 96 | RRM ** | RNA Recognition Motif gene |
| 97 | EF1A * | Translation elongation factor EF1A/initiation |
| 98 | RPL10A * | Ribosomal protein L10A |
| 99 | AXP2 ** | Ascorbate peroxidase2 |
| 100 | VDAC1a ** | Voltage-dependent anion channella |
| 101 | EF1A-Tu * | Elongation factor Tu GTP binding domain |
| | | protein |
| 102 | LEA-14 ** | Late embryogenesis abundant protein, LEA-14 |
| 103 | RP-S7 * | Ribosomal protein S7 |
| 104 | RP-L5 * | Ribosomal protein L5 |
| 105 | ENO2 * | Enolase2 |
| 106 | RP-L28 * | Ribosomal protein L28 |
| 107 | OS-ACTIN ** | Actin |
| 108 | ZM-UBI2 ** | Ubiquitin2 |
| 109 | UBIIZM * | Ubiquitin1 |

* Promoters being tested for WUS (Configuration 1) and/or ODP2 (Configuration 2)
** Promoters being tested for ODP2 in Configurations 2 and 3 above.

TABLE 20

| SEQ | | |
|---|---|---|
| ID NO: | Gene_Alias | Description |
| 109 | UBIIZM | Polyubiquitin containing 7 ubiquitin monomers |
| 110 | GRP1 | glycine-rich protein1 |
| 111 | RP-L1 | Ribosomal protein L1, 3-layer alpha/beta- |
| | | sandwich |
| 112 | DNAJ2 | chaperone DNA J2 5NOC3 |
| 113 | SAMDC2 | S-adenosyl methionine decarboxylase2 |
| 114 | CPPIase | Cyclophilin type peptidyl-prolyl cis-trans |
| | | isomerase |

### Example 8: Seedling Pre-Treatment with Ancymidol Improved Transformation

A. Seedling Pre-Treatment with Ancymidol Improved Agrobacterium-Mediated Random Transformation

[0236] Methods for Agrobacterium-mediated transformation of maize leaf segments/tissue were followed as outlined in Examples 4 and 5. Specifically, seed of Pioneer inbred PHH5E was surface sterilized and sown on germination medium containing either no ancymidol (0 mg/l ancymidaol=control medium 900 medium), 2 mg/l ancymidol (70AE medium), or 4 mg/l ancymidol. The germination and growth period under 120 μmol m-2 s-1 light intensity using an 18-hour photoperiod at 28° C. was 14 days for seedlings used in all replicate experiments and treatments.

[0237] Seedling leaf whorl tissue was isolated and mechanically processed to produce 0.5-3 mm leaf segments for transformation as described, using Agrobacterium strain LBA4404 TD THY-harboring PHP71539 and PHP97334 (SEQ ID NO:4 and SEQ ID NO:77).

[0238] Table 21 shows that growing seedlings on ancymidol improved subsequent leaf transformation. For the third experiment, the control treatment was not performed, but the general trend in these experiments is nonetheless clear; seedlings grown on both levels of ancymidol produced higher leaf transformation frequencies. Looking at the average results summarized at the bottom of Table 21, seedlings grown on either 2 mg/l or 4 mg/l ancymidol showed higher Agrobacterium-mediated T-DNA than the control (with delivery scores of 4 for both ancymidol treatments compared to the control value of 3). Ancymidol-grown seedlings also resulted in higher overall rates of early somatic embryo formation for both levels of the hormone, with leaf segments from 2 mg/l and 4 mg/l ancymidol treatments having more rapidly forming somatic embryos, higher numbers of somatic embryos per leaf segment, and an overall higher percentage of leaf segments producing somatic embryos relative to the control treatment.

[0239] The higher T-DNA delivery and a more robust somatic embryo formation observed in the ancymidol treatments were reflected in higher transformation frequencies (Txn %, calculated based on the number of transgenic T0 plants per starting seedling) from seedlings grown on ancymidol, with seedlings grown on 2 mg/l or 4 mg/l ancymidol producing an average T0 Txn % that was 3-fold or 2.5-fold higher than the control treatment, respectively. Despite greater T-DNA delivery and T0 Txn % for ancymidol-grown seedlings, the transgenic T0 plants produced in all three treatments showed similar single-copy T-DNA frequencies as measured by qPCR for the transgenes within the T-DNA, demonstrating that the increased numbers of transgenic TO plants produced from ancymidol-grown seedlings was not accompanied by an increase in integrated T-DNA copy number.

TABLE 21

| Exp. | Ancymidol | No. | T-DNA | No. T0 | | # SC | |
|---|---|---|---|---|---|---|---|
| No. | Conc. | Seedlings | Delivery* | Plants | Txn %** | T0s*** | SC % |
| 1 | 2 mg/l | 33 | 4 | 118 | 358% | 51 | 43% |
| | 4 mg/l | 33 | 4 | 83 | 252% | 45 | 54% |
| | 0 mg/l | 33 | 3 | 36 | 109% | 19 | 53% |
| 2 | 2 mg/l | 32 | 4 | 97 | 303% | 67 | 69% |
| | 4 mg/l | 32 | 4 | 81 | 253% | 51 | 63% |
| | 0 mg/l | 32 | 3 | 31 | 97% | 19 | 61% |
| 3 | 2 mg/l | 28 | 4 | 66 | 236% | 27 | 41% |
| | 4 mg/l | 32 | 4 | 75 | 234% | 51 | 68% |
| | 0 mg/l | 0 | n/a | n/a | n/a | n/a | n/a |
| Totals | 2 mg/l | 93 | 4 | 281 | 302% | 145 | 52% |
| | 4 mg/l | 97 | 4 | 239 | 246% | 147 | 62% |
| | 0 mg/l | 65 | 3 | 67 | 103% | 38 | 57% |

*Txn % = Transformation Frequency (%)
**Relative T-DNA delivery as assessed by transient ZS-GREEN expression (0 = None to 4 = almost all embryos expressing)
**SC = single copy of the integrated T-DNA

[0240] Both 2% and 1% ancymidol pre-treatment during seed germination and seedling growth were also tested for the cereals (using medium 900 plus 1 mg/l or 2 mg/l ancymidol). For Japonica rice (Oryza sativa var Kitaake), teff (Eragrostis tef), and pearl millet (Pennisetum glaucum), seedling growth on medium 900 without additional ancymidol resulted in very thin elongated seedlings with little biomass due to the thin leaf-whorl region above the mesocotyl. When seed from all three species were germinated and grown on 900 medium plus 2 mg/l ancymidol, the seedlings only grew to a height of 1-2 cm after 14 days and although the leaf-whorl region was thicker (due to wider leaves), processing these small seedlings to produce leaf segments/pieces followed by transformation was more difficult.

[0241] In contrast, for all three cereal crops, seed germination and seedling growth on 900 plus 1 mg/l ancymidol produced an intermediate growth rate, with thicker stems and wider leaves than the control (with no ancymidol). These whorl segments were readily processed in a food processor to produce appropriately sized leaf fragments/segments, showed good Agrobacterium-mediated T-DNA delivery with abundant transient ZS-GREEN expression, and produced the highest number of transgenic T0 plantlets (compared to the other two treatments). Thus, compared to maize and sorghum in which 2 mg/l ancymidol pre-treatment during seedling growth is optimal for leaf transformation, a lower concentration of 1 mg/l ancymidol produced optimal results in rice, tef, and pearl millet.

B. Seedling Pre-Treatment with Ancymidol Improved Agrobacterium-Mediated Site-Specific Integration

[0242] A pre-integrated target site (target locus) in the maize inbred HC69 genome was used for site-specific integration, as described in U.S. Pat. Nos. 6,187,994, 6,262,341, 6,330,545, 6,331,661, and 8,586,361, each of which is herein incorporated by reference in its entirety. In this example, target site 45 located on chromosome 1 at genetic position 53.66 cM within the PHH5E inbred genome was used and is comprised of the integrated components loxP+UBI1ZM PRO::UBI1ZM 5′UTR::UBI1ZM INTRON1::FRT1::NPTII::PINII TERM+FRT6 which had been previously introduced via Cas9-mediated homologous recombination to create this SSI landing pad. Seed was surface sterilized, germinated on 90AE medium (900 medium+2 mg/l ancymidol), and leaf segments were prepared from 14 day-old seedlings using a food processor and 100 ml of Agrobacterium suspension. The Agrobacterium strain LBA4404 TD THY-contained the helper plasmid PHP71539 in addition to the T-DNA-containing plasmid PHP90842 (SEQ ID NO:14; T-DNA with RB+UBI::FLP+FRT1::PMI+ACTIN::WUS+UBI::ODP2+HSP17.7::CRE+LOXP+SB-UBI::DsRED2+FRT6+LB) and the second strain also contained PHP93925 (SEQ ID NO:26; T-DNA with RB+UBI::WUS+3×ENH::UBI::ODP2+SB-UBI::ZS-GREEN+HRA+LB) at a ratio of 9:1 (PHP90842: PHP93925). The OD of both constructs was 0.4 at 550 nm. Surfactant solution (Break-Thru S 233) was diluted by adding sterile ddH₂O to a produce a stock 10% concentration, and then adding the 10% surfactant solution to the Agrobacterium suspension to give a final concentration 0.02% (v/v).

[0243] Leaf tissue was processed by first dissecting out the 3 cm of whorl tissue immediately above the mesocotyl and placing it in a food processor along with 100 ml of the mixed Agrobacterium suspension in 700J medium plus acetosyringone. Short 1-2 second pulses were administered until the leaf segments/fragments were approximately 2-3 mm in size, and then the mixture (leaf pieces/segments and Agrobacterium mix suspended in infection medium) was allowed to sit for 15 minutes in the blender. After 15 minutes of infection, the leaf segments/tissue was separated from the liquid by pouring through a stainless-steel sieve, and then the leaf segments/tissue was transferred to glass filter paper supports resting within 60×25 mm plates. The leaf tissue pieces/segments resting on the dry filer papers were allowed to stand for few minutes and then the filter paper (supporting the leaf segments/pieces) was transferred onto co-cultivation medium. The tissue pieces/segments were then spread evenly across the filter using a sterile inoculation loop. Co-cultivation on 710N medium was done at 21° C. in the dark for 2 days, at which point the leaf segments/pieces were transferred to resting medium 605B (using forceps to lift and transfer the entire filter) and incubated at 28° C. in the dark for 14 days. At the end of the resting period, the filters were moved onto selection medium (6050=605J medium with sucrose removed and 15 g/l mannose added) and incubated at 28° C. in the dark, with transfers to fresh 6050 medium every two weeks. After 6 weeks on selection, the plates with filters and leaf segments/tissue were transferred to a 45° C./70% RH incubator for 2 hours, allowing this heat shock treatment to activate the HSP17.7 PRO::CRE expression cassette. After 2 hours in the heat treatment, plates were transferred back into the hood and allowed to cool to room temperature. The segments/tissue was then picked off the filters using forceps and transferred to maturation medium (13329B) for 18 days at 28° C. in the dark, and the plates were then moved into a culture room set at 26° C. with dim light. Healthy shoots were then selected and transferred to 272M (272X with 10 mg/l meropenem) rooting medium for an additional 2-3 weeks at 26° C. with light, before being transferred to the greenhouse.

[0244] As shown in Table 22, using the above method resulted in successful Site-Specific Integration. Starting with 30 seedlings to prepare the target tissue/segments for Agrobacterium-mediated transformation, 127 leaf pieces/segments responded by producing somatic embryos. From this initial growth response, 44 embryogenic calli continued to grow on mannose-containing selection medium. From this number of calli, seven regenerated into T0 plants, of which site-specific integration was confirmed in 4 plants by molecular analysis and one of these 4 events had perfectly recombined junctions at both ends of the double-recombination product. This event, labeled as RMCE in Table 22, also contained no T-DNA sequences including no indications of FLP, WUS2, ODP2 or Agrobacterium backbone.

TABLE 22

| | Number of: | | | | | |
|---|---|---|---|---|---|---|
| | Leaf | | | | | |
| | segments/pieces | Putative | Events | RMCE | SSI | |
| Seedlings | responded | events | regenerated | events | events | Escapes |
| 30 | 127 | 44 | 7 | 1 | 3 | 3 |

[0245] Any one of the compounds listed in Table 23 in appropriate concentrations for pre-treatment of seedlings produces leaf segments that exhibit an improvement in frequencies of T-DNA delivery, somatic embryo response (more rapid growth and higher numbers), production of T0 plants, and single-copy integration frequencies.

TABLE 23

| Category | Chemical or Physical Treatment |
|---|---|
| Auxins | 2,4-D, dicamba, 2,4,5-T, 1-Naphthaleneacetic acid (NAA), picloram, |
| | indole-3-acetic acid, 4-chloroindole-3-acetic acid, phenylacetic acid, |
| | indole-3-butyric acid, and indole-3-propionic acid |
| Anti-oxidants | dithiolthreitol (DTT), cysteine, glutathione |
| Gibberellic Acid | ancymidol, paclobutrazol, uniconazole, chlormequat chloride, mepiquat, |
| Inhibitors | AMO-1618 [(2′-isopropyl-4′-(trimethylammoniumchloride)-5′- |
| | methylphenylpiperidinecarboxylate)], clorphonium-Cl, tetcylacis, |
| | flurprimidol, inabenfide, pro-hexadione, trinexapac-ethyl, daminozide, |
| | exo-16,17-acetate, malic hydrazide, phoshor D, alar, chlorocholine |
| | chloride, cycocel, the fungicides tebuconazole and metconazole, |
| | trinexapac-ethyl, prohexadione-calcium, exo-16,17-dihydro-GA5-13- |
| | acetate |
| Inhibit Abscisic | norflurazon, fluridone, diflufenican, abamine, nordihydroguaiaretic acid |
| Acid Biosynthesis | (NDGA) |
| Abscisic Acid | AA1 [1-[(4-benzylpiperazin-1-yl)methyl]-2-sulfanylidene- |
| Antagonist | 1H,2H,5H,6H,7H,8H-[1,3,4]thiadiazolo[3,2-a][1,3]diazepin-5-one], AS6 |
| | [3′-hexylsulfanyl-ABA], DFPM([5-(3,4-Dichlorophenyl)furan-2-yl]- |
| | piperidin-1-ylmethanethione), RK460 |
| Low Abscisic Acid | 10⁻⁶ to 10⁻⁷ M |
| Concentrations | |
| Abscisic Acid | pyrobactin |
| agonist | |
| Cytokinin | BAP [6-benylamino purine], BA [benzyladenine], kinetin, TDZ |
| | [thidiazuron], trans-zeatin |
| Anti-cytokinin | S-4893 [a 4-phenylquinazoline derivative], 4-phenylquinazoline, 6-(2,5- |
| | Dihydroxybenzylamino)purine (LGR-991), 2-hydroxy-3-Methyl- |
| | benzyladenine |
| Cyclin-Dependent | caffeine |
| Kinase (CDK) | |
| inhibitor | |
| Auxin agonists | quinclorac, RubNeddins (RN1, RN2, RN3, and RN4) |
| Auxin antagonists | p-Chlorophenoxy isobutylic (PCIB), tert-butoxycarbonylaminohexyl- |
| | IAA (BH-Indole Acetic Acid = BH-IAA), α-(phenylethyl-2-oxo)-IAA |
| | (PEO-IAA), α-(2,4-dimethylphenylethyl-2-oxo)-IAA (auxinole) |
| Auxin/Cytokinin- | fipexide |
| like | |
| Methylation | 5-azacytidine, Decitabine, RG108 [N-Phthalyl-L-tryptophan], |
| inhibitors | zebularine, thioguanine, 2′-deoxy-5-fluoreocytidine, CM-272 (6- |
| | methoxy-2-(5-methyl-2-furyl)-N-(1-methyl-4-piperidyl)- |
| | 7-(3-pyrrolidin-1-ylpropoxy)quinolin-4-amine), CM-579 (6-methoxy-2- |
| | (5-methyl-2-furyl)-N-[(1-methyl-4-piperidyl)methyl]-7-(3-pyrrolidin-1- |
| | ylpropoxy)quinolin-4-amine), SGI-1027 [N-[4-[(2-Amino-6-methyl-4- |
| | pyrimidinyl)amino]phenyl]-4-(4-quinolinylamino)benzamide], gamma- |
| | oryzanol, and (−)-epigallocatechin gallate (ECGC), β-Thujaplicin, |
| | procainamide |
| Histone deacetylase | ~70 candidates in literature (Cancer research), TSA, valproic acid, |
| (HDAC) Inhibitors | tacedinaline, cambinol |
| Pan-HDAC | trichostain A (TSA), verinostat, panobinostat, belinostat |
| Inhibitors | |
| HDAC3 Inhibitor | RGFP-966 [(E)-N-(2-amino-4-fluorophenyl)-3-(1-cinnamyl-1H-pyrazol- |
| | 4-yl)acrylamide] |
| HDCA6 Inhibitor | tubastatin A |
| HDAC8 Inhibitor | PCI-34051 [N-Hydroxy-1-[(4-methoxyphenyl)methyl]-1H-indole-6- |
| | carboxamidel |
| Sugar composition | Sucrose, Maltose |
| Metals | Copper, Zinc, Manganese [MnSO4] |
| Amino | proline, asparagine, methionine, glutamine |
| acids/specific ions | |
| Heat | 45° C. for 2-3 hours, 37° C. overnight |
| Cold shock | Below standard incubation temperature |
| Ethylene inhibitor | silver nitrate, 2-aminoethoxyvinyl glycine (AVG), silver ions (Ag), and |
| | the gaseous compound 1-methylcyclopropene (1-MCP) |
| Ethylene | norbornadiene |
| competitive inhibitor | |
| Ethylene | ethylene absorption bags |
| sequestration | |
| light treatments | Valoya and Razor3 LED light arrays |
| 70° F. day/65° F. night | regular Greenhouse temp is 70° F.-75° F. |
| Polycomb | EPZ005687 [1-cyclopentyl-N-[(4,6-dimethyl-2-oxo-1H-pyridin-3- |
| Repressive Complex | yl)methyl]-6-[4-(morpholin-4-ylmethyl)phenyl]indazole-4-carboxamide], |
| 2 (PRC2) inhibitors | UNC1999 [N-[(6-methyl-2-oxo-4-propyl-1H-pyridin-3-yl)methyl]-1- |
| | propan-2-yl-6-[6-(4-propan-2-ylpiperazin-1-yl)pyridin-3-yl]indazole-4- |
| | carboxamide], PF-06726304 [C₂₂H₂₁Cl₂N₃O₃], Lirametostat, |
| | Tazemetostat, EPZ011989 (C₃₅H₅₁N₅O₄•HCl), CPI-169 (C₂₇H₃₆N₄O₅S), |
| | and JQ-EZ-05 (C₃₀H₃₈N₈O₂) |
| Jasmonates | Jasmonic acid, Methyl-jasmonate |
| Safeners | naphthalic anhydride, salicylic acid, fenchlorazole, cloquintocet-mexyl, |
| | mefenpyr diethyl |
| Kinase inhibitors | N-[(2R)-2,3 dihydroxypropoxy]-3,4-difluoro-2- (2-fluoro-4-iodoanilino) |
| | benzamide, anthra (1,9-cd) pyrazol-6 (2H)-one: 4-(4-Fluoro phenyl)-2- |
| | (4-methylsulfinylphenyl)-5-(4-pyridyl) 1H imidazole, N-benzyl-2- |
| | (pyrimidin-4-ylamino)-1,3 thiazole-4-carboxamide |
| reactive oxygen | Tiron, dimethylthiourea (DMTU), diphenyleneiodonium (DPI) |
| species (ROS) | |
| scavengers | |

### Example 9: Other Gibberellic Acid Inhibitor Pre-Treatment Prior to Agrobacterium Infection Improved Transformation

[0246] Maize leaf segments/tissue were pre-treated with one of three other gibberellic acid inhibitors (GAI) listed in Table 23, paclobutrazol (PBZ), chlormequat chloride, or daminozide prior to Agrobacterium infection to determine their effects on transformation success.

[0247] Methods for Agrobacterium-mediated transformation of maize leaf segments/tissue were followed as outlined in Examples 4 and 5. Specifically, seed of Pioneer inbred ED85E was surface sterilized and sown on 900 (PBZ) or 90AO (chlormequat chloride and daminozide) germination medium containing either:
[0248] a) 0 mg/1, 2 mg/l, 4 mg/l, or 6 mg/l of PBZ;
[0249] b) 0 mg/l, 250 mg/l, or 500 mg/l of chlormequat chloride; or
[0250] c) 0 mg/l, 50 mg/1, 100 mg/l, or 150 mg/l of daminozide.
   Each of the three GA inhibitors were test individually. 90AO medium contained 900 medium+1 mg/l ancymidol. The germination and growth period under 120 μmol m-2 s-1 light intensity using an 18-hour photoperiod at 28° C. was 13 to 16 days for seedlings used in all replicate experiments and treatments.

[0251] Seedling leaf whorl tissue was isolated and mechanically processed to produce 0.5-3 mm leaf segments for transformation as described, using Agrobacterium strain LBA4404 TD THY-harboring PHP71539 (SEQ ID NO:4) plus either PHP101093 (SEQ ID NO:351) for PBZ experiments or PHP97334 (SEQ ID NO:77) for chlormequat chloride and daminozide experiments.

[0252] Pre-treating seedlings with chlormequat chloride had a positive impact on maize leaf transformation (Table 24). Using 250 mg/l chlormequat chloride for pretreatment of ED85E seedlings improved T0 transformation frequency (Txn %) by 1.4-fold relative to the control with no GA inhibitor in the germination medium.

[0253] For paclobutrazol and daminozide, where no clear trend was observed in the data, testing of higher concentration ranges for paclobutrazol (10, 20, 50 mg/l) and lower concentration for daminozide (20, 10, 3, 1, and 0.3 mg/l) is observed to increase T0 transformation frequencies relative to T0 transformation frequencies in the control treatment where just the basal germination medium is used to grow seedlings. Table 24 shows the results of the GA inhibitor pre-treatment experiments. PTRT=pre-treatment, TRT=treatment.

TABLE 24

| | | | | T-DNA | # culture | # culture | | |
|---|---|---|---|---|---|---|---|---|
| Seedling | PTRT conc | # | | score | response | response | # T0 | TXN |
| PTRT | (mg/l) | Seedling | TRT | (0-5) | (2 wk) | (4 wk) | plants | % |
| PBZ | 0 | 24 | 1 | 4 | 252 | 281 | 88 | 367 |
| PBZ | 2 | 24 | 2 | 3.5 | 271 | 224 | 60 | 250 |
| PBZ | 4 | 24 | 3 | 3.5 | 212 | 156 | 40 | 167 |
| PBZ | 6 | 24 | 4 | 3.5 | 151 | 99 | 29 | 121 |
| Chlormequat | 0 | 30 | 1 | 4 | 283 | 315 | 103 | 343 |
| chloride | | | | | | | | |
| Chlormequat | 250 | 30 | 2 | 4.5 | 265 | 318 | 145 | 483 |
| chloride | | | | | | | | |
| Chlormequat | 500 | 30 | 3 | 4.5 | 302 | 339 | 108 | 360 |
| chloride | | | | | | | | |
| Daminozide | 0 | 20 | 1 | 4 | 165 | 200 | 109 | 545 |
| Daminozide | 50 | 20 | 2 | 4 | 87 | 99 | 71 | 355 |
| Daminozide | 100 | 20 | 3 | 4 | 103 | 103 | 41 | 205 |
| Daminozide | 150 | 20 | 4 | 4 | 70 | 95 | 53 | 265 |

[0254] When compared to control seedlings, seedlings pre-treated with a GAI, including but not limited to GAIs listed in Table 23 (ancymidol, paclobutrazol, uniconazole, chlormequat chloride, mepiquat, AMO-1618 [(2′-isopropyl-4′-(trimethylammoniumchloride)-5′-methylphenylpiperidinecarboxylate)], clorphonium-Cl, tetcylacis, flurprimidol, inabenfide, pro-hexadione, trinexapac-ethyl, daminozide, exo-16,17-acetate, malic hydrazide, phoshor D, alar, chlorocholine chloride, cycocel, the fungicides tebuconazole and metconazole, trinexapac-ethyl, prohexadione-calcium, exo-16,17-dihydro-GA5-13-acetate), are observed to produce leaf segments that exhibit an improvement in frequencies of T-DNA delivery, somatic embryo response (more rapid growth and higher numbers), production of T0 plants, and single-copy integration frequencies.

### Example 10: Cytokinin Pre-Treatment Prior to Agrobacterium Infection Improved Transformation

[0255] Maize leaf segments/tissue were pre-treated with one of three cytokinins, thidiazuron (TDZ), 6-benylamino purine (BAP), or trans-zeatin prior to Agrobacterium infection to determine their effects on transformation success.

[0256] Methods for Agrobacterium-mediated transformation of maize leaf segments/tissue were followed as outlined in Examples 4 and 5. Specifically, seed of Pioneer inbred ED85E was surface sterilized and sown on 90AE germination medium containing either:
[0257] a) 0 mg/l, 0.1 mg/l, or 0.5 mg/l of TDZ;
[0258] b) 0 mg/l, 1 mg/l, or 5 mg/l of BAP; or
[0259] c) 0 mg/l, 1 mg/l, or 3 mg/l of trans-zeatin.
   Each of the three GA inhibitors were test individually. 90AE medium contained 90O medium+2 mg/l ancymidol. The germination and growth period under 120 μmol m-2 s-1 light intensity using an 18-hour photoperiod at 28° C. was 24 hours for seedlings used in all replicate experiments and treatments.

[0260] Seedling leaf whorl tissue was isolated and mechanically processed to produce 0.5-3 mm leaf segments for transformation as described, using Agrobacterium strain LBA4404 TD THY-harboring PHP71539 (SEQ ID NO:4) plus PHP97334 (SEQ ID NO:77).

[0261] Pre-treating seedlings with BAP or trans-zeatin had a positive impact on maize leaf transformation (Table 25). Results show that using either 1 or 5 mg/l BAP increased T0 Txn % by 1.4-fold and 1.8-fold (respectively) relative to the control seedling germination medium with no cytokinin. Using either 1 or 3 mg/l trans-zeatin also increased T0 Txn % by 1.2-fold and 1.5-fold (respectively) relative to the control seedling germination medium with no cytokinin.

[0262] The use of TDZ in seedling pre-treatments resulted in no increase over the control treatment using 0.1 and 0.5 mg/l. Testing of higher concentration ranges, such as 1, 2, 5, or 10 mg/l TDZ is observed to produce an increase in somatic embryo response and an increase in transformation frequency (Txn %).

[0263] Table 25 shows the results of the cytokinin pre-treatment experiments. PTRT=pre-treatment, TRT=treatment.

TABLE 25

| | PTRT | | | T-DNA | # culture | # culture | | |
|---|---|---|---|---|---|---|---|---|
| Seedling | conc | # | | score | response | response | # T0 | |
| PTRT | (mg/l) | Seedling | TRT | (0-5) | (2 wk) | (4 wk) | plants | TXN % |
| TDZ | 0 | 21 | 1 | 4 | 180 | 122 | 103 | 490% |
| TDZ | 0.1 | 21 | 2 | 4 | 169 | 121 | 99 | 471% |
| TDZ | 0.5 | 21 | 3 | 4 | 182 | 122 | 97 | 462% |
| BAP | 0 | 21 | 1 | 4 | 91 | 135 | 70 | 333% |
| BAP | 1 | 21 | 2 | 4 | 135 | 151 | 97 | 462% |
| BAP | 5 | 21 | 3 | 4 | 144 | 172 | 128 | 610% |
| Trans- | 0 | 21 | 1 | 4 | 149 | 144 | 86 | 410% |
| Zeatin | | | | | | | | |
| Trans- | 1 | 21 | 2 | 4 | 196 | 177 | 102 | 486% |
| Zeatin | | | | | | | | |
| Trans- | 3 | 21 | 3 | 4 | 192 | 222 | 130 | 619% |
| Zeatin | | | | | | | | |

[0264] When compared to control seedlings, seedlings pre-treated with a cytokinin, including but not limited to cytokinins listed in Table 23 (BAP [6-benylamino purine], BA [benzyladenine], kinetin, TDZ [thidiazuron], trans-zeatin), are observed to produce leaf segments that exhibit an improvement in frequencies of T-DNA delivery, somatic embryo response (more rapid growth and higher numbers), production of T0 plants, and single-copy integration frequencies.

### Example 11: Fipexide Pre-Treatment Prior to Agrobacterium Infection Improved Transformation

[0265] Maize leaf segments/tissue were pre-treated with an auxin/cytokinin-like chemical, fipexide, prior to Agrobacterium infection to determine its effect on transformation success.

[0266] Methods for Agrobacterium-mediated transformation of maize leaf segments/tissue were followed as outlined in Examples 4 and 5. Specifically, seed of Pioneer inbred GR0112 was surface sterilized and sown on 90AE germination medium containing 0 mg/1, 4.75 mg/1, 9.5 mg/l, or 19 mg/l of fipexide. 90AE medium contained 900 medium+2 mg/l ancymidol. The germination and growth period under 120 μmol m-2 s-1 light intensity using an 18-hour photoperiod at 28° C. was 13 to 16 days for seedlings used in all replicate experiments and treatments.

[0267] Seedling leaf whorl tissue was isolated and mechanically processed to produce 0.5-3 mm leaf segments for transformation as described, using Agrobacterium strain LBA4404 TD THY-harboring PHP71539 (SEQ ID NO:4) plus PHP96277 (SEQ ID NO:67).

[0268] Pre-treating seedlings with fipexide had a positive impact on maize leaf transformation (Table 26). Use of fipexide in the medium during germination and growth of GR0112 seedlings improved early somatic embryo formation (total number of somatic embryos (SE) formed per 42 starting seedings) within the first four weeks of culture after Agrobacterium infection, with use of 4.75, 9.5 and 19 mg/l of fipexide increasing the total SE number 1.4-fold, 1.3-fold, and 1.2-fold, relative to the control treatment where the seedling germination medium contains no fipexide. Regeneration of the somatic embryo tissue is performed using art recognized procedures (see Example 14C). The higher 2-week and 4-week culture response is observed to produce a proportional increase in T0 plant regeneration relative to the number of T0 plants regenerated in the control treatment where the starting seedlings receive no fipexide pre-treatment. The results in T0 plant regeneration is similar to those observed in Table 26 for the fipexide seedling pre-treatments.

[0269] Table 26 shows the results of the fipexide pre-treatment experiments. PTRT=pre-treatment, TRT=treatment.

TABLE 26

| | | | | T- | | | | |
|---|---|---|---|---|---|---|---|---|
| | PTRT | | | DNA | # culture | # culture | | |
| Seedling | conc | # | | score | response | response | # T0 | |
| PTRT | (mg/l) | Seedling | TRT | (0-5) | (2 wk) | (4 wk) | plants | TXN % |
| Fipexide | 0 | 42 | 1 | 4 | 590 | 607 | n/a | n/a |
| Fipexide | 4.75 | 42 | 2 | 4 | 768 | 829 | n/a | n/a |
| Fipexide | 9.5 | 42 | 3 | 3.5 | 681 | 780 | n/a | n/a |
| Fipexide | 19 | 42 | 4 | 3.5 | 636 | 733 | n/a | n/a |

### Example 12: Sugar Pre-Treatment Prior to Agrobacterium Infection Improved Transformation

[0270] Maize leaf segments/tissue were pre-treated with maltose or a combination of sugars, maltose and sucrose, prior to Agrobacterium infection to determine their effects on transformation success. In this example, maltose was used as a carbon source in place of sucrose.

[0271] Methods for Agrobacterium-mediated transformation of maize leaf segments/tissue were followed as outlined in Examples 4 and 5. Two replicates were conducted, one with Pioneer inbred ED85E and the second with Pioneer inbred GR013D. Specifically, seed of the inbreds was surface sterilized and sown on 90AE germination medium containing 0 mg/l maltose, 20 mg/l maltose, or 10 mg/l maltose+10 mg/l sucrose. 90AE medium contained 900 medium+2 mg/l ancymidol. The germination and growth period under 120 μmol m-2 s-1 light intensity using an 18-hour photoperiod at 28° C. was 13 to 16 days for seedlings used in all replicate experiments and treatments.

[0272] Seedling leaf whorl tissue was isolated and mechanically processed to produce 0.5-3 mm leaf segments for transformation as described, using Agrobacterium strain LBA4404 TD THY-harboring PHP71539 (SEQ ID NO:4) plus PHP104215 (SEQ ID NO:352).

[0273] Pre-treating seedlings with maltose had a positive impact on maize leaf transformation (Table 27). Use of 20 mg/l maltose as the carbon source during seedling pre-treatments in inbred GR013D also improved T0 Txn % by 1.3-fold relative to results obtained after growing seedlings on 20 mg/l sucrose, which is the standard amount of sucrose in the 900 germination medium (see Table 14).

[0274] Table 27 shows the results of the maltose pre-treatment experiments. PTRT=pre-treatment, TRT=treatment.

TABLE 27

| | PTRT | | | T-DNA | # culture | # culture | | |
|---|---|---|---|---|---|---|---|---|
| Seedling | conc | # | | score | response | response | # T0 | |
| PTRT | (mg/l) | Seedling | TRT | (0-5) | (2 wk) | (4 wk) | plants | TXN % |
| Maltose | 0 | 30 | 1 | 3.5 | 203 | 202 | 142 | 473% |
| Maltose | 20 | 30 | 2 | 3.5 | 131 | 143 | 97 | 323% |
| Maltose + sucrose | 10 + 10 | 30 | 3 | 3.5 | 141 | 160 | 104 | 347% |
| Maltose | 0 | 30 | 1 | 4 | 601 | 526 | 19 | 63% |
| Maltose | 20 | 30 | 2 | 4 | 650 | 562 | 25 | 83% |
| Maltose + sucrose | 10 + 10 | 30 | 3 | 4 | 685 | 580 | 9 | 30% |

### Example 13: Pre-Treatment with Inhibitor of Abscisic Acid Biosynthesis Prior to Agrobacterium Infection Improved Transformation

[0275] Maize leaf segments/tissue were pre-treated with an inhibitor of abscisic acid biosynthesis, norflurazon, prior to Agrobacterium infection to determine its effect on transformation success.

[0276] Methods for Agrobacterium-mediated transformation of maize leaf segments/tissue were followed as outlined in Examples 4 and 5. Specifically, seed of the Pioneer inbred GR0112 was surface sterilized and sown on 90AE germination medium containing 0 mg/1, 0.1 mg/l, 1 mg/l, or 3 mg/l norflurazon. 90AE medium contained 900 medium+2 mg/l ancymidol. The germination and growth period under 120 μmol m-2 s-1 light intensity using an 18-hour photoperiod at 28° C. was 13 to 16 days for seedlings used in all replicate experiments and treatments.

[0277] Seedling leaf whorl tissue was isolated and mechanically processed to produce 0.5-3 mm leaf segments for transformation as described, using Agrobacterium strain LBA4404 TD THY-harboring PHP71539 (SEQ ID NO:4) plus PHP104222 (SEQ ID NO:353).

[0278] Pre-treating seedlings with norflurazon had a positive impact on maize leaf transformation (Table 28). Use of 0.1 mg/l norflurazon during seedling pre-treatments in inbred GR0112 improved T0 Txn % by 1.1-fold relative to the control treatment where the seedling germination medium contains no norflurazon within the first two weeks of culture after Agrobacterium infection.

[0279] Scoring the 4-week response and regenerating T0 plants is performed. The higher 2-week somatic embryo response for the 0.1 mg/l norflurazon seedling pretreatment is observed to produce a proportional increase in the 4-week somatic embryo response and is observed to produce a proportional increase in T0 plant regeneration relative to the control treatment where the starting seedlings receive no norflurazon. The results in 4-week somatic embryo response and T0 plant regeneration is similar to those observed in Table 28 for the norflurazon seedling pre-treatments.

[0280] Table 28 shows the results of the norflurazon pre-treatment experiments. PTRT=pre-treatment, TRT=treatment.

TABLE 28

| | PTRT | | | T-DNA | # culture | # culture | | |
|---|---|---|---|---|---|---|---|---|
| Seedling | conc | # | | score | response | response | # T0 | |
| PTRT | (mg/l) | Seedling | TRT | (0-5) | (2 wk) | (4 wk) | plants | TXN % |
| Norflurazon | 0 | 22 | 1 | 4 | 312 | n/a | n/a | n/a |
| Norflurazon | 0.1 | 22 | 2 | 4 | 350 | n/a | n/a | n/a |
| Norflurazon | 1 | 7 | 3 | 1.5 | 19 | n/a | n/a | n/a |
| Norflurazon | 3 | 7 | 4 | 2 | 45 | n/a | n/a | n/a |

[0281] When compared to control seedlings, seedlings pre-treated with an inhibitor of abscisic acid biosynthesis, including but not limited to inhibitors of abscisic acid biosynthesis listed in Table 23 (norflurazon, fluridone, diflufenican, abamine, nordihydroguaiaretic acid (NDGA)), are observed to produce leaf segments that exhibit an improvement in frequencies of T-DNA delivery, somatic embryo response (more rapid growth and higher numbers), production of TO plants, and single-copy integration frequencies.

### Example 14: Exposure of Seedlings to High Temperature Prior to Agrobacterium Infection Improved Transformation

### A. Heat Pre-Treatment of Seedlings Results in Increased Recovery of Transgenic T0 Plants

[0282] Methods for Agrobacterium-mediated transformation of maize leaf tissue were followed as outlined in Examples 4 and 5. Specifically, seed of Pioneer inbred PHH5E was surface sterilized and sown on germination medium containing 2 mg/l ancymidol (medium 70AE) with a 14-day growth period under 120 μmol m-2 s-1 light intensity using an 18-hour photoperiod at 28° C. At this point, the seedlings were divided into two treatments; 1) either remaining at 28° C. for an additional 3 hours, or 2) incubated at 45° C. for 3 hours, at which time all seedlings were mechanically processed in the presence of Agrobacterium suspension to produce suspended leaf segments/pieces for transformation. Seedling leaf whorl tissue was isolated and mechanically processed to produce 0.5-3 mm leaf segments for transformation, using Agrobacterium strain LBA4404 THY-TN-harboring PHP71539 plus PHP97334 (SEQ ID NO: 4 and 77, respectively).

[0283] As shown for paired treatments in five separate experiment (Table 29), transformation frequency for the seedlings pre-treated at 45° C. exhibited a higher Agrobacterium T-DNA delivery score (compared to the control) and produced approximately twice as many T0 plants as in the control treatment. This resulted in an overall mean and standard deviation for the control and 45° C. heat treatments of 260% (+/−113%) and 560% (+/−95%), respectively, which is a statistically significant increase (p=0.05).

TABLE 29

| Expt. | Seedling | No. | T-DNA | No. T0 | |
|---|---|---|---|---|---|
| No. | Treatment | Seedling | Delivery | plants | Txn % |
| 1 | Control | 25 | 2 | 61 | 244% |
| | 45° C. 3 hr* | 25 | 3 | 138 | 552% |
| 2 | Control | 25 | 2 | 48 | 192% |
| | 45° C. 3 hr | 23 | 3 | 112 | 487% |
| 3 | Control | 25 | 2 | 111 | 444% |
| | 45° C. 3 hr | 22 | 3 | 159 | 723% |
| 4 | Control | 23 | 2 | 34 | 148% |
| | 45° C. 3 hr | 25 | 3 | 134 | 536% |
| 5 | Control | 25 | 2 | 68 | 272% |
| | 45° C. 3 hr | 18 | 3 | 90 | 500% |

*seedlings incubated at 45° C., 70% relative humidity for 3 hours

### B. Milder Heat Pre-Treatment of Seedlings for an Extended Period of Time Results in a Consistently High Recovery of Transgenic T0 Plants

[0284] Seed of Pioneer inbred PHH5E was surface sterilized and sown on germination medium containing 2 mg/l ancymidol (medium 70AE) with a 14-day growth period under 120 μmol m-2 s-1 light intensity using an 18-hour photoperiod at 28° C. Seedling leaf whorl tissue was isolated and mechanically processed to produce 0.5-3 mm leaf segments for transformation as described, using Agrobacterium strain LBA4404 TD THY-harboring PHP71539 and PHP97334 (SEQ ID NO:4 and SEQ ID NO:77, respectively).

[0285] Prior to seedling harvesting, processing to produce leaf segments and Agrobacterium infection, seedlings were transferred into a 37° C., 50% relative humidity incubator for 17 hours. All seedlings were then dissected and mechanically processed to produce leaf segments for Agrobacterium transformation as described.

[0286] As shown in Table 30, transformation frequency for the seedlings pre-treated at 37° C. overnight exhibited a consistently high transformation frequency with a mean Txn % of 315% and a high single-copy frequency of 54% (mean value for 4 experiments).

TABLE 30

| Expt. | No. | No. T0 | | No. SC | |
|---|---|---|---|---|---|
| No. | Seedling | plants | Txn %* | T0s | SC %** |
| 1 | 10 | 33 | 330% | 21 | 64% |
| 2 | 10 | 19 | 190% | 9 | 47% |
| 3 | 10 | 32 | 320% | 14 | 44% |
| 4 | 10 | 42 | 420% | 24 | 57% |
| Average | 40 | 126 | 315% | 68 | 54% |

*Txn % = (Number of T0 plants/Starting seedlings) × 100
**SC % = (Number of T0 plants with a single-copy T-DNA/Starting seedlings) × 100

### C. Heat Pre-Treatment of Seedlings Results in Increased T-DNA Delivery, Increased Somatic Embryo Formation, Increased Recovery of Transgenic T0 Plants and Increased HDR Frequencies

[0287] Agrobacterium strain LBA4404 TD THY-harboring both PHP71539 (SEQ ID NO:4; the super-virulence plasmid) and PHP99721 (the T-DNA plasmid) was used for leaf transformation. The T-DNA of PHP99721 (SEQ ID NO:240) contained the components RB+LOXP+NOS::WUS2::IN2 TERM+3×ENH::UBI1ZM PRO::ODP2::OS-T28 TERM+HSP17.7 PRO::MO-CRE::PINII TERM+UBI1ZM PRO::CAS9::ZM-UBI TERM+ZM-U6 PRO::gRNA-CHR1-53.66+ZM-ALS PRO::HRA::SB-UBI TERM+CHR1-53.66 TARGET SITE+HOMOLOGY SEQ1+SI-UBI PRO::NPTII::SI-UBI TERM+HOMOLOGY SEQ2+CHR1-53.66 TARGET SITE+SB-UBI PRO::ZS-GREEN1::OS-UBI TERM+LB.

[0288] Seed of maize inbred PHH5E were surface sterilized and pressed lightly into solid germination medium (90AE) with the embryo axis-side upward, with subsequent germination and seedling growth occurring under light (120 μE m-2 s-1) using an 18-hour photoperiod at 28° C. for 14 days. On the morning the seedlings were to be used for transformation, half the seedlings were allowed to remain at 28° C. (Control Treatment) while the remaining half of the seedlings were transferred into an incubator at 45° C., 70% relative humidity for 3 hours (Heat Treatment). All the seedlings were then used to prepare leaf explants for transformation as described below.

[0289] First, the seedlings were cut above the mesocotyl (removing the aerial portions from the roots) and the first 3 cm of leaf whorl was harvested, discarding the remainder of the more mature leaf tissue. The 3-cm long leaf whorl was bisected longitudinally using a scalpel, and the halves were put into 100 ml of Agrobacterium suspension (OD=0.5-0.6 measured at 550 nm, with the bacterium suspended in medium 700J+200 mM AS+0.02% surfactant solution (Break-Thru-233®) in a food processor. The leaf tissue was pulse-blended on low speed (10 pulses) until the average size of leaf segments/fragments were approximately 0.5-3 mm in length/depth. The suspended segments/tissue in the Agrobacterium suspension remained in the blender bowl for 20 minutes at room temperature with gentle swirling every 1-2 minutes, which constituted the “Agrobacterium Infection” step. After infection, the suspension was poured through a sterile stainless-steel screen, catching the leaf fragments/segments from the liquid that passed through for disposal. The leaf segments were then transferred from the screen onto three layers of dry Whatman's #2 filter papers which wicked away excess Agrobacterium suspension (but not being washed) so that a thin layer of bacterium remained on the surface of the leaf segments/pieces. The leaf segments/pieces were again transferred onto a single layer of Whatman's filter paper resting on solid co-cultivation medium (710N) and were then cultured in the dark at 21° C. for 24 hours. After co-cultivation, the filter papers with the supported leaf segments/pieces were transferred onto resting medium 605B and cultured in the dark at 28° C. for one week, at which point the filter papers were again transferred onto selection medium 13266N and cultured in the dark at 28° C. for 3 weeks. After selection, the selection plated (held in a translucent culture box, typically holding 12 plates in 6 stacks of 2 plates) was transferred into a 45° C., 70% relative humidity incubator for two hours, then removed and the box placed on a benchtop at 25° C. for 1.5 hours for the temperature to re-equilibrate to room temperature. After heat treatment (which activated HSP17.7 PRO::CRE expression for excision of WUS/BBM/CRE from the T-DNA) healthy somatic embryos were transferred from the subtending filter papers onto fresh maturation medium 13329B and cultured for 2 weeks at 28° C. in the dark, then the plates were transferred into the light (120 μE m-2 s-1, 18-hour photoperiod) at 25° C. for one additional week. Healthy mature somatic embryos that had begun producing shoots were then transferred onto rooting medium 404J for an additional 203 weeks of culture under lights. Plantlets were then transferred to soil in the greenhouse. When regenerated T0 plants were large enough for sampling, leaf tissue was punched for qPCR analysis for T-DNA and Agrobacterium plasmid backbone sequences. PCR analysis for both HR junctions, and long-PCR analysis that spanned from the flanking endogenous Chromosome 1 sequences across the entire sequence that had integrated via homology-dependent repair (SDN3) were used to confirm targeted integration.

[0290] A total of 9 repeat experiments were carried out and for each transformation experiment, using 15-30 seedlings for either the control or the “heat-pre-treated seedling” treatments for each experiment. For gene editing designed specifically for gene insertion, the same construct PHP99721 was used.

[0291] The relative efficiency of T-DNA delivery was assessed by scoring transient expression of ZS-GREEN in leaf segments 3-4 days after Agrobacterium infection. Scores ranged from “0” in which no leaf segments/pieces within a given treatment expressed ZS-GREEN, with scores of 1, 2, 3, or 4, being used when approximately 25%, 50%, 75%, or 90-100% of the leaf segments/pieces within a treatment showed ZS-GREEN expression, respectively. Thus, we used transient expression of the visual marker as a relative indication of the efficiency of Agrobacterium T-DNA delivery. Using this scale, for all 9 experiments the T-DNA delivery score for the control treatments was consistently rated as “3” while for the heat treatment the score was consistently rated as “4”. Based on this observation, it was concluded that heat pretreatment of seedlings in an incubator at 45° C., 70% relative humidity for 3 hours prior to leaf segmentation and Agrobacterium infection resulted in increased efficiency of T-DNA delivery.

[0292] After T0 plants were produced, leaf samples were collected for PCR analysis to identify gene insertion events with NPTII gene. From 204 seedlings used in 9 completed transformation experiments, a total of 1150 T0 plants were produced, which gave an overall T0 transformation frequency of 563% (based on number of seedlings used for transformation). From the 1150 TO plants, 32 gene insertion events were confirmed using PCR that spanned each of the two-integration junctions and a long-PCR reaction that spanned the entire integration locus (both confirming correct respective insertion sizes), which yielded a 2.8% gene insertion frequency. Highly efficient HDR frequencies were observed for both the control and the “heat-pre-treated seedling” treatments. Heat shock treatment doubled the T0 transformation frequency and the gene editing (gene insertion) frequency in the TO population, thus heat shock treatment increased the overall process efficiency of gene editing (see Table 31).

TABLE 31

| | | | | | | | HDR % |
|---|---|---|---|---|---|---|---|
| Expt. | Seedling Pre- | No. | No. T0 | | HDR | T0 | by |
| No. | Treat | Seedling | Plants | Txn % | Confirm | HDR % | seedling |
| 1 | Control | 25 | 61 | 244% | 2 | 7.7 | 8 |
| 1 | Heat Trt. | 25 | 138 | 552% | 2 | 3.4 | 8 |
| 2 | Control | 25 | 48 | 192% | 0 | 0 | 0 |
| 2 | Heat Trt. | 23 | 112 | 487% | 3 | 5.6 | 13 |
| 3 | Control | 25 | 111 | 444% | 4 | 7.4 | 16 |
| 3 | Heat Trt. | 22 | 159 | 723% | 6 | 7.8 | 27.3 |
| 4 | Control | 23 | 34 | 148% | 0 | 0 | 0 |
| 4 | Heat Trt. | 25 | 134 | 536% | 7 | 11.5 | 28 |
| 5 | Control | 25 | 68 | 272% | 3 | 12.5 | 12 |
| 5 | Heat Trt. | 18 | 90 | 500% | 0 | 0 | 0 |
| 6 | Control | 25 | 59 | 236% | 2 | 5.7 | 8 |
| 6 | Heat Trt. | 15 | 114 | 760% | 5 | 10.4 | 33.3 |
| 7 | Control | 25 | 57 | 228% | 0 | 0 | 0 |
| 7 | Heat Trt. | 22 | 134 | 609% | 4 | 6.6 | 18.2 |
| 8 | Control | 25 | 65 | 260% | 4 | 11.8 | 16 |
| 8 | Heat Trt. | 22 | 136 | 618% | 3 | 4.1 | 13.6 |
| 9 | Control | 25 | 54 | 216% | 3 | 9.4 | 12 |
| 9 | Heat Trt. | 32 | 133 | 415% | 2 | 3.5 | 6.3 |
| Sum | Control | 223 | 557 | 250% | 18 | 3.2 | 8.1 |
| Sum | Heat Trt. | 204 | 1150 | 564% | 32 | 2.8 | 15.7 |

### D. Agrobacterium-Mediated Site-Specific Integration (SSI) in Heat Pre-Treated Seedling-Derived Leaf Segments/Tissue of Maize Inbreds

[0293] In a second pair of experiments, a pre-integrated target site (target locus) in the maize inbred PHH5E genome was used for site-specific integration, as described in U.S. Pat. Nos. 6,187,994, 6,262,341, 6,330,545, 6,331,661, and 8,586,361, each of which is herein incorporated by reference in its entirety. In this example, target site 10 located on chromosome 1 at genetic position 54.56 cM within the PHH5E inbred genome was used and is comprised of the integrated components loxP+UBI1ZM PRO::UBI1ZM 5′UTR::UBI1ZM INTRON1::FRT1::NPTII::PINII TERM+FRT6 (designated as the genomic Landing Pad) which had been previously introduced via Cas9-mediated homologous recombination to create this SSI landing pad. Seed of the PHH5E containing the genomic Landing Pad 10 were surface sterilized and germinated on 90AE medium for 14 days.

[0294] Seedling-derived leaf segments/pieces were transformed using the Agrobacterium strain LBA4404 TD THY-containing the helper plasmid PHP71539 (SEQ ID NO:4) in addition to the T-DNA-containing plasmid PHP90842 (T-DNA with RB+UBI::FLP+FRT1::PMI+ACTIN::WUS+UBI::ODP2+HSP17.7::CRE+LOXP+SB-UBI::DsRED2+FRT6+LB) and the second strain also contained PHP100712 (SEQ ID NO:342) (T-DNA with RB+LOXP+UBI1ZM PRO::UBI1ZM 5UTR::UBI1ZM INTRON1::WUS2::IN2 TERM+FMV ENHANCER+PCSV ENH+MMV ENH+SI-UBI1 PRO::SI-UBI1 INTRON1::ZM-ODP2::ZM-UBI TERM TERM+LOXP+NOS PRO::CRC::SB-GKAF TERM+LB) at a ratio of 9:1 (90842:100712). As shown in Table 32, seedlings pre-treated with an overnight 37° C. exposure produced substantially higher production of early somatic embryos (SE response) and a higher number of recovered Perfect Site-specific Integration events (RMCE events) when compared to the results for seedlings that were maintained at 28° C. during the same overnight period prior to Agrobacterium transformation.

TABLE 32

| | | Number of: | | | | | |
|---|---|---|---|---|---|---|---|
| Trt. | | SE response | Callus | T0 plant | RMCE | SSI | Escape |
| (° C.) | Seedlings | (%)** | event % | freq. (%) | events | events | % |
| 28 | 63 | 849 | 259 | 29 | 0 | 3 | 22 |
| 37 | 85 | 2041 | 141 | 22 | 3 | 1 | 83 |

[0295] Additional temperature ranges and durations for heat pre-treatment is observed to positively impact T-DNA delivery, somatic embryo formation, recovery of transgenic T0 plants, and HDR frequencies.

### Example 15: Auxin Pre-Treatment Prior to Agrobacterium Infection Improved Transformation

[0296] Methods for Agrobacterium-mediated transformation of maize leaf tissue were followed as outlined in Examples 4 and 5. Specifically, seed of Pioneer inbred PHH5E was surface sterilized and sown on germination medium containing no auxin for 14 days. The seedlings were then divided into four treatments: 1) remained on 900 medium (0 mg/l 2,4-D=control), 2) transferred onto 900 medium plus 3 mg/l 2,4-D, 3) transferred onto 900 medium plus 10 mg/l 2,4-D, or 4) transferred onto 900 medium plus 30 mg/l 2,4-D mg/l. All seedlings remained on these media for 24 hours under 120 μmol m-2 s-1 light intensity using an 18-hour photoperiod at 28° C., at which time all seedlings were mechanically processed in the presence of Agrobacterium suspension to produce suspended leaf segments/pieces for transformation.

[0297] Seedling leaf whorl tissue was isolated and mechanically processed to produce 0.5-3 mm leaf segments for transformation as described, using Agrobacterium strain LBA4404 TD THY-harboring PHP71539 and PHP97334 (SEQ ID NO:4 and SEQ ID NO:77).

[0298] Table 33 shows that growing seedlings on 10 mg/l 2,4-D resulted in improved leaf transformation, as demonstrated through both an increased transformation frequency (Txn %) and frequency of single-copy T-DNA integrations compared to the control treatment.

TABLE 33

| 2,4-D | | T-DNA | No. T0 | | No. SC | |
|---|---|---|---|---|---|---|
| (mg/l) | No. Seedlings | Delivery | Plants | Txn %* | Clean** | SC %*** |
| 0 | 60 | 3 | 55 | 92% | 27 | 45% |
| 3 | 60 | 3 | 45 | 75% | 18 | 30% |
| 10 | 60 | 4 | 72 | 120% | 40 | 67% |
| 30 | 60 | 4 | 28 | 47% | 19 | 32% |

*Transformation frequency = (No. T0 plants/No. Seedlings) × 100
**Single-copy T-DNA integration with no extraneous Agrobacterium sequences
***Single-copy Frequency = (No. Single-copy T0 plants/No. T0 plants) × 100

[0299] When compared to control seedlings, seedlings pre-treated with other auxins including, but not limited to auxins listed in Table 23 (2,4-D, dicamba, 2,4,5-T, NAA, picloram, indole-3-acetic acid, 4-chloroindole-3-acetic acid, phenylacetic acid, indole-3-butyric acid, and indole-3-propionic acid) is observed to produce leaf segments that exhibit an improvement in frequencies of T-DNA delivery, somatic embryo response (more rapid growth and higher numbers), production of T0 plants, and single-copy integration frequencies.

### Example 16: Anti-Oxidant Pre-Treatment Prior to Agrobacterium Infection to Improve Transformation

[0300] Methods for Agrobacterium-mediated transformation of maize leaf tissue are followed as outlined in Examples 4 and 5. Specifically, seed of Pioneer inbred PHH5E is surface sterilized and sown on germination medium containing no anti-oxidant for 14 days. At this point, the seedlings are divided into four treatments; 1) remaining on 900 medium (0 mg/l anti-oxidant=control), 2) being transferred onto 900 medium plus 3 mg/l anti-oxidant, 3) being transferred onto 900 medium plus 10 mg/l anti-oxidant, or 4) being transferred onto 900 medium plus 30 mg/l anti-oxidant. All seedlings remain on these media for 24 hours under 120 μmol m-2 s-1 light intensity using an 18-hour photoperiod at 28° C., at which time all seedlings are mechanically processed in the presence of Agrobacterium suspension to produce suspended leaf segments/pieces for transformation.

[0301] Seedling leaf whorl tissue is isolated and mechanically processed to produce 0.5-3 mm leaf segments for transformation as described, using Agrobacterium strain LBA4404 TD THY-harboring PHP71539 plus PHP97334 (SEQ ID NO:4 and SEQ ID NO:77).

[0302] When compared to control seedlings, seedlings pre-treated with an anti-oxidant, including but not limited to anti-oxidants listed in Table 23 (dithiolthreitol (DTT), cysteine, and glutathione), is observed to produce leaf segments that exhibit an improvement in frequencies of T-DNA delivery, somatic embryo response (more rapid growth and higher numbers), production of T0 plants, and single-copy integration frequencies.

### Example 17: Germination and Growth of Seedlings Under Increased-Spectrum Light Prior to Agrobacterium Infection Improved Transformation

[0303] Methods for Agrobacterium-mediated transformation of maize leaf tissue were followed as outlined in Examples 4 and 5. Specifically, seed of Pioneer inbred PHH5E was surface sterilized and sown on germination medium containing no auxin for 14 days, being grown under 120 μmol m-2 s-1 light intensity using an 18-hour photoperiod at 28° C. While light intensity remained consistent between treatments, the quality of the light was varied by growing seedlings under either fluorescent light (Phillips High-Performance Alto II, #F32T8/Plant), Valoya LED lights (Valoya NS12/C65 #LE17051487), or RAZR LED lights (Fluence Bioengineering, Inc. #4009716). The differences between these light sources were readily apparent when the output across the visible light spectrum was compared. The Phillips fluorescent lamp produced its broadest peak in the blue range (400-500 nm) with numerous sharp spikes and intervening gaps of weak illumination in the green, yellow, and red portions of the spectrum (500-700 nm). In comparison, the Razor LED array produced a sharp peak roughly in the middle of the blue (˜560-570 nm) with a broader peak extending across the green into the red (˜530-650 nm) portion of the spectrum, while the Valoya produced a sharp peak roughly in the middle of the blue (˜560-570 nm) with a broader peak across the green and yellow (˜530-630 nm) with a shoulder in the red (˜660-670 nm) portion of the spectrum.

[0304] Seedlings were transferred into an incubator at 37° C., 50% relative humidity for 24 hours before being mechanically processed. Seedling leaf whorl tissue was isolated and mechanically processed to produce 0.5-3 mm leaf segments for transformation as described, using Agrobacterium strain LBA4404 TD THY-harboring PHP71539 and PHP97334 (SEQ ID NO:4 and SEQ ID NO:77, respectively).

[0305] Table 34 shows that growing seedlings under different light spectra resulted in improved leaf transformation, as demonstrated through an increased transformation frequency (Txn %) under the RAZR LED lights, relative to those grown under either fluorescent or Valoya LED lighting.

TABLE 34

| | | | T-DNA | | |
|---|---|---|---|---|---|
| Expt | Light | No. | delivery | No. T0 | |
| No. | Source | Seedlings | score | Plants | Txn % |
| 1 | Fluorescent | 10 | 3 | 36 | 360% |
| | Valoya | 10 | 3 | 27 | 270% |
| | RAZR | 10 | 4 | 63 | 630% |
| 2 | Fluorescent | 10 | 3 | 35 | 350% |
| | Valoya | 10 | 3 | 29 | 290% |
| | RAZR | 10 | 4 | 52 | 520% |
| 3 | Fluorescent | 11 | 2 | 73 | 627% |
| | Valoya | 11 | 2 | 71 | 582% |
| | RAZR | 11 | 3 | 91 | 818% |
| Totals and | Fluorescent | 31 | 3 | 144 | x = 465% |
| mean % (x) | Valoya | 31 | 3 | 127 | x = 410% |
| | RAZR | 31 | 4 | 206 | x = 665% |

### Example 18: Soil-Sown Greenhouse-Grown Seedlings Under Full Sunlight Produce High Transformation Frequencies

[0306] Methods for Agrobacterium-mediated transformation of maize leaf tissue were followed as outlined in Examples 4 and 5. Specifically, seed of Pioneer inbred PHH5E was surface sterilized and sown in soil and grown under greenhouse conditions for 21 days. Harvested by cutting at soil level, brought into a sterile hood, sprayed with 70% ethanol, and then the outer three successive leaves were peeled back and removed, spraying and wiping with a 70% ethanol-soaked paper towel in between peeling off each leaf. Once the outer leaves were removed, the remaining inner leaf whorl was prepared as normal. The bottom 3 cm of surface-sterilized whorl was removed, bisected, and then mechanically processed in the presence of Agrobacterium suspension to produce suspended 0.5-3 mm leaf segments for transformation as described, using Agrobacterium strain LBA4404 TD THY-harboring PHP71539 plus PHP97334 (SEQ ID NO:4 and SEQ ID NO:77). When compared to seedlings grown under artificial lighting in growth chambers, seedling health under full-spectrum sunlight in the greenhouse is observed to be optimal. Further, seedlings grown under full-spectrum light in the greenhouse is observed to produce leaf segments that exhibit an improvement in frequencies of T-DNA delivery, somatic embryo response (more rapid growth and higher numbers), production of T0 plants, and single-copy integration frequencies.

[0307] It is contemplated that the leaf explant from a pre-treated seedling resulting from the methods disclosed herein can be derived from any plant found within the monocot families listed in Table 1 along with representative genera and/or species.

[0308] It is also expected that such additional treatments such as addition of ancymidol, 2,4-D, and either overnight or 3-hour heat treatment will have an additive effect, boosting transformation frequencies to even higher levels.

### Example 19: Use of Chlorine Gas for Seed Sterilization

[0309] Inbred PHH5E seed were placed in a monolayer within a sealed chamber that included a reservoir containing 100 ml of household bleach (8.25% (w/v) sodium hypochlorite) that was immediately below a stopcock valve in the top of the chamber. A glass pipette was used to add 3.5 ml of 12N HCL to the reaction container slowly through the open Valve-1 and the Valve-1 was immediately closed which sealed the chamber containing the seed. As the two solutions came into contact, chlorine gas was released from the reaction reservoir. The chamber remained closed to allow sterilization to proceed overnight (16-18 hrs). Two valves were then opened, Valve-2 was opened to allow chlorine gas to flow out of the seed-containing chamber and into a second scrubbing chamber containing 150 ml of 0.5M NaOH (that traps the chlorine) before the vented air was released into a chemical flow hood. Opening another Valve-3 in the seed-containing chamber allowed fresh air to flow into the chamber, allowing chlorine gas to evacuate and be replaced by fresh air. In this manner, the chamber was purged of chlorine gas for 1.5-2 hours before being opened to remove the seed.

[0310] The gas-sterilized seed were germinated on 90AE solid medium under (120 μE m-2 s-1) lights using an 18-hour photoperiod at 25° C. After 14 days on germination medium, the percentage of seed that germinated and the percentage exhibiting microbial contamination (fungal or bacterial) was evaluated. The results are shown in Table 35. Our standard aqueous sterilization method (described above) was also performed on the same batch of seed as a control (labeled as “Diluted Bleach” in Table 35).

TABLE 35

| | | | | # Seed | |
|---|---|---|---|---|---|
| Sterilization | # | # Germi- | % Germi- | Contam- | % Contam- |
| Method | Seed | nated | nated | inated | inated |
| Chlorine Gas | 50 | 43 | 86% | 30 | 60% |
| Chlorine Gas | 50 | 44 | 88% | 30 | 60% |
| Chlorine Gas | 50 | 46 | 92% | 15 | 30% |
| Chlorine Gas | 50 | 48 | 96% | 15 | 30% |
| Diluted Bleach | 50 | 48 | 96% | 0 | 0% |

[0311] The batch of PHH5E inbred seed used for this experiment typically resulted in 100% contamination if not sterilized before placing on the high-sucrose germination medium used in this experiment. As shown in Table 35, chlorine gas sterilization reduced contamination rates by 40% to 70%, and germination frequencies were in a similar range relative to the control treatment (aqueous diluted bleach sterilization). Noting that the aqueous bleach sterilization method is a product of careful parameter optimization (concentrations, time, temperature, etc), it is accordingly expected that optimization of parameters in the gas sterilization protocol will produce a similar highly efficient result.

### Example 20: Transformation of Maize Leaf Segments with ZM-ODP2 Alone

### A. Use of 3×ENH:UBI1ZM PRO

[0312] A plasmid containing the following T-DNA, RB+LOXP+FMV ENH::PSCV ENH::MMV ENH::UBI1ZM PRO::ZM-ODP2+HSP17.7 PRO::CRE+LOXP+SB-UBI::ZS-GREEN+SI-UBI::NPTII+LB, is constructed (PHV00001, SEQ ID NO: 343), where the 3×ENH:UBI1ZM PRO results in expression levels of ZM-ODP2 that are substantially higher than when using the UBI1ZM PRO alone.

[0313] When Agrobacterium strain LBA4404 TD THY—with PHP71539 (SEQ ID NO: 4) and a second plasmid PHV00001 (SEQ ID NO: 343) is used to transform maize inbred PH85E leaf segments, strongly expressed ZM-ODP2 is observed to result in rapid somatic embryo formation and stimulation of T0 plant generation.

[0314] The use of other viral or plant enhancer sequences, or EME sequences, such as those disclosed in WO2018/183878 which is incorporated herein by reference in its entirety, to add to the ZM-UBI promoter, or to substitute other strong promoters for ZM-UBI (homologous promoters from other species for example) along with enhancers or EMEs, is observed to produce similar results, with high levels of ZM-ODP2 expression, rapid somatic embryo formation, and generation of T0 plants.

### B. Use of a Two-Component Transactivation System

[0315] A plasmid containing the following T-DNA, RB+LOXP+ZM-GOS2 PRO::SB-UBI INTRON1::MO-LEXA:MO-CBF1A+6×REC:MIN35S PRO:OMEGA 5UTR::ZM-ODP2+HSP17.7 PRO::CRE+LOXP+SB-UBI:ZS-GREEN+SI-UBI::NPTII+LB, is constructed (PHV00003, SEQ ID NO: 345), where a two-component transactivation system results in expression levels of ZM-ODP2 that are substantially higher than when using UBI1ZM PRO::ODP2.

[0316] When Agrobacterium strain LBA4404 TD THY—with PHP71539 (SEQ ID NO: 4) and a second plasmid PHV0003 (SEQ ID NO: 345) is used to transform maize inbred PH85E leaf segments, it is observed that the strongly expressed ZM-ODP2 results in rapid somatic embryo formation and stimulation of T0 plant generation.

[0317] Modification to the components of the two-component transactivation system, such as (but not limited to) i) substituting a stronger promoter such as ZM-ACTIN PRO in place of ZM-GOS2, ii) substituting new activation domains in place of CBF1A, iii) altering the number of activation domains fused to the DNA binding domain, iv) and altering the number of LEXA-binding sequences (REC), is observed to further increase expression of ZM-ODP2. Substituting dCAS-alpha10 in place of LEXA and using gRNA sequences targeting the endogenous ZM-ODP2 promoter sequence is observed to stimulate ODP2 activity and thus promote rapid somatic embryos from transformed leaf cells.

### Example 21: Transformation of Maize Leaf Segments with ZM-WUS2 Alone

### A. Use of 3×ENH:UBI1ZM PRO

[0318] A plasmid containing the following T-DNA, RB+LOXP+FMV ENH::PSCV ENH::MMV ENH::UBI1ZM PRO::ZM-WUS2+HSP17.7 PRO::CRE+LOXP+SB-UBI::ZS-GREEN+SI-UBI::NPTII+LB, is constructed (PHV00002, SEQ ID NO: 344), where the 3×ENH:UBI1ZM PRO results in expression levels of ZM-WUS2 that are substantially higher than when using UBI1ZM PRO::WUS2.

[0319] When Agrobacterium strain LBA4404 TD THY—with PHP71539 (SEQ ID NO: 4) and a second plasmid PHV00002 (SEQ ID NO: 344) is used to transform maize inbred PH85E leaf segments, it is observed that the strongly expressed ZM-WUS2 results in rapid somatic embryo formation and stimulation of T0 plant generation.

[0320] The use of other viral or plant enhancer sequences, or EME sequences to add to the ZM-UBI promoter, or to substitute other strong promoters for ZM-UBI (homologous promoters from other species for example) along with enhancers or EMEs, produces similar results, with high levels of ZM-WUS2 expression, rapid somatic embryo formation, and generation of TO plants.

### B. Use of a Two-Component Transactivation System

[0321] A plasmid containing the following T-DNA, RB+LOXP+ZM-GOS2 PRO::SB-UBI INTRON1::MO-LEXA:MO-CBF1A+6×REC:MIN35S PRO:OMEGA 5UTR::ZM-WUS2+HSP17.7 PRO::CRE+LOXP+SB-UBI::ZS-GREEN+SI-UBI::NPTII+LB, is constructed (PHV00004, SEQ ID NO: 346), where a two-component transactivation system results in expression levels of ZM-WUS2 that are substantially higher than when using UBI1ZM PRO::WUS2.

[0322] When Agrobacterium strain LBA4404 TD THY—with PHP71539 (SEQ ID NO: 4) and a second plasmid PHV0004 (SEQ ID NO: 346) is used to transform maize inbred PH85E leaf segments, it is observed that the strongly expressed ZM-WUS2 results in rapid somatic embryo formation and stimulation of T0 plant generation.

[0323] Modification to the components of the two-component transactivation system, such as (but not limited to) i) substituting a stronger promoter such as ZM-ACTIN PRO in place of ZM-GOS2, ii) substituting new activation domains in place of CBF1A, iii) altering the number of activation domains fused to the DNA binding domain, iv) and altering the number of LEXA-binding sequences (REC), is used to further increase expression of ZM-WUS2. Substituting dCAS-alpha10 in place of LEXA and using gRNA sequences targeting the endogenous ZM-WUS2 promoter sequence stimulates WUS2 activity and thus promotes rapid somatic embryos from transformed leaf cells.

[0324] Modification to the components of the two-component transactivation system, such as (but not limited to) i) substituting a stronger promoter such as ZM-ACTIN PRO in place of ZM-GOS2, ii) substituting new activation domains in place of CBF1A, iii) altering the number of activation domains fused to the DNA binding domain, iv) and altering the number of LEXA-binding sequences (REC), is observed to further increase expression of ZM-WUS2. Substituting dCAS-alpha10 in place of LEXA and using gRNA sequences targeting the endogenous ZM-WUS2 promoter sequence is observed to stimulate WUS2 activity and thus promote rapid somatic embryos from transformed leaf cells.

### Example 22: Pre-Treatment of Seedling-Derived Leaf Pieces with Compounds that Inhibit PRC2 Improve Transformation Frequency

[0325] Methods for Agrobacterium-mediated transformation of maize leaf segments/tissue are followed as outlined in Examples 4 and 5. Specifically, seed of Pioneer inbred PHH5E is surface sterilized and sown on germination medium containing medium 900 medium plus 2 mg/l ancymidol. The germination and growth period under 120 μmol m-2 s-1 light intensity using an 18-hour photoperiod at 28° C. is 14 days for seedlings used in all replicate experiments and treatments.

[0326] Seedling leaf whorl tissue is isolated and mechanically processed to produce 0.5-3 mm leaf segments for 700J medium. The liquid suspension is then poured through a sterile metal sieve to catch the leaf pieces, and the leaf pieces are then transferred briefly to sterile dry filter papers to wick away excess moisture. The leaf pieces are then transferred into 700J medium plus a cocktail of PRC2 inhibitor compounds for 30 minutes. The PRC2 inhibitor cocktail can include the following chemicals: lirametostat (also called CPI-1205, CAS #1621862-70-1), tazemetostat (also called EPZ-6438, CAS #1403254-99-8), UNC1999 (CAS #1431612-23-5), CPI-169 (CAS #1450655-76-1), EPZ011989 (CAS #2095432-26-9), EP005687 (CAS #1396772-26-1), PF-067226304 (CAS #1616287-82-1), and JQ-EZ-05 (also referred to as JQEZ5, CAS #1913252-04-6). For the pretreatment, 700J medium containing 100 nM of a single PRC2 inhibitors, mixtures of two PRC2 inhibitors in the same solution (each at 100 nM), or mixtures of 3 or more PRC2 inhibitors can be used. After 30 minutes incubation in the PRC2 inhibitors, the leaf pieces are washed once with 700J medium, and then resuspended in 100 ml of Agrobacterium suspension in 700J medium plus acetosyringone for 20 minutes incubation at room temperature with periodic mild swirling of the suspension. After the 20 minutes Agrobacterium infection, using Agrobacterium strain LBA4404 TD THY which harbors PHP71539 and PHP97334 (SEQ ID NO: 4 and SEQ ID NO:77), the leaf pieces are removed from the Agrobacterium suspension, briefly dried on filter paper and then transferred onto filter papers on solid medium for one week of resting, three weeks of selection, maturation, and rooting as previously described in Examples 4 and 5.

[0327] A cocktail containing three PRC2 inhibitors that is used for the 30-minute pre-treatment of leaf pieces before Agrobacterium infection is, but is not limited to, 700J medium plus a mixture of 100 nM tazemetostat, 100 nM UNC1999, and 100 nM CPI-169. Exposure to this mixture of three PRC2 inhibitors, growth of transgenic somatic embryos is stimulated, and higher transformation frequencies are observed. A similar enhanced somatic embryogenesis and transformation frequency is observed when leaf pieces are pre-treated with a mixture containing lirameotostat, tazemetostat, and UNC1999 (each at 100 uM) for the 30 minutes. Since different plant varieties (such as maize inbreds) and different grass species respond differently to such pre-treatments, it is observed that different PRC2 inhibitor concentrations (for example between 0.01 nm and 10 uM) and durations of pre-treatment (for example, between 1 minute and 24 hours) are determined for each genotype to optimize somatic embryo formation and transformation frequencies.

[0328] As used herein the singular forms “a”, “an”, and “the” include plural referents unless the context clearly dictates otherwise. Thus, for example, reference to “a cell” includes a plurality of such cells and reference to “the protein” includes reference to one or more proteins and equivalents thereof known to those skilled in the art, and so forth. All technical and scientific terms used herein have the same meaning as commonly understood to one of ordinary skill in the art to which this disclosure belongs unless clearly indicated otherwise.

[0329] All patents, publications and patent applications mentioned in the specification are indicative of the level of those skilled in the art to which this disclosure pertains. All patents, publications and patent applications are herein incorporated by reference in the entirety to the same extent as if each individual patent, publication or patent application was specifically and individually indicated to be incorporated by reference in its entirety.

[0330] Although the foregoing disclosure has been described in some detail by way of illustration and example for purposes of clarity of understanding, certain changes and modifications may be practiced within the scope of the appended claims.

The application's sequence listing, which the Patent Office published only in electronic form, follows.

SEQUENCE LISTING (353 sequences)

SEQ ID NO: 1 - DNA, 17373 bp, synthetic construct
  misc_feature 1..17373: note = PHP35648
  source 1..17373: mol_type = other DNA
gtttacccgccaatatatcctgtcaaacactgatagtttaaactgaaggcgggaaacgacaatctgatcatgagcggagaattaagggagtcacgttatgacccccgccgatgacgcgggacaagccgttttacgtttggaactgacagaaccgcaacgttgaaggagccactcagcaagctggtacgattgtaatacgactcactatagggcgaattgagcgctgtttaaacgctcttcaactggaagagcggttaccagagctggtcacctttgtccaccaagatggaactgcggccgctcattaattaagtcaggcgcgcctctagttgaagacacgttcatgtcttcatcgtaagaagacactcagtagtcttcggccagaatggccatctggattcagcaggcctagaaggccatttaaatcctgaggatctggtcttcctaaggacccgggatatcgctatcaactttgtatagaaaagttgggccgaattcgagctcggtacggccagaatggcccggaccgggttaccgaattcgagctcggtaccctgggatccggtgcgggcctcttcgctattacgccagctggcgaaagggggatgtgctgcaaggcgattaagttgggtaacgccagggttttcccagtcacgacgttgtaaaacgacggccagtgccaagctcagatcagcttgcatgcctgcagtgcagcgtgacccggtcgtgcccctctctagagataatgagcattgcatgtctaagttataaaaaattaccacatattttttttgtcacacttgtttgaagtgcagtttatctatctttatacatatatttaaactttactctacgaataatataatctatagtactacaataatatcagtgttttagagaatcatataaatgaacagttagacatggtctaaaggacaattgagtattttgacaacaggactctacagttttatctttttagtgtgcatgtgttctcctttttttttgcaaatagcttcacctatataatacttcatccattttattagtacatccatttagggtttagggttaatggtttttatagactaatttttttagtacatctattttattctattttagcctctaaattaagaaaactaaaactctattttagtttttttatttaataatttagatataaaatagaataaaataaagtgactaaaaattaaacaaataccctttaagaaattaaaaaaactaaggaaacatttttcttgtttcgagtagataatgccagcctgttaaacgccgtcgacgagtctaacggacaccaaccagcgaaccagcagcgtcgcgtcgggccaagcgaagcagacggcacggcatctctgtcgctgcctctggacccctctcgagagttccgctccaccgttggacttgctccgctgtcggcatccagaaattgcgtggcggagcggcagacgtgagccggcacggcaggcggcctcctcctcctctcacggcacggcagctacgggggattcctttcccaccgctccttcgctttcccttcctcgcccgccgtaataaatagacaccccctccacaccctctttccccaacctcgtgttgttcggagcgcacacacacacaaccagatctcccccaaatccacccgtcggcacctccgcttcaaggtacgccgctcgtcctccccccccccccctctctaccttctctagatcggcgttccggtccatggttagggcccggtagttctacttctgttcatgtttgtgttagatccgtgtttgtgttagatccgtgctgctagcgttcgtacacggatgcgacctgtacgtcagacacgttctgattgctaacttgccagtgtttctctttggggaatcctgggatggctctagccgttccgcagacgggatcgatttcatgattttttttgtttcgttgcatagggtttggtttgcccttttcctttatttcaatatatgccgtgcacttgtttgtcgggtcatcttttcatgcttttttttgtcttggttgtgatgatgtggtctggttgggcggtcgttctagatcggagtagaattctgtttcaaactacctggtggatttattaattttggatctgtatgtgtgtgccatacatattcatagttacgaattgaagatgatggatggaaatatcgatctaggataggtatacatgttgatgcgggttttactgatgcatatacagagatgctttttgttcgcttggttgtgatgatgtggtgtggttgggcggtcgttcattcgttctagatcggagtagaatactgtttcaaactacctggtgtatttattaattttggaactgtatgtgtgtgtcatacatcttcatagttacgagtttaagatggatggaaatatcgatctaggataggtatacatgttgatgtgggttttactgatgcatatacatgatggcatatgcagcatctattcatatgctctaaccttgagtacctatctattataataaacaagtatgttttataattattttgatcttgatatacttggatgatggcatatgcagcagctatatgtggatttttttagccctgccttcatacgctatttatttgcttggtactgtttcttttgtcgatgctcaccctgttgtttggtgttacttctgcaggtcgactctagaggatccaccatggctagcataacttcgtatagcatacattatacgaagttatccagatctgccctgtccaacaagttcatcggcgacgacatgaagatgacctaccacatggacggctgcgtgaacggccactacttcaccgtgaagggcgagggcagcggcaagccctacgagggcacccagacctccaccttcaaggtgaccatggccaacggcggccccctggccttctccttcgacatcctgtccaccgtgttcatgtacggcaaccgctgcttcaccgcctaccccaccagcatgcccgactacttcaagcaggccttccccgacggcatgtcctacgagagaaccttcacctacgaggacggcggcgtggccaccgccagctgggagatcagcctgaagggcaactgcttcgagcacaagtccaccttccacggcgtgaacttccccgccgacggccccgtgatggccaagaagaccaccggctgggacccctccttcgagaagatgaccgtgtgcgacggcatcttgaagggcgacgtgaccgccttcctgatgctgcagggcggcggcaactacagatgccagttccacacctcctacaagaccaagaagcccgtgaccatgccccccaaccacgtggtggagcaccgcatcgccagaaccgacctggacaagggcggcaacagcgtgcagctgaccgagcacgccgtggcccacatcacctccgtggtgcccttctgaagcggccgcaacctagacttgtccatcttctggattggccaacttaattaatgtatgaaataaaaggatgcacacatagtgacatgctaatcactataatgtgggcatcaaagttgtgtgttatgtgtaattactagttatctgaataaaagagaaagagatcatccatatttcttatcctaaatgaatgtcacgtgtctttataattctttgatgaaccagatgcatttcattaaccaaatccatatacatataaatattaatcatatataattaatatcaattgggttagcaaaacaaatctagtctaggtgtgttttgcgaattcgtaatcatggtcatagctgtttcctgtgtgaaattgttatccgctcacaattccacacaacatacgagccggaagcataaagtgtaaagcctggggtgcctaatgagtgagctaactcacattaattgcgttgcgctcactgcccgctttccagtcgggaaacctgtcgtgccagctgcattaatgaatcggccaacgcgcggggagaggcggtttgcgtattgggcgctcttccgctgatccgatatcgatgggccctggccgaagcttggtcacccggtccgggcctagaaggccagcttcaagtttgtacaaaaaagcaggctccggccagaatggcccggaccgggttaccgaattcgagctcggtaccctgggatccgatatcgatgggccctggccgaagctgggatatcgctatcaactttgtatagaaaagttgggccgaattcgagctcggtacggccagaatggcccggaccgggttaccgaattcgagctcggtaccctggggatccctatagtattttaaaattgcattaacaaacatgtcctaattggtactcctgagatactataccctcctgttttaaaatagttggcattatcgaattatcattttactttttaatgttttctcttcttttaatatattttatgaattttaatgtattttaaaatgttatgcagttcgctctggacttttctgctgcgcctacacttgggtgtactgggcctaaattcagcctgaccgaccgcctgcattgaataatggatgagcaccggtaaaatccgcgtacccaactttcgagaagaaccgagacgtggcgggccgggccaccgacgcacggcaccagcgactgcacacgtcccgccggcgtacgtgtacgtgctgttccctcactggccgcccaatccactcatgcatgcccacgtacacccctgccgtggcgcgcccagatcctaatcctttcgccgttctgcacttctgctgcctataaatggcggcatcgaccgtcacctgcttcaccaccggcgagccacatcgagaacacgatcgagcacacaagcacgaagactcgtttaggagaaaccacaaaccaccaagccgtgcaagcaccaagcttggtcacccggtccgggcctagaaggccagcttcaagtttgtacaaaaaagcaggcttcgaaggagatagaaccgatccaccatgtccaacctgctcacggttcaccagaaccttccggctcttccagtggacgcgacgtccgatgaagtcaggaagaacctcatggacatgttccgcgacaggcaagcgttcagcgagcacacctggaagatgctgctctccgtctgccgctcctgggctgcatggtgcaagctgaacaacaggaagtggttccccgctgagcccgaggacgtgagggattaccttctgtacctgcaagcgcgaggtttgtttctgcttctacctttgatatatatataataattatcattaattagtagtaatataatatttcaaatatttttttcaaaataaaagaatgtagtatatagcaattgcttttctgtagtttataagtgtgtatattttaatttataacttttctaatatatgaccaaaacatggtgatgcctaggtctggcagtgaagaccatccagcaacaccttggacaactgaacatgcttcacaggcgctccggcctcccgcgccccagcgactcgaacgccgtgagcctcgtcatgcgccgcatcaggaaggaaaacgtcgatgccggcgaaagggcaaagcaggccctcgcgttcgagaggaccgatttcgaccaggtccgcagcctgatggagaacagcgacaggtgccaggacattaggaacctggcgttcctcggaattgcatacaacacgctcctcaggatcgcggaaattgcccgcattcgcgtgaaggacattagccgcaccgacggcggcaggatgcttatccacattggcaggaccaagacgctcgtttccaccgcaggcgtcgaaaaggccctcagcctcggagtgaccaagctcgtcgaacgctggatctccgtgtccggcgtcgcggacgacccaaacaactacctcttctgccgcgtccgcaagaacggggtggctgcccctagcgccaccagccaactcagcacgagggccttggaaggtattttcgaggccacccaccgcctgatctacggcgcgaaggatgacagcggtcaacgctacctcgcatggtccgggcactccgcccgcgttggagctgctagggacatggcccgcgccggtgtttccatccccgaaatcatgcaggcgggtggatggacgaacgtgaacattgtcatgaactacattcgcaaccttgacagcgagacgggcgcaatggttcgcctcctggaagatggtgactgagctagacccagctttcttgtacaaagtggccgttaacggatccagacttgtccatcttctggattggccaacttaattaatgtatgaaataaaaggatgcacacatagtgacatgctaatcactataatgtgggcatcaaagttgtgtgttatgtgtaattactagttatctgaataaaagagaaagagatcatccatatttcttatcctaaatgaatgtcacgtgtctttataattctttgatgaaccagatgcatttcattaaccaaatccatatacatataaatattaatcatatataattaatatcaattgggttagcaaaacaaatctagtctaggtgtgttttgcgaattgcggcaagcttgcggccgccccagcttggtcacccggtccgggcctagaaggccgatctcccgggcacccagctttcttgtacaaagtggccgttaacggatcggccagaatggcccggaccgggttaccgaattcgagctcggtaccctgggatcgaccgaagctgaccgaagcttgcggccgcacactgatagtttaaactgaaggcgggaaacgacaatctgatcatgagcggagaattaagggagtcacgttatgacccccgccgatgacgcgggacaagccgttttacgtttggaactgacagaaccgcaacgattgaaggagccactcagccgcgggtttctggagtttaatgagctaagcacatacgtcagaaaccattattgcgcgttcaaaagtcgcctaaggtcactatcagctagcaaatatttcttgtcaaaaatgctccactgacgttccataaattcccctcggtatccaattagagtctcatattcactctcccgggggatctcgactctagaggatcgctcaggaaggccgctgagatagaggcatggcggccaatgcgggcggcggtggagcgggaggaggcagcggcagcggcagcgtggctgcgccggcggtgtgccgccccagcggctcgcggtggacgccgacgccggagcagatcaggatgctgaaggagctctactacggctgcggcatccggtcgcccagctcggagcagatccagcgcatcaccgccatgctgcggcagcacggcaagatcgagggcaagaacgtcttctactggttccagaaccacaaggcccgcgagcgccagaagcgccgcctcaccagcctcgacgtcaacgtgcccgccgccggcgcggccgacgccaccaccagccaactcggcgtcctctcgctgtcgtcgccgccgccttcaggcgcggcgcctccctcgcccaccctcggcttctacgccgccggcaatggcggcggatcggctgtgctgctggacacgagttccgactggggcagcagcggcgctgccatggccaccgagacatgcttcctgcaggactacatgggcgtgacggacacgggcagctcgtcgcagtggccacgcttctcgtcgtcggacacgataatggcggcggccgcggcgcgggcggcgacgacgcgggcgcccgagacgctccctctcttcccgacctgcggcgacgacggcggcagcggtagcagcagctacttgccgttctggggtgccgcgtccacaactgccggcgccacttcttccgttgcgatccagcagcaacaccagctgcaggagcagtacagcttttacagcaacagcaacagcacccagctggccggcaccggcaaccaagacgtatcggcaacagcagcagcagccgccgccctggagctgagcctcagctcatggtgctccccttaccctgctgcagggagtatgtgagagcaacgcgagctgccactgctcttcactgatgtctctggaatggaaggaggaggaagtgagcatagcgttggtgcgttgctgtcaagggcgaattgtaccacatggttaacctagacttgtccatcttctggattggccaacttaattaatgtatgaaataaaaggatgcacacatagtgacatgctaatcactataatgtgggcatcaaagttgtgtgttatgtgtaattactagttatctgaataaaagagaaagagatcatccatatttcttatcctaaatgaatgtcacgtgtctttataattctttgatgaaccagatgcatttcattaaccaaatccatatacatataaatattaatcatatataattaatatcaattgggttagcaaaacaaatctagtctaggtgtgttttgcgaattgcggccgccaccgcggtggagctcgaattccggtcagcttgcatgcctgcagtgcagcgtgacccggtcgtgcccctctctagagataatgagcattgcatgtctaagttataaaaaattaccacatattttttttgtcacacttgtttgaagtgcagtttatctatctttatacatatatttaaactttactctacgaataatataatctatagtactacaataatatcagtgttttagagaatcatataaatgaacagttagacatggtctaaaggacaattgagtattttgacaacaggactctacagttttatctttttagtgtgcatgtgttctcctttttttttgcaaatagcttcacctatataatacttcatccattttattagtacatccatttagggtttagggttaatggtttttatagactaatttttttagtacatctattttattctattttagcctctaaattaagaaaactaaaactctattttagtttttttatttaataatttagatataaaatagaataaaataaagtgactaaaaattaaacaaataccctttaagaaattaaaaaaactaaggaaacatttttcttgtttcgagtagataatgccagcctgttaaacgccgtcgacgagtctaacggacaccaaccagcgaaccagcagcgtcgcgtcgggccaagcgaagcagacggcacggcatctctgtcgctgcctctggacccctctcgagagttccgctccaccgttggacttgctccgctgtcggcatccagaaattgcgtggcggagcggcagacgtgagccggcacggcaggcggcctcctcctcctctcacggcaccggcagctacgggggattcctttcccaccgctccttcgctttcccttcctcgcccgccgtaataaatagacaccccctccacaccctctttccccaacctcgtgttgttcggagcgcacacacacacaaccagatctcccccaaatccacccgtcggcacctccgcttcaaggtacgccgctcgtcctcccccccccccctctctaccttctctagatcggcgttccggtccatgcatggttagggcccggtagttctacttctgttcatgtttgtgttagatccgtgtttgtgttagatccgtgctgctagcgttcgtacacggatgcgacctgtacgtcagacacgttctgattgctaacttgccagtgtttctctttggggaatcctgggatggctctagccgttccgcagacgggatcgatttcatgattttttttgtttcgttgcatagggtttggtttgcccttttcctttatttcaatatatgccgtgcacttgtttgtcgggtcatcttttcatgcttttttttgtcttggttgtgatgatgtggtctggttgggcggtcgttctagatcggagtagaattctgtttcaaactacctggtggatttattaattttggatctgtatgtgtgtgccatacatattcatagttacgaattgaagatgatggatggaaatatcgatctaggataggtatacatgttgatgcgggttttactgatgcatatacagagatgctttttgttcgcttggttgtgatgatgtggtgtggttgggcggtcgttcattcgttctagatcggagtagaatactgtttcaaactacctggtgtatttattaattttggaactgtatgtgtgtgtcatacatcttcatagttacgagtttaagatggatggaaatatcgatctaggataggtatacatgttgatgtgggttttactgatgcatatacatgatggcatatgcagcatctattcatatgctctaaccttgagtacctatctattataataaacaagtatgttttataattattttgatcttgatatacttggatgatggcatatgcagcagctatatgtggatttttttagccctgccttcatacgctatttatttgcttggtactgtttcttttgtcgatgctcaccctgttgtttggtgttacttctgcaggtcgactctagaggatccatggccactgtgaacaactggctcgctttctccctctccccgcaggagctgccgccctcccagacgacggactccacactcatctcggccgccaccgccgaccatgtctccggcgatgtctgcttcaacatcccccaagattggagcatgaggggatcagagctttcggcgctcgtcgcggagccgaagctggaggacttcctcggcggcatctccttctccgagcagcatcacaaggccaactgcaacatgatacccagcactagcagcacagtttgctacgcgagctcaggtgctagcaccggctaccatcaccagctgtaccaccagcccaccagctcagcgctccacttcgcggactccgtaatggtggcctcctcggccggtgtccacgacggcggtgccatgctcagcgcggccgccgctaacggtgtcgctggcgctgccagtgccaacggcggcggcatcgggctgtccatgattaagaactggctgcggagccaaccggcgcccatgcagccgagggtggcggcggctgagggcgcgcaggggctctctttgtccatgaacatggcggggacgacccaaggcgctgctggcatgccacttctcgctggagagcgcgcacgggcgcccgagagtgtatcgacgtcagcacagggtggagccgtcgtcgtcacggcgccgaaggaggatagcggtggcagcggtgttgccggcgctctagtagccgtgagcacggacacgggtggcagcggcggcgcgtcggctgacaacacggcaaggaagacggtggacacgttcgggcagcgcacgtcgatttaccgtggcgtgacaaggcatagatggactgggagatatgaggcacatctttgggataacagttgcagaagggaagggcaaactcgtaagggtcgtcaagtctatttaggtggctatgataaagaggagaaagctgctagggcttatgatcttgctgctctgaagtactggggtgccacaacaacaacaaattttccagtgagtaactacgaaaaggagctcgaggacatgaagcacatgacaaggcaggagtttgtagcgtctctgagaaggaagagcagtggtttctccagaggtgcatccatttacaggggagtgactaggcatcaccaacatggaagatggcaagcacggattggacgagttgcagggaacaaggatctttacttgggcaccttcagcacccaggaggaggcagcggaggcgtacgacatcgcggcgatcaagttccgcggcctcaacgccgtcaccaacttcgacatgagccgctacgacgtgaagagcatcctggacagcagcgccctccccatcggcagcgccgccaagcgcctcaaggaggccgaggccgcagcgtccgcgcagcaccaccacgccggcgtggtgagctacgacgtcggccgcatcgcctcgcagctcggcgacggcggagccctggcggcggcgtacggcgcgcactaccacggcgccgcctggccgaccatcgcgttccagccgggcgccgccagcacaggcctgtaccacccgtacgcgcagcagccaatgcgcggcggcgggtggtgcaagcaggagcaggaccacgcggtgatcgcggccgcgcacagcctgcaggacctccaccacctgaacctgggcgcggccggcgcgcacgactttttctcggcagggcagcaggccgccgccgctgcgatgcacggcctgggtagcatcgacagtgcgtcgctcgagcacagcaccggctccaactccgtcgtctacaacggcggggtcggcgacagcaacggcgccagcgccgtcggcggcagtggcggtggctacatgatgccgatgagcgctgccggagcaaccactacatcggcaatggtgagccacgagcaggtgcatgcacgggcctacgacgaagccaagcaggctgctcagatggggtacgagagctacctggtgaacgcggagaacaatggtggcggaaggatgtctgcatgggggactgtcgtgtctgcagccgcggcggcagcagcaagcagcaacgacaacatggccgccgacgtcggccatggcggcgcgcagctcttcagtgtctggaacgacacttaagcgtacgtgccggcctggctctccgaaagggcgaattccagcacactggcggccgttactagacccaacctagacttgtccatcttctggattggccaacttaattaatgtatgaaataaaaggatgcacacatagtgacatgctaatcactataatgtgggcatcaaagttgtgtgttatgtgtaattactagttatctgaataaaagagaaagagatcatccatatttcttatcctaaatgaatgtcacgtgtctttataattctttgatgaaccagatgcatttcattaaccaaatccatatacatataaatattaatcatatataattaatatcaattgggttagcaaaacaaatctagtctaggtgtgttttgcgaatgcggccgccaccgcggtggagctcgaattccggtcgatccgatgatcctgagcttctagcataacttcgtatagcatacattatacgaagttatccagatctgcccacagcaagcacggcctgaaggaggagatgaccatgaagtaccacatggagggctgcgtgaacggccacaagttcgtgatcaccggcgagggcatcggctaccccttcaagggcaagcagaccatcaacctgtgcgtgatcgagggcggccccctgcccttcagcgaggacatcctgagcgccggcttcaagtacggcgaccggatcttcaccgagtacccccaggacatcgtggactacttcaagaacagctgccccgccggctacacctggggccggagcttcctgttcgaggacggcgccgtgtgcatctgtaacgtggacatcaccgtgagcgtgaaggagaactgcatctaccacaagagcatcttcaacggcgtgaacttccccgccgacggccccgtgatgaagaagatgaccaccaactgggaggccagctgcgagaagatcatgcccgtgcctaagcagggcatcctgaagggcgacgtgagcatgtacctgctgctgaaggacggcggccggtaccggtgccagttcgacaccgtgtacaaggccaagagcgtgcccagcaagatgcccgagtggcacttcatccagcacaagctgctgcgggaggaccggagcgacgccaagaaccagaagtggcagctgaccgagcacgccatcgccttccccagcgccctggcctgaagcggccgcaacctagacttgtccatcttctggattggccaacttaattaatgtatgaaataaaaggatgcacacatagtgacatgctaatcactataatgtgggcatcaaagttgtgtgttatgtgtaattactagttatctgaataaaagagaaagagatcatccatatttcttatcctaaatgaatgtcacgtgtctttataattctttgatgaaccagatgcatttcattaaccaaatccatatacatataaatattaatcatatataattaatatcaattgggttagcaaaacaaatctagtctaggtgtgttttgcgaattagcttggtcacccggtccgggcctagaaggccagcttgcggccgccccgggcaactttattatacaaagttgatagatatcggaccgattaaactttaattcggtccgaagcttgcatgcctgcagtgcagcgtgacccggtcgtgcccctctctagagataatgagcattgcatgtctaagttataaaaaattaccacatattttttttgtcacacttgtttgaagtgcagtttatctatctttatacatatatttaaactttactctacgaataatataatctatagtactacaataatatcagtgttttagagaatcatataaatgaacagttagacatggtctaaaggacaattgagtattttgacaacaggactctacagttttatctttttagtgtgcatgtgttctcctttttttttgcaaatagcttcacctatataatacttcatccattttattagtacatccatttagggtttagggttaatggtttttatagactaatttttttagtacatctattttattctattttagcctctaaattaagaaaactaaaactctattttagtttttttatttaataatttagatataaaatagaataaaataaagtgactaaaaattaaacaaataccctttaagaaattaaaaaaactaaggaaacatttttcttgtttcgagtagataatgccagcctgttaaacgccgtcgacgagtctaacggacaccaaccagcgaaccagcagcgtcgcgtcgggccaagcgaagcagacggcacggcatctctgtcgctgcctctggacccctctcgagagttccgctccaccgttggacttgctccgctgtcggcatccagaaattgcgtggcggagcggcagacgtgagccggcacggcaggcggcctcctcctcctctcacggcaccggcagctacgggggattcctttcccaccgctccttcgctttcccttcctcgcccgccgtaataaatagacaccccctccacaccctctttccccaacctcgtgttgttcggagcgcacacacacacaaccagatctcccccaaatccacccgtcggcacctccgcttcaaggtacgccgctcgtcctcccccccccccctctctaccttctctagatcggcgttccggtccatgcatggttagggcccggtagttctacttctgttcatgtttgtgttagatccgtgtttgtgttagatccgtgctgctagcgttcgtacacggatgcgacctgtacgtcagacacgttctgattgctaacttgccagtgtttctctttggggaatcctgggatggctctagccgttccgcagacgggatcgatttcatgattttttttgtttcgttgcatagggtttggtttgcccttttcctttatttcaatatatgccgtgcacttgtttgtcgggtcatcttttcatgcttttttttgtcttggttgtgatgatgtggtctggttgggcggtcgttctagatcggagtagaattctgtttcaaactacctggtggatttattaattttggatctgtatgtgtgtgccatacatattcatagttacgaattgaagatgatggatggaaatatcgatctaggataggtatacatgttgatgcgggttttactgatgcatatacagagatgctttttgttcgcttggttgtgatgatgtggtgtggttgggcggtcgttcattcgttctagatcggagtagaatactgtttcaaactacctggtgtatttattaattttggaactgtatgtgtgtgtcatacatcttcatagttacgagtttaagatggatggaaatatcgatctaggataggtatacatgttgatgtgggttttactgatgcatatacatgatggcatatgcagcatctattcatatgctctaaccttgagtacctatctattataataaacaagtatgttttataattattttgatcttgatatacttggatgatggcatatgcagcagctatatgtggatttttttagccctgccttcatacgctatttatttgcttggtactgtttcttttgtcgatgctcaccctgttgtttggtgttacttctgcaggtcgactttaacttagcctaggatccacacgacaccatgtcccccgagcgccgccccgtcgagatccgcccggccaccgccgccgacatggccgccgtgtgcgacatcgtgaaccactacatcgagacctccaccgtgaacttccgcaccgagccgcagaccccgcaggagtggatcgacgacctggagcgcctccaggaccgctacccgtggctcgtggccgaggtggagggcgtggtggccggcatcgcctacgccggcccgtggaaggcccgcaacgcctacgactggaccgtggagtccaccgtgtacgtgtcccaccgccaccagcgcctcggcctcggctccaccctctacacccacctcctcaagagcatggaggcccagggcttcaagtccgtggtggccgtgatcggcctcccgaacgacccgtccgtgcgcctccacgaggccctcggctacaccgcccgcggcaccctccgcgccgccggctacaagcacggcggctggcacgacgtcggcttctggcagcgcgacttcgagctgccggccccgccgcgcccggtgcgcccggtgacgcagatctgagtcgaaacctagacttgtccatcttctggattggccaacttaattaatgtatgaaataaaaggatgcacacatagtgacatgctaatcactataatgtgggcatcaaagttgtgtgttatgtgtaattactagttatctgaataaaagagaaagagatcatccatatttcttatcctaaatgaatgtcacgtgtctttataattctttgatgaaccagatgcatttcattaaccaaatccatatacatataaatattaatcatatataattaatatcaattgggttagcaaaacaaatctagtctaggtgtgttttgcgaattgcggccgccaccgcggtggagctcgaattcattccgattaatcgtggcctcttgctcttcaggatgaagagctatgtttaaacgtgcaagcgctactagacaattcagtacattaaaaacgtccgcaatgtgttattaagttgtctaagcgtcaatttgtttacaccacaatatatcctgccac

SEQ ID NO: 2 - DNA, 18360 bp, synthetic construct
  misc_feature 1..18360: note = PHP46332
  source 1..18360: mol_type = other DNA
gtttacccgccaatatatcctgtcaaacactgatagtttaaactgaaggcgggaaacgacaatctgatcatgagcggagaattaagggagtcacgttatgacccccgccgatgacgcgggacaagccgttttacgtttggaactgacagaaccgcaacgttgaaggagccactcagcaagctggtacgattgtaatacgactcactatagggcgaattgagcgctgtttaaacgctcttcaactggaagagcggttaccagagctggtcacctttgtccaccaagatggaactgcggccgctcattaattaagtcaggcgcgcctctagttgaagacacgttcatgtcttcatcgtaagaagacactcagtagtcttcggccagaatggccatctggattcagcaggcctagaaggccatttaaatcctgaggatctggtcttcctaaggacccgggatatcgctatcaactttgtatagaaaagttgggccgaattcgagctcggtacggccagaatggcccggaccgggttaccgaattcgagctcggtaccctgggatccggtgcgggcctcttcgctattacgccagctggcgaaagggggatgtgctgcaaggcgattaagttgggtaacgccagggttttcccagtcacgacgttgtaaaacgacggccagtgccaagctcagatcagcttgcatgcctgcagtgcagcgtgacccggtcgtgcccctctctagagataatgagcattgcatgtctaagttataaaaaattaccacatattttttttgtcacacttgtttgaagtgcagtttatctatctttatacatatatttaaactttactctacgaataatataatctatagtactacaataatatcagtgttttagagaatcatataaatgaacagttagacatggtctaaaggacaattgagtattttgacaacaggactctacagttttatctttttagtgtgcatgtgttctcctttttttttgcaaatagcttcacctatataatacttcatccattttattagtacatccatttagggtttagggttaatggtttttatagactaatttttttagtacatctattttattctattttagcctctaaattaagaaaactaaaactctattttagtttttttatttaataatttagatataaaatagaataaaataaagtgactaaaaattaaacaaataccctttaagaaattaaaaaaactaaggaaacatttttcttgtttcgagtagataatgccagcctgttaaacgccgtcgacgagtctaacggacaccaaccagcgaaccagcagcgtcgcgtcgggccaagcgaagcagacggcacggcatctctgtcgctgcctctggacccctctcgagagttccgctccaccgttggacttgctccgctgtcggcatccagaaattgcgtggcggagcggcagacgtgagccggcacggcaggcggcctcctcctcctctcacggcacggcagctacgggggattcctttcccaccgctccttcgctttcccttcctcgcccgccgtaataaatagacaccccctccacaccctctttccccaacctcgtgttgttcggagcgcacacacacacaaccagatctcccccaaatccacccgtcggcacctccgcttcaaggtacgccgctcgtcctccccccccccccctctctaccttctctagatcggcgttccggtccatggttagggcccggtagttctacttctgttcatgtttgtgttagatccgtgtttgtgttagatccgtgctgctagcgttcgtacacggatgcgacctgtacgtcagacacgttctgattgctaacttgccagtgtttctctttggggaatcctgggatggctctagccgttccgcagacgggatcgatttcatgattttttttgtttcgttgcatagggtttggtttgcccttttcctttatttcaatatatgccgtgcacttgtttgtcgggtcatcttttcatgcttttttttgtcttggttgtgatgatgtggtctggttgggcggtcgttctagatcggagtagaattctgtttcaaactacctggtggatttattaattttggatctgtatgtgtgtgccatacatattcatagttacgaattgaagatgatggatggaaatatcgatctaggataggtatacatgttgatgcgggttttactgatgcatatacagagatgctttttgttcgcttggttgtgatgatgtggtgtggttgggcggtcgttcattcgttctagatcggagtagaatactgtttcaaactacctggtgtatttattaattttggaactgtatgtgtgtgtcatacatcttcatagttacgagtttaagatggatggaaatatcgatctaggataggtatacatgttgatgtgggttttactgatgcatatacatgatggcatatgcagcatctattcatatgctctaaccttgagtacctatctattataataaacaagtatgttttataattattttgatcttgatatacttggatgatggcatatgcagcagctatatgtggatttttttagccctgccttcatacgctatttatttgcttggtactgtttcttttgtcgatgctcaccctgttgtttggtgttacttctgcaggtcgactctagaggatccaccatggctagcataacttcgtatagcatacattatacgaagttatccagatctgccctgtccaacaagttcatcggcgacgacatgaagatgacctaccacatggacggctgcgtgaacggccactacttcaccgtgaagggcgagggcagcggcaagccctacgagggcacccagacctccaccttcaaggtgaccatggccaacggcggccccctggccttctccttcgacatcctgtccaccgtgttcatgtacggcaaccgctgcttcaccgcctaccccaccagcatgcccgactacttcaagcaggccttccccgacggcatgtcctacgagagaaccttcacctacgaggacggcggcgtggccaccgccagctgggagatcagcctgaagggcaactgcttcgagcacaagtccaccttccacggcgtgaacttccccgccgacggccccgtgatggccaagaagaccaccggctgggacccctccttcgagaagatgaccgtgtgcgacggcatcttgaagggcgacgtgaccgccttcctgatgctgcagggcggcggcaactacagatgccagttccacacctcctacaagaccaagaagcccgtgaccatgccccccaaccacgtggtggagcaccgcatcgccagaaccgacctggacaagggcggcaacagcgtgcagctgaccgagcacgccgtggcccacatcacctccgtggtgcccttctgaagcggccgcaacctagacttgtccatcttctggattggccaacttaattaatgtatgaaataaaaggatgcacacatagtgacatgctaatcactataatgtgggcatcaaagttgtgtgttatgtgtaattactagttatctgaataaaagagaaagagatcatccatatttcttatcctaaatgaatgtcacgtgtctttataattctttgatgaaccagatgcatttcattaaccaaatccatatacatataaatattaatcatatataattaatatcaattgggttagcaaaacaaatctagtctaggtgtgttttgcgaattcgtaatcatggtcatagctgtttcctgtgtgaaattgttatccgctcacaattccacacaacatacgagccggaagcataaagtgtaaagcctggggtgcctaatgagtgagctaactcacattaattgcgttgcgctcactgcccgctttccagtcgggaaacctgtcgtgccagctgcattaatgaatcggccaacgcgcggggagaggcggtttgcgtattgggcgctcttccgctgatccgatatcgatgggccctggccgaagcttggtcacccggtccgggcctagaaggccagcttcaagtttgtacaaaaaagcaggctccggccagaatggcccggaccggaattcgagctcggatccactagtaacggccgccagtgtgctggaattcgcccttgacggcccgggctggtatttcaaaactatagtattttaaaattgcattaacaaacatgtcctaattggtactcctgagatactataccctcctgttttaaaatagttggcattatcgaattatcattttactttttaatgttttctcttcttttaatatattttatgaattttaatgtattttaaaatgttatgcagttcgctctggacttttctgctgcgcctacacttgggtgtactgggcctaaattcagcctgaccgaccgcctgcattgaataatggatgagcaccggtaaaatccgcgtacccaactttcgagaagaaccgagacgtggcgggccgggccaccgacgcacggcaccagcgactgcacacgtcccgccggcgtacgtgtacgtgctgttccctcactggccgcccaatccactcatgcatgcccacgtacacccctgccgtggcgcgcccagatcctaatcctttcgccgttctgcacttctgctgcctataaatggcggcatcgaccgtcacctgcttcaccaccggcgagccacatcgagaacacgatcgagcacacaagcacgaagactcgtttaggagaaaccacaaaccaccaagccgtgcaagcaccaagcttggtcacccggtccgggcctagaaggccagcttcaagtttgtacaaaaaagcaggcttcgaaggagatagaaccgatccaccatgtccaacctgctcacggttcaccagaaccttccggctcttccagtggacgcgacgtccgatgaagtcaggaagaacctcatggacatgttccgcgacaggcaagcgttcagcgagcacacctggaagatgctgctctccgtctgccgctcctgggctgcatggtgcaagctgaacaacaggaagtggttccccgctgagcccgaggacgtgagggattaccttctgtacctgcaagcgcgaggtttgtttctgcttctacctttgatatatatataataattatcattaattagtagtaatataatatttcaaatatttttttcaaaataaaagaatgtagtatatagcaattgcttttctgtagtttataagtgtgtatattttaatttataacttttctaatatatgaccaaaacatggtgatgcctaggtctggcagtgaagaccatccagcaacaccttggacaactgaacatgcttcacaggcgctccggcctcccgcgccccagcgactcgaacgccgtgagcctcgtcatgcgccgcatcaggaaggaaaacgtcgatgccggcgaaagggcaaagcaggccctcgcgttcgagaggaccgatttcgaccaggtccgcagcctgatggagaacagcgacaggtgccaggacattaggaacctggcgttcctcggaattgcatacaacacgctcctcaggatcgcggaaattgcccgcattcgcgtgaaggacattagccgcaccgacggcggcaggatgcttatccacattggcaggaccaagacgctcgtttccaccgcaggcgtcgaaaaggccctcagcctcggagtgaccaagctcgtcgaacgctggatctccgtgtccggcgtcgcggacgacccaaacaactacctcttctgccgcgtccgcaagaacggggtggctgcccctagcgccaccagccaactcagcacgagggccttggaaggtattttcgaggccacccaccgcctgatctacggcgcgaaggatgacagcggtcaacgctacctcgcatggtccgggcactccgcccgcgttggagctgctagggacatggcccgcgccggtgtttccatccccgaaatcatgcaggcgggtggatggacgaacgtgaacattgtcatgaactacattcgcaaccttgacagcgagacgggcgcaatggttcgcctcctggaagatggtgactgagctagacccagctttcttgtacaaagtggccgttaacggatccagacttgtccatcttctggattggccaacttaattaatgtatgaaataaaaggatgcacacatagtgacatgctaatcactataatgtgggcatcaaagttgtgtgttatgtgtaattactagttatctgaataaaagagaaagagatcatccatatttcttatcctaaatgaatgtcacgtgtctttataattctttgatgaaccagatgcatttcattaaccaaatccatatacatataaatattaatcatatataattaatatcaattgggttagcaaaacaaatctagtctaggtgtgttttgcgaatgcggccgcgactctagatcataatcagccataccacattcgaatgtgagttgatccccggcggtgtcccccactgaagaaactatgtgctgtagtatagccgctggctagctagctagttgagtcatttagcggcgatgattgagtaataatgtgtcacgcatcaccatgcatgggtggcagtctcagtgtgagcaatgacctgaatgaacaattgaaatgaaaagaaaaaagtattgttccaaattaaacgttttaaccttttaataggtttatacaataattgatatatgttttctgtatatgtctaatttgttatcatccatttagatatagacgaaaaaaaatctaagaactaaaacaaatgctaatttgaaatgaagggagtatatattgggataatgtcgatgagatccctcgtaatatcaccgacatcacacgtgtccagttaatgtatcagtgatacgtgtattcacatttgttgcgcgtaggcgtacccaacaattttgatcgactatcagaaagtcaacggaagcgagtcgacctcgagggggggcccggtaccaagatatcaaccgcggaaagatctaagcatgcaagggcccaagtcgacctgcagaagcttcggtccgggcctagaaggccgatctcccgggcacccagctttcttgtacaaagtggccgttaacggatcggccagaatggcccggaccgggttaccgaattcgagctcggtaccctgggatcgaccgaagctgaccgaagcttgcggccgcacactgatagtttaaactgaaggcgggaaacgacaatctgatcatgagcggagaattaagggagtcacgttatgacccccgccgatgacgcgggacaagccgttttacgtttggaactgacagaaccgcaacgattgaaggagccactcagccgcgggtttctggagtttaatgagctaagcacatacgtcagaaaccattattgcgcgttcaaaagtcgcctaaggtcactatcagctagcaaatatttcttgtcaaaaatgctccactgacgttccataaattcccctcggtatccaattagagtctcatattcactctcccgggggatctcgactctagaggatcgctcaggaaggccgctgagatagaggcatggcggccaatgcgggcggcggtggagcgggaggaggcagcggcagcggcagcgtggctgcgccggcggtgtgccgccccagcggctcgcggtggacgccgacgccggagcagatcaggatgctgaaggagctctactacggctgcggcatccggtcgcccagctcggagcagatccagcgcatcaccgccatgctgcggcagcacggcaagatcgagggcaagaacgtcttctactggttccagaaccacaaggcccgcgagcgccagaagcgccgcctcaccagcctcgacgtcaacgtgcccgccgccggcgcggccgacgccaccaccagccaactcggcgtcctctcgctgtcgtcgccgccgccttcaggcgcggcgcctccctcgcccaccctcggcttctacgccgccggcaatggcggcggatcggctgtgctgctggacacgagttccgactggggcagcagcggcgctgccatggccaccgagacatgcttcctgcaggactacatgggcgtgacggacacgggcagctcgtcgcagtggccacgcttctcgtcgtcggacacgataatggcggcggccgcggcgcgggcggcgacgacgcgggcgcccgagacgctccctctcttcccgacctgcggcgacgacggcggcagcggtagcagcagctacttgccgttctggggtgccgcgtccacaactgccggcgccacttcttccgttgcgatccagcagcaacaccagctgcaggagcagtacagcttttacagcaacagcaacagcacccagctggccggcaccggcaaccaagacgtatcggcaacagcagcagcagccgccgccctggagctgagcctcagctcatggtgctccccttaccctgctgcagggagtatgtgagagcaacgcgagctgccactgctcttcactgatgtctctggaatggaaggaggaggaagtgagcatagcgttggtgcgttgctgtcaagggcgaattgtaatacgactcactagtgggtaccagagctccctaggcttaagctagacttgtccatcttctggattggccaacttaattaatgtatgaaataaaaggatgcacacatagtgacatgctaatcactataatgtgggcatcaaagttgtgtgttatgtgtaattactagttatctgaataaaagagaaagagatcatccatatttcttatcctaaatgaatgtcacgtgtctttataattctttgatgaaccagatgcatttcattaaccaaatccatatacatataaatattaatcatatataattaatatcaattgggttagcaaaacaaatctagtctaggtgtgttttgcgggatccacgatatcctgcaggaattcccatggagtcaaagattcaaatagaggacctaacagaactcgccgtaaagactggcgaacagttcatacagagtctcttacgactcaatgacaagaagaaaatcttcgtcaacatggtggagcacgacacgcttgtctactccaaaaatatcaaagatacagtctcagaagaccaaagggcaattgagacttttcaacaaagggtaatatccggaaacctcctcggattccattgcccagctatctgtcactttattgtgaagatagtggaaaaggaaggtggctcctacaaatgccatcattgcgataaaggaaaggccatcgttgaagatgcctctgccgacagtggtcccaaagatggacccccacccacgaggagcatcgtggaaaaagaagacgttccaaccacgtcttcaaagcaagtggattgatgtgatatctccactgacgtaagggatgacgcacaatcccactaagcttgcatgcctgcagtgcagcgtgacccggtcgtgcccctctctagagataatgagcattgcatgtctaagttataaaaaattaccacatattttttttgtcacacttgtttgaagtgcagtttatctatctttatacatatatttaaactttactctacgaataatataatctatagtactacaataatatcagtgttttagagaatcatataaatgaacagttagacatggtctaaaggacaattgagtattttgacaacaggactctacagttttatctttttagtgtgcatgtgttctcctttttttttgcaaatagcttcacctatataatacttcatccattttattagtacatccatttagggtttagggttaatggtttttatagactaatttttttagtacatctattttattctattttagcctctaaattaagaaaactaaaactctattttagtttttttatttaataatttagatataaaatagaataaaataaagtgactaaaaattaaacaaataccctttaagaaattaaaaaaactaaggaaacatttttcttgtttcgagtagataatgccagcctgttaaacgccgtcgacgagtctaacggacaccaaccagcgaaccagcagcgtcgcgtcgggccaagcgaagcagacggcacggcatctctgtcgctgcctctggacccctctcgagagttccgctccaccgttggacttgctccgctgtcggcatccagaaattgcgtggcggagcggcagacgtgagccggcacggcaggcggcctcctcctcctctcacggcaccggcagctacgggggattcctttcccaccgctccttcgctttcccttcctcgcccgccgtaataaatagacaccccctccacaccctctttccccaacctcgtgttgttcggagcgcacacacacacaaccagatctcccccaaatccacccgtcggcacctccgcttcaaggtacgccgctcgtcctcccccccccccctctctaccttctctagatcggcgttccggtccatgcatggttagggcccggtagttctacttctgttcatgtttgtgttagatccgtgtttgtgttagatccgtgctgctagcgttcgtacacggatgcgacctgtacgtcagacacgttctgattgctaacttgccagtgtttctctttggggaatcctgggatggctctagccgttccgcagacgggatcgatttcatgattttttttgtttcgttgcatagggtttggtttgcccttttcctttatttcaatatatgccgtgcacttgtttgtcgggtcatcttttcatgcttttttttgtcttggttgtgatgatgtggtctggttgggcggtcgttctagatcggagtagaattctgtttcaaactacctggtggatttattaattttggatctgtatgtgtgtgccatacatattcatagttacgaattgaagatgatggatggaaatatcgatctaggataggtatacatgttgatgcgggttttactgatgcatatacagagatgctttttgttcgcttggttgtgatgatgtggtgtggttgggcggtcgttcattcgttctagatcggagtagaatactgtttcaaactacctggtgtatttattaattttggaactgtatgtgtgtgtcatacatcttcatagttacgagtttaagatggatggaaatatcgatctaggataggtatacatgttgatgtgggttttactgatgcatatacatgatggcatatgcagcatctattcatatgctctaaccttgagtacctatctattataataaacaagtatgttttataattattttgatcttgatatacttggatgatggcatatgcagcagctatatgtggatttttttagccctgccttcatacgctatttatttgcttggtactgtttcttttgtcgatgctcaccctgttgtttggtgttacttctgcaggtcgactctagaggatccatggccactgtgaacaactggctcgctttctccctctccccgcaggagctgccgccctcccagacgacggactccacactcatctcggccgccaccgccgaccatgtctccggcgatgtctgcttcaacatcccccaagattggagcatgaggggatcagagctttcggcgctcgtcgcggagccgaagctggaggacttcctcggcggcatctccttctccgagcagcatcacaaggccaactgcaacatgatacccagcactagcagcacagtttgctacgcgagctcaggtgctagcaccggctaccatcaccagctgtaccaccagcccaccagctcagcgctccacttcgcggactccgtaatggtggcctcctcggccggtgtccacgacggcggtgccatgctcagcgcggccgccgctaacggtgtcgctggcgctgccagtgccaacggcggcggcatcgggctgtccatgattaagaactggctgcggagccaaccggcgcccatgcagccgagggtggcggcggctgagggcgcgcaggggctctctttgtccatgaacatggcggggacgacccaaggcgctgctggcatgccacttctcgctggagagcgcgcacgggcgcccgagagtgtatcgacgtcagcacagggtggagccgtcgtcgtcacggcgccgaaggaggatagcggtggcagcggtgttgccggcgctctagtagccgtgagcacggacacgggtggcagcggcggcgcgtcggctgacaacacggcaaggaagacggtggacacgttcgggcagcgcacgtcgatttaccgtggcgtgacaaggcatagatggactgggagatatgaggcacatctttgggataacagttgcagaagggaagggcaaactcgtaagggtcgtcaagtctatttaggtggctatgataaagaggagaaagctgctagggcttatgatcttgctgctctgaagtactggggtgccacaacaacaacaaattttccagtgagtaactacgaaaaggagctcgaggacatgaagcacatgacaaggcaggagtttgtagcgtctctgagaaggaagagcagtggtttctccagaggtgcatccatttacaggggagtgactaggcatcaccaacatggaagatggcaagcacggattggacgagttgcagggaacaaggatctttacttgggcaccttcagcacccaggaggaggcagcggaggcgtacgacatcgcggcgatcaagttccgcggcctcaacgccgtcaccaacttcgacatgagccgctacgacgtgaagagcatcctggacagcagcgccctccccatcggcagcgccgccaagcgcctcaaggaggccgaggccgcagcgtccgcgcagcaccaccacgccggcgtggtgagctacgacgtcggccgcatcgcctcgcagctcggcgacggcggagccctggcggcggcgtacggcgcgcactaccacggcgccgcctggccgaccatcgcgttccagccgggcgccgccagcacaggcctgtaccacccgtacgcgcagcagccaatgcgcggcggcgggtggtgcaagcaggagcaggaccacgcggtgatcgcggccgcgcacagcctgcaggacctccaccacctgaacctgggcgcggccggcgcgcacgactttttctcggcagggcagcaggccgccgccgctgcgatgcacggcctgggtagcatcgacagtgcgtcgctcgagcacagcaccggctccaactccgtcgtctacaacggcggggtcggcgacagcaacggcgccagcgccgtcggcggcagtggcggtggctacatgatgccgatgagcgctgccggagcaaccactacatcggcaatggtgagccacgagcaggtgcatgcacgggcctacgacgaagccaagcaggctgctcagatggggtacgagagctacctggtgaacgcggagaacaatggtggcggaaggatgtctgcatgggggactgtcgtgtctgcagccgcggcggcagcagcaagcagcaacgacaacatggccgccgacgtcggccatggcggcgcgcagctcttcagtgtctggaacgacacttaagcgtacgtgccggcctggctctccgaaagggcgaattccagcacactggcggccgttactagacccaacctagacttgtccatcttctggattggccaacttaattaatgtatgaaataaaaggatgcacacatagtgacatgctaatcactataatgtgggcatcaaagttgtgtgttatgtgtaattactagttatctgaataaaagagaaagagatcatccatatttcttatcctaaatgaatgtcacgtgtctttataattctttgatgaaccagatgcatttcattaaccaaatccatatacatataaatattaatcatatataattaatatcaattgggttagcaaaacaaatctagtctaggtgtgttttgcgaatgcggccgccaccgcggtggagctcgaattccggtcgatccgatgatcctgagcttctagcataacttcgtatagcatacattatacgaagttatccagatctgcccacagcaagcacggcctgaaggaggagatgaccatgaagtaccacatggagggctgcgtgaacggccacaagttcgtgatcaccggcgagggcatcggctaccccttcaagggcaagcagaccatcaacctgtgcgtgatcgagggcggccccctgcccttcagcgaggacatcctgagcgccggcttcaagtacggcgaccggatcttcaccgagtacccccaggacatcgtggactacttcaagaacagctgccccgccggctacacctggggccggagcttcctgttcgaggacggcgccgtgtgcatctgtaacgtggacatcaccgtgagcgtgaaggagaactgcatctaccacaagagcatcttcaacggcgtgaacttccccgccgacggccccgtgatgaagaagatgaccaccaactgggaggccagctgcgagaagatcatgcccgtgcctaagcagggcatcctgaagggcgacgtgagcatgtacctgctgctgaaggacggcggccggtaccggtgccagttcgacaccgtgtacaaggccaagagcgtgcccagcaagatgcccgagtggcacttcatccagcacaagctgctgcgggaggaccggagcgacgccaagaaccagaagtggcagctgaccgagcacgccatcgccttccccagcgccctggcctgaagcggccgcaacctagacttgtccatcttctggattggccaacttaattaatgtatgaaataaaaggatgcacacatagtgacatgctaatcactataatgtgggcatcaaagttgtgtgttatgtgtaattactagttatctgaataaaagagaaagagatcatccatatttcttatcctaaatgaatgtcacgtgtctttataattctttgatgaaccagatgcatttcattaaccaaatccatatacatataaatattaatcatatataattaatatcaattgggttagcaaaacaaatctagtctaggtgtgttttgcgaattagcttggtcacccggtccgggcctagaaggccagcttcggccgccccgggcaactttattatacaaagttgatagatatcggaccgattaaactttaattcggtccgaagcttgcatgcctgcagtgcagcgtgacccggtcgtgcccctctctagagataatgagcattgcatgtctaagttataaaaaattaccacatattttttttgtcacacttgtttgaagtgcagtttatctatctttatacatatatttaaactttactctacgaataatataatctatagtactacaataatatcagtgttttagagaatcatataaatgaacagttagacatggtctaaaggacaattgagtattttgacaacaggactctacagttttatctttttagtgtgcatgtgttctcctttttttttgcaaatagcttcacctatataatacttcatccattttattagtacatccatttagggtttagggttaatggtttttatagactaatttttttagtacatctattttattctattttagcctctaaattaagaaaactaaaactctattttagtttttttatttaataatttagatataaaatagaataaaataaagtgactaaaaattaaacaaataccctttaagaaattaaaaaaactaaggaaacatttttcttgtttcgagtagataatgccagcctgttaaacgccgtcgacgagtctaacggacaccaaccagcgaaccagcagcgtcgcgtcgggccaagcgaagcagacggcacggcatctctgtcgctgcctctggacccctctcgagagttccgctccaccgttggacttgctccgctgtcggcatccagaaattgcgtggcggagcggcagacgtgagccggcacggcaggcggcctcctcctcctctcacggcaccggcagctacgggggattcctttcccaccgctccttcgctttcccttcctcgcccgccgtaataaatagacaccccctccacaccctctttccccaacctcgtgttgttcggagcgcacacacacacaaccagatctcccccaaatccacccgtcggcacctccgcttcaaggtacgccgctcgtcctcccccccccccctctctaccttctctagatcggcgttccggtccatgcatggttagggcccggtagttctacttctgttcatgtttgtgttagatccgtgtttgtgttagatccgtgctgctagcgttcgtacacggatgcgacctgtacgtcagacacgttctgattgctaacttgccagtgtttctctttggggaatcctgggatggctctagccgttccgcagacgggatcgatttcatgattttttttgtttcgttgcatagggtttggtttgcccttttcctttatttcaatatatgccgtgcacttgtttgtcgggtcatcttttcatgcttttttttgtcttggttgtgatgatgtggtctggttgggcggtcgttctagatcggagtagaattctgtttcaaactacctggtggatttattaattttggatctgtatgtgtgtgccatacatattcatagttacgaattgaagatgatggatggaaatatcgatctaggataggtatacatgttgatgcgggttttactgatgcatatacagagatgctttttgttcgcttggttgtgatgatgtggtgtggttgggcggtcgttcattcgttctagatcggagtagaatactgtttcaaactacctggtgtatttattaattttggaactgtatgtgtgtgtcatacatcttcatagttacgagtttaagatggatggaaatatcgatctaggataggtatacatgttgatgtgggttttactgatgcatatacatgatggcatatgcagcatctattcatatgctctaaccttgagtacctatctattataataaacaagtatgttttataattattttgatcttgatatacttggatgatggcatatgcagcagctatatgtggatttttttagccctgccttcatacgctatttatttgcttggtactgtttcttttgtcgatgctcaccctgttgtttggtgttacttctgcaggtcgactttaacttagcctaggatccacacgacaccatgtcccccgagcgccgccccgtcgagatccgcccggccaccgccgccgacatggccgccgtgtgcgacatcgtgaaccactacatcgagacctccaccgtgaacttccgcaccgagccgcagaccccgcaggagtggatcgacgacctggagcgcctccaggaccgctacccgtggctcgtggccgaggtggagggcgtggtggccggcatcgcctacgccggcccgtggaaggcccgcaacgcctacgactggaccgtggagtccaccgtgtacgtgtcccaccgccaccagcgcctcggcctcggctccaccctctacacccacctcctcaagagcatggaggcccagggcttcaagtccgtggtggccgtgatcggcctcccgaacgacccgtccgtgcgcctccacgaggccctcggctacaccgcccgcggcaccctccgcgccgccggctacaagcacggcggctggcacgacgtcggcttctggcagcgcgacttcgagctgccggccccgccgcgcccggtgcgcccggtgacgcagatctgagtcgaaacctagacttgtccatcttctggattggccaacttaattaatgtatgaaataaaaggatgcacacatagtgacatgctaatcactataatgtgggcatcaaagttgtgtgttatgtgtaattactagttatctgaataaaagagaaagagatcatccatatttcttatcctaaatgaatgtcacgtgtctttataattctttgatgaaccagatgcatttcattaaccaaatccatatacatataaatattaatcatatataattaatatcaattgggttagcaaaacaaatctagtctaggtgtgttttgcgaatgcggccgccaccgcggtggagctcgaattcattccgattaatcgtggcctcttgctcttcaggatgaagagctatgtttaaacgtgcaagcgctactagacaattcagtacattaaaaacgtccgcaatgtgttattaagttgtctaagcgtcaatttgtttacaccacaatatatcctgccac

SEQ ID NO: 3 - DNA, 6270 bp, synthetic construct
  misc_feature 1..6270: note = PHP5096
  source 1..6270: mol_type = other DNA
gacctccgtgtccaggcacatctacttcttctccgctcgcggcaggatcgaccccctcgtgtacctcgacgagttcctcaggaactcagagcccgtgctcaagagggtgaacaggaccggcaactcctcctccaacaagcaggagtaccagctcctcaaggacaacctcgtgaggtcctacaacaaggccctcaagaagaacgccccctactccatcttcgccatcaagaacggccccaagtcccacatcggtaggcacctcatgacctccttcctctcaatgaagggcctcaccgagctcaccaacgtggtgggcaactggtccgacaagagggcctccgccgtggccaggaccacctacacccaccagatcaccgccatccccgaccactacttcgccctcgtgtcaaggtactacgcctacgaccccatctccaaggagatgatcgccctcaaggacgagactaaccccatcgaggagtggcagcacatcgagcagctcaagggctccgccgagggctccatcaggtaccccgcctggaacggcatcatctcccaggaggtgctcgactacctctcctcctacatcaacaggaggatctgagttaacctagacttgtccatcttctggattggccaacttaattaatgtatgaaataaaaggatgcacacatagtgacatgctaatcactataatgtgggcatcaaagttgtgtgttatgtgtaattactagttatctgaataaaagagaaagagatcatccatatttcttatcctaaatgaatgtcacgtgtctttataattctttgatgaaccagatgcatttcattaaccaaatccatatacatataaatattaatcatatataattaatatcaattgggttagcaaaacaaatctagtctaggtgtgttttgcgaattgcggccgcgatctggggaattcgtaatcatggtcatagctgtttcctgtgtgaaattgttatccgctcacaattccacacaacatacgagccggaagcataaagtgtaaagcctggggtgcctaatgagtgagctaactcacattaattgcgttgcgctcactgcccgctttccagtcgggaaacctgtcgtgccagctgcattaatgaatcggccaacgcgcggggagaggcggtttgcgtattgggcgctcttccgcttcctcgctcactgactcgctgcgctcggtcgttcggctgcggcgagcggtatcagctcactcaaaggcggtaatacggttatccacagaatcaggggataacgcaggaaagaacatgtgagcaaaaggccagcaaaaggccaggaaccgtaaaaaggccgcgttgctggcgtttttccataggctccgcccccctgacgagcatcacaaaaatcgacgctcaagtcagaggtggcgaaacccgacaggactataaagataccaggcgtttccccctggaagctccctcgtgcgctctcctgttccgaccctgccgcttaccggatacctgtccgcctttctcccttcgggaagcgtggcgctttctcatagctcacgctgtaggtatctcagttcggtgtaggtcgttcgctccaagctgggctgtgtgcacgaaccccccgttcagcccgaccgctgcgccttatccggtaactatcgtcttgagtccaacccggtaagacacgacttatcgccactggcagcagccactggtaacaggattagcagagcgaggtatgtaggcggtgctacagagttcttgaagtggtggcctaactacggctacactagaaggacagtatttggtatctgcgctctgctgaagccagttaccttcggaaaaagagttggtagctcttgatccggcaaacaaaccaccgctggtagcggtggtttttttgtttgcaagcagcagattacgcgcagaaaaaaaggatctcaagaagatcctttgatcttttctacggggtctgacgctcagtggaacgaaaactcacgttaagggattttggtcatgagattatcaaaaaggatcttcacctagatccttttaaattaaaaatgaagttttaaatcaatctaaagtatatatgagtaaacttggtctgacagttaccaatgcttaatcagtgaggcacctatctcagcgatctgtctatttcgttcatccatagttgcctgactccccgtcgtgtagataactacgatacgggagggcttaccatctggccccagtgctgcaatgataccgcgagacccacgctcaccggctccagatttatcagcaataaaccagccagccggaagggccgagcgcagaagtggtcctgcaactttatccgcctccatccagtctattaattgttgccgggaagctagagtaagtagttcgccagttaatagtttgcgcaacgttgttgccattgctacaggcatcgtggtgtcacgctcgtcgtttggtatggcttcattcagctccggttcccaacgatcaaggcgagttacatgatcccccatgttgtgcaaaaaagcggttagctccttcggtcctccgatcgttgtcagaagtaagttggccgcagtgttatcactcatggttatggcagcactgcataattctcttactgtcatgccatccgtaagatgcttttctgtgactggtgagtactcaaccaagtcattctgagaatagtgtatgcggcgaccgagttgctcttgcccggcgtcaatacgggataataccgcgccacatagcagaactttaaaagtgctcatcattggaaaacgttcttcggggcgaaaactctcaaggatcttaccgctgttgagatccagttcgatgtaacccactcgtgcacccaactgatcttcagcatcttttactttcaccagcgtttctgggtgagcaaaaacaggaaggcaaaatgccgcaaaaaagggaataagggcgacacggaaatgttgaatactcatactcttcctttttcaatattattgaagcatttatcagggttattgtctcatgagcggatacatatttgaatgtatttagaaaaataaacaaataggggttccgcgcacatttccccgaaaagtgccacctgacgtctaagaaaccattattatcatgacattaacctataaaaataggcgtatcacgaggccctttcgtctcgcgcgtttcggtgatgacggtgaaaacctctgacacatgcagctcccggagacggtcacagcttgtctgtaagcggatgccgggagcagacaagcccgtcagggcgcgtcagcgggtgttggcgggtgtcggggctggcttaactatgcggcatcagagcagattgtactgagagtgcaccatatgcggtgtgaaataccgcacagatgcgtaaggagaaaataccgcatcaggcgccattcgccattcaggctgcgcaactgttgggaagggcgatcggtgcgggcctcttcgctattacgccagctggcgaaagggggatgtgctgcaaggcgattaagttgggtaacgccagggttttcccagtcacgacgttgtaaaacgacggccagtgccaagcttgcatgcctgcagtgcagcgtgacccggtcgtgcccctctctagagataatgagcattgcatgtctaagttataaaaaattaccacatattttttttgtcacacttgtttgaagtgcagtttatctatctttatacatatatttaaactttactctacgaataatataatctatagtactacaataatatcagtgttttagagaatcatataaatgaacagttagacatggtctaaaggacaattgagtattttgacaacaggactctacagttttatctttttagtgtgcatgtgttctcctttttttttgcaaatagcttcacctatataatacttcatccattttattagtacatccatttagggtttagggttaatggtttttatagactaatttttttagtacatctattttattctattttagcctctaaattaagaaaactaaaactctattttagtttttttatttaataatttagatataaaatagaataaaataaagtgactaaaaattaaacaaataccctttaagaaattaaaaaaactaaggaaacatttttcttgtttcgagtagataatgccagcctgttaaacgccgtcgacgagtctaacggacaccaaccagcgaaccagcagcgtcgcgtcgggccaagcgaagcagacggcacggcatctctgtcgctgcctctggacccctctcgagagttccgctccaccgttggacttgctccgctgtcggcatccagaaattgcgtggcggagcggcagacgtgagccggcacggcaggcggcctcctcctcctctcacggcacggcagctacgggggattcctttcccaccgctccttcgctttcccttcctcgcccgccgtaataaatagacaccccctccacaccctctttccccaacctcgtgttgttcggagcgcacacacacacaaccagatctcccccaaatccacccgtcggcacctccgcttcaaggtacgccgctcgtcctccccccccccccctctctaccttctctagatcggcgttccggtccatggttagggcccggtagttctacttctgttcatgtttgtgttagatccgtgtttgtgttagatccgtgctgctagcgttcgtacacggatgcgacctgtacgtcagacacgttctgattgctaacttgccagtgtttctctttggggaatcctgggatggctctagccgttccgcagacgggatcgatttcatgattttttttgtttcgttgcatagggtttggtttgcccttttcctttatttcaatatatgccgtgcacttgtttgtcgggtcatcttttcatgcttttttttgtcttggttgtgatgatgtggtctggttgggcggtcgttctagatcggagtagaattctgtttcaaactacctggtggatttattaattttggatctgtatgtgtgtgccatacatattcatagttacgaattgaagatgatggatggaaatatcgatctaggataggtatacatgttgatgcgggttttactgatgcatatacagagatgctttttgttcgcttggttgtgatgatgtggtgtggttgggcggtcgttcattcgttctagatcggagtagaatactgtttcaaactacctggtgtatttattaattttggaactgtatgtgtgtgtcatacatcttcatagttacgagtttaagatggatggaaatatcgatctaggataggtatacatgttgatgtgggttttactgatgcatatacatgatggcatatgcagcatctattcatatgctctaaccttgagtacctatctattataataaacaagtatgttttataattattttgatcttgatatacttggatgatggcatatgcagcagctatatgtggatttttttagccctgccttcatacgctatttatttgcttggtactgtttcttttgtcgatgctcaccctgttgtttggtgttacttctgcaggtcgactctagaggatccaacaatgccccagttcgacatcctctgcaagaccccccccaaggtgctcgtgaggcagttcgtggagaggttcgagaggccctccggcgagaagatcgccctctgcgccgccgagctcacctacctctgctggatgatcacccacaacggcaccgccattaagagggccaccttcatgtcatacaacaccatcatctccaactccctctccttcgacatcgtgaacaagtccctccagttcaaatacaagacccagaaggccaccatcctcgaggcctccctcaagaagctcatccccgcctgggagttcaccatcatcccctactacggccagaagcaccagtccgacatcaccgacatcgtgtcatccctccagcttcagttcgagtcctccgaggaggctgacaagggcaactcccactccaagaagatgctgaaggccctcctctccgagggcgagtccatctgggagatcaccgagaagatcctcaactccttcgagtacacctccaggttcactaagaccaagaccctctaccagttcctcttcctcgccaccttcatcaactgcggcaggttctcagacatcaagaacgtggaccccaagtccttcaagctcgtgcagaacaagtacctcggcgtgatcatccagtgcctcgtgaccgagaccaa

SEQ ID NO: 4 - DNA, 28390 bp, synthetic construct
  misc_feature 1..28390: note = PHP71539
  source 1..28390: mol_type = other DNA
gacccgcgaggtttctcgcttcaattgaaatcataaagaagcaattgaaaattttcgagtaaccgaccctcccgataatcttcaacataaaacaacgcacttcttccaacgggagaggcggtgttagttgcgagctaaggagataaggtatgcttaagagatcggggtcgctttctcttgccttgatggtctccttctgttcgtcgagccttgccacgccactctcatctgctgagtttgaccatgttgctcgcaagtgtgccccatcagttgcgacatctacgcttgcggcgatagctaaggtggagagtcgctttgatcctttagcgattcatgacaacacgaccggcgaaacgcttcactggcaagatcacagccaagcaacccaagtcgtcaggcaccgtctcgatgcacggcattcgctggatgttggcctcatgcaaataaactctcgaaatttttctatgctcggtctgacacctgacggtgcgctccaggcgtgcacatcattatctgccgctgcaaacatgctgaaaagtcgttatgcaggcggcgaaacgattgacgagaagcaatttgcgcttcgtcgggcgatctccgcttacaacaccggtaatttcatcggcggttttgcaaacggctacgtgcgaaaagttgaaacagctgctcaatcgctggtgcccgcgttaatcgagcctccaaaagacgatcacgaggcgctaaaatccgaagagacgtgggatgtttgggggtcatatcagcgccgctcgcaggaggatggcgctggcggtttaatcgctccgccaccgccacaccaggacaacggcaaatccgcagacgacaatcaagtcttattcgacttatactaaggaggtgcgcattgatgcgatgctttgagagataccgtttacatctaaatcgcctctcgctctcgaatgcgatgatgcgcgtgatatcgagctgcgccccaagcttgtgcggtgcaattgcatggagcatttcctcatccggacccgccgcagcgcaatctgcgggtggcggcactgaccccgccacaatggttaacaatatatgcacgtttatccttggtccgttcggccagtcactcgctgttctcggcattgtcgctatcgggatctcctggatgttcgggcgggcttcgcttgggctggttgccggcgtcgtcggcggcattgttatcatgtttggggcgagcttcctcggccaaacgctcactggcggtagttgatggctgatcgtttggaagaatcgaccctttacctcgcagccacacggcccgcattgtttcttggggtgccactgacattggcagggttattcatgatgttcgccggctttgtcatcgttatcgttcagaacccgctctacgaagtcgttctcgtgccgttatggtttgcagcccggctcatcgtggagcgagactacaatgcggcgagcgtcgtcctgctatttttgcggaccgcgggaagaagcattgatagtgcagtttgggggggcgctactgttagcccaaatccaattagggttcccccacgagggagaggaatggtgtgatgctcggcgcgagtggaacgaccgaaagatccggtgagatctatctcccttatattggccacctcagcgaccatatcgtccttcttgaagacggatcgatcatgaccattgcgagaattgatggcgttgcattcgagcttgaggaaactgaaatgcgcaatgcgcgttgtcgtgcgttcaacacgctgttgcgcaatatcgctgatgatcatgtgtcaatatatgctcacctcgtacgtcatgccgacgtgccatcatcggcgccgcgacacttccgtagtgttttcgccgctagcctgaacgaagcttttgaacagcgcgtgctctccggccaactcctccgcaatgaacacttccttacgttgattgtctacccacaggcggctttagggaaggtaaagaggaggttcaccaagctaagcggaaaaagggaaaacgatctcacgggccagatcaggaacatggaagatctttggcatgttgtcgctggctctcttaaagcgtatggcctgcatcgtcttggcatccgcgagaagcagggtgtgctcttcaccgaaattggcgaagcgctacggttgatcatgactggtcggttcacaccggttccggtcgtcagcggctcactcggcgcttcgatttataccgacagagtcatttgcggcaagcgaggactcgagatcagaacgccaaaagacagttacgttggatccatctattcgtttcgcgaataccctgcaaaaacacggccgggcatgctcaacgcgctgctatccctcgattttccacttgttctcacgcagagtttttcgttcctgactcgcccgcaagcgcacgcgaaacttagcctcaaatcgagccagatgctgagttccggcgataaagccgtgactcaaatcggcaaattatccgaggctgaggacgcacttgcgagcaacgaattcgttatgggctcacatcatttgagcctttgcgtctatgcagacgatctcaatagtcttggggacaggggcgcgcgggctcggacacgaatggcggatgcaggtgccgtggttgtccaagaaggtattggtatggaagcggcctattggtcccaattgccggggaattttaagtggcgcacacgccctggcgcaatcacttcacgcaatttcgcagggtttgtctctttcgaaaactttccagagggcgccagctcaggccactggggcaacgcgattgcccgatttcgtaccaatggcggaacgcctttcgactatatcccgcatgagcacgatgttggcatgacggcaatattcgggcctatcgggaggggtaagacgacgctcatgatgtttgttctagccatgctcgaacagagcatggtcgaccgtgcaggtacggtcgtgttctttgacaaggaccggggtggcgaattgctggttcgcgccacaggaggaacatatttggcacttcacagaggcacacccagcgggttggcgccgttgcgtggcctagaaaacacagcagcctcacacgattttctgcgcgaatggatcgtggctctcatcgagagtgatggtcggggtgggatttctccggaagagaaccgccgtctggtccgtggtatccatcgtcagctctcgtttgatccacaaatgcgttcaatcgcggggttacgtgaatttttgttgcatgggcccgccgaaggcgcaggagcgcggctccaacgctggtgccggggccatgcgcttggctgggcatttgacggcgaagttgacgaagtaaagttagatccgtcgattaccggcttcgacatgacgcatcttctcgaatacgaggaagtatgcgctcccgctgcagcatatctcctgcatcggattggagccatgatcgacggccgccgttttgtgatgagctgcgatgagtttcgcgcctatttgttaaaccctaaattttcgactgtcgtcgacaaattcctcctgaccgttcgaaaaaacaacgggatgctaatactggcaacgcagcaaccagagcatgttctggaatcgccgctaggagccagcttggttgcgcaatgtatgacgaagattttctatccatcaccaaccgcagatcgatcggcttatgtcgatggactgaaatgtaccgaaaaggaatttcaggcgatccgtgaagacatgacggtcggcagccgtaagtttcttcttaaacgagaaagtggaagcgtcatctgcgaatttgatctgcgggatatgcgtgaatatgtcgccgtgctttcggggcgtgccaacacggtgcgctttgcaactcgactacgcgaggcacaagaaggcaactcatctggctggctcagcgaattcatggcccgtcaccacgaggcagaagattgataaggtaggaaacgatgaagacgacgcaacttattgcaacagttttgacctgcagctttctatatattcagcccgcgcgggcgcagtttgttgttagcgacccggcaacggaggctgagacgctcgcgactgcgctcgcgactgcggagaatctcactcagactatagcgatggttacgatgttgacgtcggcctacggcgttactggactactgacttcgctcaaccagaaaaatcagtatccttcgacgaaggacctagacaatgaaatgttttcgccgcgaatgccaatgtcgaccacggcacgtgcgatcaccagcgatacagatcgtgcagtcgtgggtagtgatgctgaagcggacctgttgcgatcgcagatcaccggttccgcaaacagcgctggcattgcggctgacaatctggaaacgatggacaaacgcttgacggcgaatgctgatacgtctgctcagctttcccgatctcgcaatatcatgcaggcaaccgtgaccaatggtttgcttctcaagcagatccatgacgcaatgattcaaaatgtacaggcgacaagcctattaacgatgactaccgcgcaggccggccttcacgaggcggaagaggcggccgctcaacgcaaggagcatcaaaagaccgctgtcatctttggtgccctcccctaaggctgggcgatttgttcatccgcccgcatcctcgccgaatgcgagctcattttatccaacattatgcgacaaaccagtcaagttcaggtccaatcgatgaatttcacgattccggcgccgtttacggccattcatacgatcttcgatgtagccttcacgacaggcttggactcgatgcttgagactatccaggaggcggtgagtgcgccattgatcgcctgtgtcactctttggattattgttcagggtattttagtcatacgcggcgaagtcgatacccgtagcggtatcactcgggtgatcacggtcaccatcgttgttgctctaattgttgggcaggctaactaccaagactatgtggtttccatcttcgaaaagacggtcccaaactttgttcagcagtttagtgtaaccggcttgcctctgcagactgttccggcacagttggatacaatgttcgccgtgacccaggccgtttttcagaaaatcgcatccgaaatcggtccgatgaacgaccaggacatccttgctttccaaggggcacagtgggtcctttacggcacgctctggtctgccttcggagtttacgacgccgttggaattctcacgaaagtgcttctcgcgatcgggcctctgatcctcgtcggatatatttttgatcgcacgcgggacatcgcagctaagtggatcgggcaacttatcacctacggtctcttgcttctcctcttaaacctcgtggcaacgatcgtcatcctaaccgaagcgactgcgctcacccttatgcttggtgtaatcaccttcgccggtacgaccgcggccaagatcattggtctttacgaactcgatatgttttttctgacaggggatgcgctcattgtcgctttgccggcgatcgccggcaacattggaggcagttactggagcggcgcaacccaatctgccagcagcttgtaccgtcgcttcgctcaggttgagcgaggctaggtcgcgcaaaaattcgcctcaatggagaattctatgaagtattgcctgctgtgcctagttgtcgctttgagcggctgccagacaaacgacacattagcgagctgcaaaggcccgatcttcccgctgaatgtggggcgatggcagcctactccgtcagatcttcagctcggcaattcgggtggacgctatgacggggcctgaatatgccatgctagtggcgcgcgaaagccttgccgagcactataaggaagtagaagcctttcaaaccgcgcgagcgaaatcggcgcgacgtctctccaaactcattgcagctgtcgcagctatcgcgattttgggaaatgttgctcaagcgttcgctatagccacaatggtgccgttgagcaggcttgtgcccgtatatctatggatacggccggacggcaccgttgacagcgaggtgtctgtctcgcgattgcctgcaactcaagaggaggccgtcgttaacgcctcattgtgggagtacgttcgcctgcgcgagagttatgatgccgacaccgctcagtacgcctacgacctggtatcgaacttcagtgccccaacagtgcgccaggattaccagcaattcttcaactatcccaatcccagttcgcctcaagtcattcttggcaaacgcggcagggtggaggtcgagcacatcgcttcaaatgatgtaactccaagcacgcagcaaattcgctataaaaggaccctcgtcgttgacggcaaaatgcctgtggtgagtacgtggaccgcgacagttcgctacgaaaaggtgaccagcttgcccggcagattgagactaaccaacccggcaggtctggttgtcacctcctatcagacatcggaagataccgtttcaaacgtaggccacagcgaaccatgatcagaaaagcacttttcattttagcatgtttatttgccgctgcgactggtgcggaggctgaagacactccaatggcgggcaagctagatccgcgcatgcgttatttggcttacaatcccgatcaagtggtgcgcctctcgacggcggttggagctactttggtcgtaacattcgccacgaacgaaacggtgacagcggttgccgtttcaaatagcaaagatctagcagccctaccgcggggaaattatctatttttcaaggcaagccaggtcctcacgcctcagccagtaatcgtgctaaccgcaagcgactccgggatgcgccgttatgttttcagtataagttccaagactctgtcccacctcgataaagagcagcccgatctctattacagcgtccaattcgcctaccccgccgacgatgcggcggctcggcgaagggaggcacaacagaaggctgttgtggacagactacacgcggaagcacaatatcaacggaaagctgagaatttattggatcagcctgtcacagcccttggtgcggcggacagtaattggcactacgtcgcccaaggcgatcgttcgctgttgccactcgaagtcttcgacaatggatttacgacggtattccactttccgggcaatgtacgcataccctccatctacaccatcaatcctgatggcaaggaagctgttgccaactattcagttaaagggagcgatgtcgagatttcttcggtttcccgaggttggcgtctgagggatggccacacagtactatgtatctggaacaccgcttacgatcccgttggccaaaggccgcaaacgggcacggtgaggcccgatgtgaaacgcgtcctgaagggggcgaagggatgaataacgatagtcagcaagcggcacatgaggttgatgcatctggatccctggtctccgacaaacatcgccggcgtctttcggggtctcagaaattgatcgtcggaggtgtcgttctcgcgttatcattaagcctcatttggctaggtgggcgccaaaagaaggtgaatgagaacgcatcgccgtcaactttgatcgcaacaaacaccaagccatttcatccagctccgattgaggtgccgccggatcctccagcggttcaagaggctgttcagcctgctgctcctctaccgccgaggggcgaaccggagcggcatgagccacggccggaagaaacaccgatttttgcatatagcagcggcgatcaaggggtcagcaaacgcgccattcagggcgacacgggccgaagacaagaaggcaagcgtgacgacaactccttgccgaatggcgaagtgtccggcgagaacgatttgtcgatacgtatgaaacccaccgagctgcagcccagcagcgccacgctcttgccgcaccccgattttatggtaacgcaagggacaataattccgtgcatcttgcaaaccgcaatcgacacaaatttggcaggctatgtaaagtgtgtcttgcctcaggatattcgtggaacaacgaacaatatcgtgcttcttgatcgtggcaccaccgttgttggcgaaatacagcgtggcttgcaacagggagatgggcgcgtttttgtgttgtgggatcgcgccgagacacctgaccatgcgatgatctcgttaacatcgccaagcgcggacgaactcggtcgctcaggattgccgggctcggtcgacagccacttctggcagcgttttagcggagctatgctcttgagtgttgttcaaggcgccttccaggcagctagcacctacgccggcagctcgggtggcgggatgagcttcaacagctttcaaaataacggtgagcagacaactgagacagcccttaaggcaaccatcaacataccgccaaccctgaagaagaatcagggtgacaccgtttccattttcgtagcacgggacctcgatttctttggtgtttaccagctccgcctgactggcggcgccacgcgggggaggaaccgccgctcttaatgaattcaaatttccgcttagagataggatacattgtaaatggaagtggatccgcaactacgctttcttctgaagccgattttggaatggctcgatgacccgaagactgaagaaattgcgatcaatcgacctggagaggcatttgtgcgccaagccggcatttttaccaagatgcctttgcccgtctcttatgatgatcttgaagatatcgctattttagcgggcgcgctgagaaagcaggatgtcggaccacgtaaccccctctgcgccactgaacttcctggtggtgaacgactacaaatctgtctgccgccgaccgttccctcgggcaccgtcagcttgaccattcgacggccaagctcgcgtgtttctggtcttaaagaagtctcctcccgttatgatgcttcgaggtggaaccagtggcagacacgaaggaaacgccaaaatcaggatgatgaagctatccttcagcattttgacaacggggatttggaagcgtttctgcacgcatgcgtcgtcagccgactgacgatgttgctatgtggccctaccggaagcggcaagacaacaatgagcaagaccttgatcagcgccatccccccccaggaaaggctaatcaccatagaagatacgctcgaactcgtcattccacacgataatcatgttagactactctactccaagaacggtgctgggctgggtgctgtgagcgccgagcacttgctccaagcaagtctgcgtatgcggccggaccggatattgcttggcgagatgcgcgacgatgcagcatgggcttatctgagtgaagtcgtctcgggacatccgggatcgatttcaacaatacacggcgcgaatccaatccaaggattcaagaaactgttttcccttgtcaaaagtagcgcccaaggtgctagcttggaagatcgcacactgattgacatgctctctacggcgatcgatgtcatcattccattccgtgcctatgaggacgtttatgaagtaggcgagatctggctcgcggcggacgcacgacgccggggcgagaccataggcgatctccttaatcaatagtagctgtaacctcgaagcgtttcacttgtaacaacgattgagaacttttgtcataaaattgaaatacttggttcgcattttcgtcatccgcggtcagccgcaattctgacgaactgcccatttagctggagatgattgtacatccttcacgtgaaaatttctcaagcgctgtgaacaagggttcagattttagattgagaggtgagccgttgaaacacgttcttcttatcgatgacgatgtcgctatgcggcatcttattatcgaataccttacgatccacgccttcaaagtgaccgcggtagccgacagcacccagttcactagagtactctcttccgcgacggtcgatgtcgtggttgttgatctaaatttaggtcgtgaagatgggcttgagatcgttcgaaatctggcggcaaagtctgatattccaatcataattatcagtggcgaccgccttgaggagacggataaagttgttgcactcgagctaggagcaagtgattttatcgctaagccgtttagtacgagagagtttcttgcacgcattcgggttgccttgcgcgtgcgccccaacgttgtccgctccaaagaccgacggtctttttgttttactgactggacacttaatctcaggcaacgtcgcttgatgtccgaagctggcggtgaggtgaaacttacggcaggtgagttcaatcttctcctcgcgtttttagagaaaccccgcgacgttctatcgcgcgagcaacttctcattgccagtcgagtacgcgacgaggaggtttacgacaggagtatagatgttctcattttgcggctgcgccgcaaacttgaggcggatccgtcaagccctcaactgataaaaacagcaagaggtgccggttatttctttgacgcggacgtgcaggtttcgcacggggggacgatggcagcctgagccaattgcatttgattaatttaggtgactgaggacgcggccagcggcctcaaacctacactcaatatttggtgaggggttccgataggtccctcttcaccaattgctcgatggcttctctccagcaaagaatgacgcgagcgcggcggtagccagcttgtggccgaaagctcgagcggtctccaaccccaacggatcaaaatgacttcgagcgacctcgagcaacgcaaccgggaacatgcgtgaggtctgaacgagaacggatttttctgtagttgaagggatcggataacttttcggggccacgcgaaatgatccatctgccagcatgctttcgaaatcgtccaacgcgcgccttaaaatcatttgtagcgacttcgagggactgtattgccgaacgaggttgtcatatgttttcgacacttgaggcgcgggcggtcgcgctgaaagaaaaacctggagctttttcggggacggaggtggactaagggcatccacagttagcttaagttgtcgatcgggactgtaaatgtgatcggcgacgagaggctcacgttgctggtctttctcgtcggctttttcaggcaagtgctggaggtccagcttctggggaacaagtgtcgggttgggatggtggatctcgggtcgagcaccagcaagccgccgtgcttcgccgaccgacaatgcgggcttgcgaattgccatcttcaagcctccaagattttgctgatcagtttcgaaatgaccacgacttcctccatcgcaatccgaagattcctctctatgaggcgcatcgtcggatcagttcccgtgtttagtaatgtaagatgcaacatgccgcgttctttcatcgcggcaaatgcatctctttcatgcatgggagacggtacaactggaaggctctctagcgtctctgacatcctgcgttgcgatgttgtcaatcggccgaccgggacgcgttggcgcaaaacagctgtaggaattgccaaattttcactcaacagcagctcgatgacgtagcggtaggtagatagtgcctcatcgatgtcgagcggcgttagcatggtggggatcagaagcaggtttgagctagcgatgattgtgttgttgagctcgctcgagccgccacgcgtatcggccaacgcataatcaaatccttcgagctcggcattttcataggctgcttcaagaaggggcatttcgtcggcggaatagacttcacagcgaggatcccaggtactgctttgtaaggcgttttctctccatcgcgtcagaggccggttttcgtcggcatcaaagagggccactcgtttaccgtcatttgccaaagcagcgcaaaggcccatgagtgcggtggttttgccagcaccccctttgaaagaacaaaacgtcaaaagttgcatattctgatcccgcctatcctgtgaaaccggagtgcatttgtatttttgttcgtataaatgtttttgtgattatcgatgagtaaaagcgttgttacactatttttatttcacattcgttataagacaattgcaaatgtagcaagtatattcagtattgactgtaaatgtactgttgatttcatattgagcagggctagacttccatccgtctacccgggcacatttcgtgctggagtatccagaccttccgctttctttggaggaagctatgtcaaaacacaccagagccacgtcgagtgagactaccatcaaccagcatcgatccctgaaagttgaagggttcaaggtcgtgagtgcccgtctgcgatcggccgagtatgaaaccttttcctatcaagcgcgcctgctgggactttcggatagtatggcaattcgcgttgcggtgcgccgcatcgggggctttctcgaaatagatgcagacacacgagaaaagatggaagccatacttcagtccatcggaatactctcaagcaatgtatccatgcttctatctgcctacgccgaagaccctcgatcggatctggaggctgtgcgagatgaacgtattgcttttggcgaggctttcgccgccctcgatggactactgcgctccattttgtccgtatcccggcgacggatcgacggtcgctcgttactgaaaggtgccttgtagcacttgaccacgcacctgacgggagaaaattggatgcccgatcgcgctcaagtaatcattcgcattgtgccaggaggtggaaccaagacccttcagcagataatcaatcagctggagtacctgtcccgaaagggaaagctggaactgcagcgttcagcccggcatctcgatattcccgttccgccggatcaaatccgtgagcttgcccaaagctgggttacggaggccgggatttatgacgaaagtcagtcagacgatgacaggcaacaagacttaacaacacacattattgtaagcttccccgcaggtaccgaccaaaccgcagcttatgaagcaagccgggaatgggcagccgagatgtttgggtcaggatacgggggtggccgctataactatctgacagcctaccacgtcgaccgcgatcatccacatttacatgtcgtggtcaatcgtcgggaacttctggggcaggggtggctgaaaatatccaggcgccatccccagctgaattatgacggcttacggaaaaagatggcagagatttcacttcgtcacggcatagtcctggatgcgacttcgcgagcagaaaggggaatagcagagcgaccaatcacatatgctgaatatcgacgccttgagcggatgcaggctcaaaagattcaattcgaagatacagattttgatgagacctcgcctgaggaagatcgtcgggacctcagtcaatcgttcgatccatttcgatcggacgcatctgccggcgaaccggaccgtgcaacccgacatgacaaacaaccgcttgaaccgcacgcccgtttccaggagcccgccggctccagcatcaaagccgacgcacggatccgcgtaccattggagagcgagcggggtgcccaaccatccgcgtccaaaatccctgtaactgggcatttcgggattgagacttcgtatgtcgctgaagccagcgtgcccaaacaaagcggcaattccgatacttctcgcccggtgactgacgttgccatgcacacagtcgagcgccagcagcgatcaaaacgacgtcatgacgaggaggcaggtccgagcggagcaaaccgtaaaagattgaaggccgcgcaagttgattccgaggcaaatgtcggtgagcccgacggtcgcgatgacagcaacaaggcggctgatccggtgtctgcttccatccgtaccgagcaaccggaagcttctccaacgtgtccgcgtgaccgtcacgatggagaattgggagaacgcaaacgtgcaagaggtaatcgtcgcgacgatgggcgcggggggacctagactagtagacaggaaggaccgaataatggcaaatggtcagttcacgatacgctctgctcgcccggcctccgtcggactgacaggcgaacggcgtggagccgcatccgcctctagctctgcactgtccaatgttcaaagagatgttagggataggctgattccaactagctcaccaagattaccaaatgcagccatattgcgtgattcctcgggaagagcgtcgactggtctgcggtacatggcggctactcttcattggtctgcgatcgcgccattatcgctaataaacagcaacgacctggctccggccgcttatgactttgagacgcgaaataacgcaagaaatgtgactgccaaagtcggcagggcagtccctgttcccaagcaaggcgggctcggcaaaacgctcgcacccgtaccccttagtacacgtatatcaagggtcaattccgaccgaagactgcccgctgacgcagaagaccgccctgaaacgcgcgacccccagaaaggacgtggcagtcatggtgcgacgccaaccttacatgaaaagattggaaccgcgtttgctcgaagattgcgaaagcatacgtactatattgtttgcagttgctgccagacccggagcgcgttgacgatgggtgcaaagatttcggtgaagtcatgaactccagcaagacttcgccccagcgtatgaccctgagcatcgtatgttcgctggcagccggtttttgtgcggccagctgctatgtaacgttccgccggggcttcaacggcgaagcgatgatgacgttcgacgttttcgctttttggtatgagaccccgctttacttgggttatgccagcaccgtcttctggcgtggtttatctgttgtcatctttacctcgctgatcgttctttcaagtcagctcatcatatcgctgcgcaatcagaagcatcatgggacagctcgttgggcagaaattggcgaaatgcggcatgctggttatctgcagcgttacagtcgcatcaaggggccgatctttggaaagacatgtggtcccctttggttcggcagttatttgaccaatggcgaacagccacacagtcttgtcgtcgcgccaacgcgtgctggcaaaggcgtcggcatcgtcattccaacgctgttgaccttcaagggctcggtaatcgcccttgacgtcaagggagaattgtttgaactgacgtccagagcacgcaaagcgagcggcgacgcagttttcaagttctcccccctagatcctgagcggaagactcattgttacaatccggtcctggatattgccgcacttccgcccgaacgccagttcactgaaacacgccgtctagctgcgaaccttattacggctaagggaaagggagcagaaggctttattgacggcgcacgtgacctgttcgtcgcgggaatccttacctgcattgagcgtggcacaccaacgattggcgcggtatatgacctatttgcgcagcctggcgaaaagtataagctttttgcgcaactcgcggaggaaagcctaaacaaagaggctcagcgtatcttcgataatatggcgggcaacgacacgaaaattctgacatcgtacacctctgtgctgggcgacggtggactgaacctgtgggctgatccgcttatcaaagcagcgacaagccggtcagacttttccgtttacgatctccggaggaagaagacctgcatttatctttgtgtcagtcccaacgatctggaggtcttggcaccacttatgcgcctgatgtttcagcagctcgtgtcaatcttgcagagatcgctgccaggtgaagacgagtgccatgaagttttatttctcctcgacgaattcaaacacctgggcaagcttgaggccatagagaccgcgatcacaaccatcgccggttacagaggccgctttatgtttattattcaaagtctttcggccttgtcgggcacatacgatgacgcaggaaaacaaaactttctgagcaatactggcgtacaagtatttatggccacggctgatgacgaaactccaacctacatctcaaaagctatcggcgaatatacgtttaaagcgcgttcgacctcttacagtcaagccagaatgttcgaccacaacatccagatttctgatcaaggtgcagcccttttgcgccccgaacaagtgcgcctgctagacgatcagagtgaaatcgttctcatcaaagggcgacctccactcaaattacgaaaggtgcagtattattccgatcgtacgctgaaaggccttttcgaacgccagatgggctctctgcctgagcccgcacccttgatgctttccgactatagcaacgatcaagttcaataccacttggctccgatagcaaattttaatgaggatgctgcaccgcaaaacagaactgtggccgaggaccatggaagtgttaaagtcggtgctgatatccctgaacgcgtgatgggaataaatggtgacgaggaacaagccgatgcgggcgagataccgccggaatcggttgtgcctccagaattgacgctcgctctgaccgctcaacagcaattgttggaccagattattgcacttcagcaaagatcgaggtccgcaccggcatagcctgcgaaatgatcttaatggtgcaattcgtttcaggcggcatgttgcggttcaacaaagtgtacgccagatcccaattggccctttacgaggtgtcggtatgacaggaaagtcgaaagttcacataagaggttcggctgacgcgcttcctgacgttcctggcggaagtactaccgccccttttttaaccgaaccttctcgggatcaggttgatgcctcgtttgaggtccaaaccgactacagccagtctacttccgtgtcgtttacctatgatggtgttggacttggtcctgccgagcgtgcggcttacgagaactggtgcgaaccgggccggcccacttggaaagatcttataatcaaggcacgtgtcgatccgattgacgatgtgacctggctccgagatttagaagaggacaccccctcaaccttcagatacgaagggatgcctctgggcatcggggaacgacaggcctacgaaaattggcaagaggacgctcagccgacatgggaagaccttgttgtcagcgcacgcttgacggaacttggccgtccacacgggattaccggcgagtatacatccctcgcaggatcgaagaatacaagttcaatttcattgaagcgaaagcggagcaacttaattgatgatgagaattcatccggatcgttttcatatgacgggatgaagctcggggaagccgagcgttctgcatatggtgactgggccgaggcggagccacccacgtggaaagatttggtattgagggcacgcgtttcctcgatcaatgactctgcttggctttttgattcacaaacatcttcatcatcatttgaatacaacggtgttcccttgggcgagccggaacggcaggctctcagacaatggcaaggagacgctcagcctacctgggaagatctcgttgttaacgcgcgtatggcagaactttgccatgctggttggattgaaggtcaaaaaggttgctttgaagagcgcggggaggctctgcccgcgtcggaacgcggttcgcaacgccccattggtcaacggacagattcctccgattcttttgtgtatgatggcacaaggctcggagcacctgagcgaactgcttatgaacgctggagtaagagggaacgcccgacttgggaagatctcatcttagatgcacaccaggccaggactgaaagtgacgctgttacgacccaagcgattggtcagtcgtcctcaccggttttcttatatgaaggaaagtcgctcggagacagggaacgaaaggcttacgaaaaatggcggcagccagcccaaccgcgatggcaaaatcttgtagtgaacgctcgtctggcagaaatcgatccctcagcctggattgccgatgagcgcgatccgcttgatgatagcgacgcgcttggtcgcccgtcgtacacaagcttgacggatagatcagacgtccctttagacgatcaatcaatctatcgtcgttccgacctagtaagggagcaggtgccagaatcgtctcaaaggcaattcgcagcatgttcagaatctgaaacgaggcctgtgcaatggtttactgcttctgggtcagatgcaaacaatacggaaaatatcaccgccagcgatcccgtcgatcgcacgggtggagttaagcggctaggctccaaaagcgacagaaccgttacagcttctatccatgacgtgaattccagcacaaggcgactgttgcttaacgaatttggatcggaggctccgcgcccttcgccagaaaagactgttcgcttaagaagcgacaatattggcacctatgggagccggaaaaatgaacgagcgcggctcgcgaccgaaaccggtgcgtatgagtcggagcatattttcgggttcaaggctgtccacgatactgcgagagcgacgaaagagggccggcgtctcgaaaggcccatgcccgcctaccttgaggataaggggcttcatcgccaacatattggcaccgggagaggacggaccaaacttgtcgggcgcggatggccggatgacacaagctatcgctcggatcaaagggcaactctgtcggaccccgttgcgcgctcggaaggcgcgacggcctcaaatgggtatcaattgaaccaattgggttacgcgcaccaactcgctagcgatggcctgcaaagtgaatcgcccgatggtgttgccttgccaattcaagtggcaacaacgagctacaactatacagtgagccgcgatcctgtccttgttccgccggataaaaacgaagcccctcaattgctgcatcttggtccccgtggtcaaaccgaagctgttcttgcccgcgaaacagcattgactggaaaatggccgactctcgagcgtgagcagcaagtgtatcgcgagtttttggccttatatgacgtaaaaaaagatcttgaggccaaatcagtcggcgtaagacggaaaaaaaaagaagttatttctgcgttagaccgaactgcgcgcttgataagcacgtcgccttcgaaagctcgatccaaagcagagactgaaaaagccattgatgagctcgatgatcgacgagtttatgatccgcgtgatcgagctcaagacaaagcgtttaaacgctgataagtcgccaatatagtgatcatttgcagtattcgcatcgatcgctggttgatattctgccgctggtcgaccggctgctcgtcgccaaaaatgctcacagggatacgatggcctcggtcaggccgcgtgcgtcctgtctttccagttcctccctttcagctcgattgtggcatcatttattgcctgctcattgcagttgaaacgcgatatccgtttcaagacccgggtatggatggtactttggagatatgagcacttgccagacttcccggtcggagacttaaaaattccgataagaggttacggacgacggaccttataagtggatcgtctagtggtggcgccgatcaaaacagttccgcccccggctttgctcaaagtagcaaagcagctttatctcgggttgcggaggattttctagaaaaccgcaattttgcaggagagaacatatggccatcatcaagccgcatgtgaacaaaaataggacaacctcgccgatagagagaccggagtctctcatagaggaaatgagcggcagtcatccgccgagtggttttaccaacctggatctcgctatgatcgagctggaggactttgtccatcggtgcccgctcccagaagacaatcttgctggtcagaaggagtgagacgatggatccgtctagcaatgagaatgtctatgtgggtcgcggtcacaacatcgaaaatgatgatgacactgaccccaggcgttggaagaaggcgaatatcagttccaacaccatctccgatattcagatgacgaatggcgaagacgtacaatcagggagccctacccgaacggaagttgtaagcccacgtctggattatggatcggtcgactcctcctccagcctttattctggcagcgagcacggaaatcaagctgagattcaaaaagagctgtccgtcttgttctcgaacatgtctttgccaggcaacgatcggcgcccggacgaatacattctcgtgcatcaaacgggacaagatgcttttactggtattgccaaaggcaacctcgaccaaatgcccaccaaggcggaatttaacgcgtgctgccgtctctacagggacggagccggtaattactacccgccacctctcgcattcgacaagattagcgttccagagcaactggaggaaaaatgggggatgatggaggcgaaggaacgtaacaaactgcggtttcagtacaagttggacgtatggaatcatgcgcacgctgatatggggatcacgggcacagagatcttttatcaaacagataagaacataaagctcgaccggaattataaactaagacctgaagaccgatacgtacaaacagaaaaatacgggcgccgggaaattcaaaagcgatatcaacacgaactccaggctggttcgctgctgcccgatattatgatcaaaactccccaaaatgacatccacttcgtgtacaggtttgccggcgacaattacgccaacaaacagttcagcgagtttgaacacaccgtcaagcgcaggtatggcgacgagactgagatcaaattgaagtcaaagtcaggcattatgcatgactcgaaatatctggaatcctgggaacggggcagtgcggatattcgcttcgcggaattcgttggggaaaatagagctcacaatcggcagtttccaactgcgacagtaaatatgggacagcagccagacgggcagggcggtttgacccgcgaccgtcatgtgagcgttgacttcctaatgcaaagcgcacccaattcgccttgggcgcaagctttgaaaaagggagaactgtgggatcgcgttcagttgcttgctcgcgacggcaaccgctatctgtcgccgcccagattggaatattctgaccctgcacatttcaccgagttgatgaaccgggttggtttacccgcatcgatgggtcggcaaagccatgcggctagtatcaaattcgaaaagtttgacgcgcaggcagcggttattgtcttaaatggcccagagttacgtgacattcatgacttgtctcctgaaaaactgcaaaatttgtccaccaaagatgtcatcgtcgccgatcgcaatgagaatggtcagagaactggcacgtacaccagcgtcgcggaatatgagcgcttgcagttaaggctgccacccgatgcagcgggggtgcttggtgaagcaactgacaaatattcacgtgatttcgttcggccagagccggcgtcgcgtccaatcagtgacagccgcaggatatacgaaagtcgaccgcgtagccaaagcgtcaacagcttttgacgttcctgctgccgcgtcaacgaggaagctcgtttgacccgggtttgccaatgaaagggctcaatcatggtgaacactacaaagaaaagttttgcgaagtcgcttacggcagatatgcgccgttctgctcagcgcgttgtcgagcaaatgcgaaaagcattgattaccgaagaagaggcgctcaagcggcaagccagactggagagtcccgataggaagcgaaagtatgctgctgatatggcgatagtcgacaaactcgacgtagggtttcgaggcgaaataggctataaaattcttggaaataaccggcttcgagtagacaaccataaagaattaacgcgtgagcacggtagacttcgcaaaaccaaaacggttctgaagcgtaacccggtgacgcaggaagtctatttgggtttatatgaaaggaagtcctggttaagtgtcagcagccatttgtatgctgcggacggcacactccgcatgaagcacgtgaaatacaaagacggacgttttgaggaaaaatgggagcgcgacgaaaatggcgacctgatccgcacaaggtacgccaaccgtggcaggctctttcaacctgtatccgagaaaatgggcgcgccgtatcggagcggccctgacgaccggctctatcgcgatctaacccgtcgaaacggtttcagacgggagacattcgaacgggacgatcacggaaacctcgagcgtatcggcagcaaccatgtcggcttttccaagatttcagtgaaggcacccaatcgtcaaacctcccagacgaagattcaaaaacttggtggcgctttcaacaaatcttttaggtcccttctggacaaggagggcaatgaaatgggccgcgatattttgagccatcgacggctctataacaagcggtctgctgtctacgatgaagctaccggacaattgaagagtgccaagcataccttcggcaagatctacaggagcgaaaccgaatatctcagcgcgggcctcaagaaggtttcaaaaaagatactcggggtgacggtctaccggaaatttgcggcgctcagcgagcgagaatccgaggctgagagactgcgtagttttgaatccggtgcgcatcgccagatctggcaggagcgggcagcgattcccggttcgcccctcccggagactgatgacattcatttcgcacagcagtcgcacctagccaaagccaaccctgatcacgtcgaagctgacgtcacgcgtgtgacagatcaacatgttgatgttgctggacaaacatcatcgtctccccaacggaacttggaaggatggttagattctcaatcacgatacaagccagcaaacatgctgttgtcaaatccagaccttcaagcgaacggacctcgcccatacgaagggttagctcatctcaccctccggcgcgataatgaatctgacgggcacaaggagaatgatcagcggctgcgacatttctcccagccagagccgttggtgttaccgcatcccgggtcgccggaaataactaaggtgtttggctcgcggggagagccggcacacccgagtggaaatctgcacacggcggttggagaaacggcttgcgaaggaccggtgatgtcttcatcctcggacaatcatcagccagctccaggacagcaagaacttttaagtttccttcataatgcgccagccccagtttctgtggcaatacatgatgatcaagagcgacttgcgggggaggcgcccggcggctctttcagaggtagctcagggcgaacgagttcaatgtcggagagtatcttcgacgaagatgtacaagggcatttggtacgggattattcgatcaatactactaacgggtttattgacccgcaatcgttgttcggtgaaccggacttatcgagaggtccaaaatcggggccagaaattccatcggaagattaccatttgtcagcttcggaacaggaaaatttgctgaatcaattgcttagtgtgccactgccggttccttcaccgaagcccgaatgcgcgaggtctatgattttcgaaggttcacgttcaagagagcgttccacctccagagggttctaaggtggaacgcgtctaggcttgcctatcatcaccacctcatgatggtcgcggagaccttcgaagagatatccgacatcattggagaagctgggccggaaactagtgtacctcgcgaatgcatctagatccaatccaatatgcatggcatgccgaatccatgtgggagtttattcttgacacagatatttatgatataataactgagtaagcttaacataaggaggaaaaacatatgttacgcagcagcaacgatgttacgcagcagggcagtcgccctaaaacaaagttaggtggctcaagtatgggcatcattcgcacatgtaggctcggccctgaccaagtcaaatccatgcgggctgctcttgatcttttcggtcgtgagttcggagacgtagccacctactcccaacatcagccggactccgattacctcgggaacttgctccgtagtaagacattcatcgcgcttgctgccttcgaccaagaagcggttgttggcgctctcgcggcttacgttctgcccaagtttgagcagccgcgtagtgagatctatatctatgatctcgcagtctccggcgagcaccggaggcagggcattgccaccgcgctcatcaatctcctcaagcatgaggccaacgcgcttggtgcttatgtgatctacgtgcaagcagattacggtgacgatcccgcagtggctctctatacaaagttgggcatacgggaagaagtgatgcactttgatatcgacccaagtaccgccacctaataatgtctaacaattcgttcaagccgacgccgcttcgcggcgcggcttaactcaagcgttagatgcactatacgtaccaatccaaatcggatccccctgcagggctgagataggtgcctcactgattaagcattggtaactgtcagaccaagtttactcatatatactttagattgatttaaaacttcatttttaatttaaaaggatctaggtgaagatcctttttgataatctcatgaccaaaatcccttaacgtgagttttcgttccactgagcgtcagaccccgtagaaaagatcaaaggatcttcttgagatcctttttttctgcgcgtaatctgctgcttgcaaacaaaaaaaccaccgctaccagcggtggtttgtttgccggatcaagagctaccaactctttttccgaaggtaactggcttcagcagagcgcagataccaaatactgtccttctagtgtagccgtagttaggccaccacttcaagaactctgtagcaccgcctacatacctcgctctgctaatcctgttaccagtggctgctgccagtggcgataagtcgtgtcttaccgggttggactcaagacgatagttaccggataaggcgcagcggtcgggctgaacggggggttcgtgcacacagcccagcttggagcgaacgacctacaccgaactgagatacctacagcgtgagctatgagaaagcgccacgcttcccgaagggagaaaggcggacaggtatccggtaagcggcagggtcggaacaggagagcgcacgagggagcttccagggggaaacgcctggtatctttatagtcctgtcgggtttcgccacctctgacttgagcgtcgatttttgtgatgctcgtcaggggggcggagcctatggaaaaacgccagcaacgcggcctttttacggttcctggccttttgctggccttttgctcacatgttctttcctgcgttatcccctgattctgtggataaccgtattaccgcctttgagtgagctgataccgctcgccgcagccgaacgaccgagcgcagcgagtcagtgagcgaggaagcggaagagcgcctgatgcggtattttctccttacgcatctgtgcggtatttcacaccgcatatggtgcactctcagtacaatctgctctgatgccgcatagttaagccagtatacactccgctatcgctacgtgactgggtcatggctgcgccccgacacccgccaacacccgctgacgcgccctgacgggcttgtctgctcccggcatccgcttacagacaagctgtgaccgtctccgggagctgcatgtgtcagaggttttcaccgtcatcaccgaaacgcgcgaggcagcagatctatcgatggtacctatctgcagacggaagggattcctgttaattaaaacagcttgcgtcatgcggtcgctgcgtatatgatgcgatgagtaaataaacaaatacgcaaggggaacgcatgaaggttatcgctgtacttaaccagaaaggcgggtcaggcaagacgaccatcgcaacccatctagcccgcgccctgcaactcgccggggccgatgttctgttagtcgattccgatccccagggcagtgcccgcgattgggcggccgtgcgggaagatcaaccgctaaccgttgtcggcatcgaccgcccgacgattgaccgcgacgtgaaggccatcggccggcgcgacttcgtagtgatcgacggagcgccccaggcggcggacttggctgtgtccgcgatcaaggcagccgacttcgtgctgattccggtgcagccaagcccttacgacatatgggccaccgccgacctggtggagctggttaagcagcgcattgaggtcacggatggaaggctacaagcggcctttgtcgtgtcgcgggcgatcaaaggcacgcgcatcggcggtgaggttgccgaggcgctggccgggtacgagctgcccattcttgagtcccgtatcacgcagcgcgtgagctacccaggcactgccgccgccggcacaaccgttcttgaatcagaacccgagggcgacgctgcccgcgaggtccaggcgctggccgctgaaattaaatcaaaactcatttgagttaatgaggtaaagagaaaatgagcaaaagcacaaacacgctaagtgccggccgtccgagcgcacgcagcagcaaggctgcaacgttggccagcctcgcagacacgccagccatgaagcgggtcaactttcagttgccggcggaggatcacaccaagctgaagatgtacgcggtacgccaaggcaagaccattaccgagctgctatctgaatacatcgcgcagctaccagagtaaatgagcaaatgaataaatgagtagatgaattttagcggctaaaggaggcggcatggaaaatcaagaacaaccaggcaccgacgccgtggaatgccccatgtgtggaggaacgggcggttggccaggcgtaagcggctgggttgcctgccggccctgcaatggcactggaacccccaagcccgaggaatcggcgtgagcggtcgcaaaccatccggcccggtacaaatcggcgcggcgctgggtgatgacctggtggagaagttgaaggcagcgcaggccgcccagcggcaacgcatcgaggcagaagcacgccccggtgaatcgtggcaagcagccgctgatcgaatccgcaaagaatcccggcaaccgccggcagccggtgcgccgtcgattaggaagccgcccaagggcgacgagcaaccagattttttcgttccgatgctctatgacgtgggcacccgcgatagtcgcagcatcatggacgtggccgttttccgtctgtcgaagcgtgaccgacgagctggcgaggtgatccgctacgagcttccagacgggcacgtagaggtttccgcagggccggcaggcatggccagtgtgtgggattacgacctggtactgatggcggtttcccatctaaccgaatccatgaaccgataccgggaagggaagggagacaagcccggccgcgtgttccgtccacacgttgcggacgtactcaagttctgccggcgagccgatggcggaaagcagaaagacgacctggtagaaacctgcattcggttaaacaccacgcacgttgccatgcagcgtacgaagaaggccaagaacggccgcctggtgacggtatccgagggtgaagccttgattagccgctacaagatcgtaaagagcgaaaccgggcggccggagtacatcgagatcgagctagctgattggatgtaccgcgagatcacagaaggcaagaacccggacgtgctgacggttcaccccgattactttttgatcgatcccggcatcggccgttttctctaccgcctggcacgccgcgccgcaggcaaggcagaagccagatggttgttcaagacgatctacgaacgcagtggcagcgccggagagttcaagaagttctgtttcaccgtgcgcaagctgatcgggtcaaatgacctgccggagtacgatttgaaggaggaggcggggcaggctggcccgatcctagtcatgcgctaccgcaacctgatcgagggcgaagcatccgccggttcctaatgtacggagcagatgctagggcaaattgccctagcaggggaaaaaggtcgaaaaggtctctttcctgtggatagcacgtacattgggaacccaaagccgtacattgggaaccggaacccgtacattgggaacccaaagccgtacattgggaaccggtcacacatgtaagtgactgatataaaagagaaaaaaggcgatttttccgcctaaaactctttaaaacttattaaaactcttaaaacccgcctggcctgtgcataactgtctggccagcgcacagccgaagagctgcaaaaagcgcctacccttcggtcgctgcgctccctacgccccgccgcttcgcgtcggcctatgcatataattgtggtttcaaaatcggctccgtcgatactatgttatacgccaactctgaaaacaactttgaaaaagctgttttctggtattt

SEQ ID NO: 5 - DNA, 16544 bp, synthetic construct
  misc_feature 1..16544: note = PHP81855
  source 1..16544: mol_type = other DNA
gtttacccgccaatatatcctgtcaaacactgcggccgcacttgaccgcggatggagccggagctgtggtgaggccatcgacgggaggtgggggagaacacagtctcagtgttctttgtgagtccgcaaggtttttagcttttctgtattaattaaggttgctgttggctgtagaatacggtcgtggaagagctgtatcggtagctactacgtaagctattatatactggaagtctggagctcgtcgatctccggtcgtcttcctccatttctcctcgtcttgctttgactgctgctaccatttgcttctgttttctgatgaagcatgccatgtcggccaccagtgtttgtgtggtttttgcagggaatggctttcaagtgctgtgattgaatggccctcgtcgtcctcggctgagctcacatggacgcgtcatgtgagtgagatatatgatcatatgatgagtggggttcgggtgagtgcgtacttgaagtaggatcccgctttcactcattcattcattggcctttaaaccgggaaattttcgcgaggagatggagggaagcaagcagggtgacgagtgcagagtgccgcgagcgctttgtcaaaaggcaccgccgtaggcaaaaaaatcaatggccctgactgactcgatggtagtactactgtagagactagagagggttgctccccatatcttcgtgtgacttttactccagcattgcatttccgtcattgagacgttaattaatagcagctttcgggacagatgactgtggccatgtttcgtcacggccgcttcgtgccagctgggggtactatagtactgtgattttgttagtaaaaactttcattaggccaccattgacgaccgggccttcgcttttgctgcgctaattaaccatttcccggcgaccgaagggaacatgaacatgccccgacacatgagggcatgaggactagtgttctccctgtcgttcgttgacttgactagtgatagtttaaacgctcttcaactggaagagcggttactaccggttcactagctagctgctaatcgagctagttaccctatgaggtgacatgaagcgctcacggttactatgacggttagcttcacgactgttggtggcagtagcgtacgacttagctatagttccggacttacccttaagataacttcgtatagcatacattatacgaagttatgggcccacgcgtgaagagcggttaccagagctggtcacctttgtccaccaagatggaactgtcttcggccagaatggccatctggattcagcaggcctagaaggccatttatcgctatcaactttgtatagaaaagttgggccgaattcgagctcggtacggccagaatggcccggaccggctcgagccttttgtctcccttttgtctcccttttgtctcccttttgtctcgccggccttttgtctcccttttgtctcccttttgtctcccttttgtctctgacagtggtcccaaagatggacccccacccacgaggagcatcgtggaaaaagaagacgttccaaccacgtcttcaaagcaagtggattgatgtgatatctccactgacgtaagggatgacgcacaatcccactagactctatcagtgatagagtgtatataagactctatcagtgatagagtgaactctatcagtgatagagttgtaccatggcggccaatgcgggcggcggtggagcgggaggaggcagcggcagcggcagcgtggctgcgccggcggtgtgccgccccagcggctcgcggtggacgccgacgccggagcagatcaggatgctgaaggagctctactacggctgcggcatccggtcgcccagctcggagcagatccagcgcatcaccgccatgctgcggcagcacggcaagatcgagggcaagaacgtcttctactggttccagaaccacaaggcccgcgagcgccagaagcgccgcctcaccagcctcgacgtcaacgtgcccgccgccggcgcggccgacgccaccaccagccaactcggcgtcctctcgctgtcgtcgccgccgccttcaggcgcggcgcctccctcgcccaccctcggcttctacgccgccggcaatggcggcggatcggctgtgctgctggacacgagttccgactggggcagcagcggcgctgctatggccaccgagacatgcttcctgcaggactacatgggcgtgacggacacgggcagctcgtcgcagtggccacgcttctcgtcgtcggacacgataatggcggcggccgcggcgcgggcggcgacgacgcgggcgcccgagacgctccctctcttcccgacctgcggcgacgacggcggcagcggtagcagcagctacttgccgttctggggtgccgcgtccacaactgccggcgccacttcttccgttgcgatccaacagcaacaccagctgcaggagcagtacagcttttacagcaacagcaacagcacccagctggccggcaccggcaaccaagacgtatcggcaacagcagcagcagccgccgccctggagctgagcctcagctcatggtgctccccttaccctgctgcagggagtatgtgagagcaacgcgagctgccactgctcttcactgatgtctctggaatggaaggaggaggaagtgagcatagcgttggtgcgttgctgtcaagggcgaattgtaccacatggttaacctagacttgtccatcttctggattggccaacttaattaatgtatgaaataaaaggatgcacacatagtgacatgctaatcactataatgtgggcatcaaagttgtgtgttatgtgtaattactagttatctgaataaaagagaaagagatcatccatatttcttatcctaaatgaatgtcacgtgtctttataattctttgatgaaccagatgcatttcattaaccaaatccatatacatataaatattaatcatatataattaatatcaattgggttagcaaaacaaatctagtctaggtgtgttttgcgaatgcggccgccaccgcggtggagctcgaattccggtccgggcctagaaggccagcttcaagtttgtacaaaaaagcaggctccggccagaatggcccggaccgggttaccgaattcttaccctagctccctgcggctgttacgcggtcccccatcaatcttctgttcttgcggttgtagcctgtgtaacagtgctagagtatgtatgataaataggttttaagtctgcttacatgacattttttattgtggaagagacatataaaaattagagagagtggttctcatgcaacggcggacggcccggtgctaaaagagcttcaagacaaaataatgaaacaggaagagagtagatttatctaagagccaactttattatatgaatgtgtttattgttggctttagatgatatggtaaggagttagagctaataatagataggctctattattattattattaattaaactcgctctaaggaggaaagtgggaggaagggacgaggacgaagactactggaagcatcgtgcatggatgatggatgtggtgtctcttaatgtaggtggccggaggatgtacgtgttaattgcgcgataagcactcagatccaaccgcaaactacctccacactgacacactgatagagagaaagagagacctccgacgactgccgccgcagatgagccacgtacgtatacgacgtctgccggccggctcaggctgccgccatcaccctgctcgaaagtcgcgttaggcggcgccagctacataggagtatctagtctagccagttagtatactactactgcgctgatgatgaattaactctgcatagatactgtacttgcctccctccaacacccaaccacctcctgctcggctcttaataacttggacacggatcgatgccatccaaggaagaacacgacgacgacgacggaacatccaccatgcaagcttgcatccatacgccgatacgcgtgcatccatccatccaccattatttccattttccaccgatcacacgtacacaggcctatttaaggagcgacatcccactgcaactctcctcactctatcagtgatagagtctctagcaaagcacttgccatctaccgaccgccgcattccaaacagcccgacgagctagcagagcggcaggcacctccctcctcaaggaacccatggccactgtgaacaactggctcgctttctccctctccccgcaggagctgccgccctcccagacgacggactccacactcatctcggccgccaccgccgaccatgtctccggcgatgtctgcttcaacatcccccaagattggagcatgaggggatcagagctttcggcgctcgtcgcggagccgaagctggaggacttcctcggcggcatctccttctccgagcagcatcacaaggccaactgcaacatgatacccagcactagcagcacagtttgctacgcgagctcaggtgctagcaccggctaccatcaccagctgtaccaccagcccaccagctcagcgctccacttcgcggactccgtaatggtggcttcctcggccggtgtccacgacggcggtgccatgctcagcgcggccgccgctaacggtgtcgctggcgctgccagtgccaacggcggcggcatcgggctgtccatgattaagaactggctgcggagccaaccggcgcccatgcagccgagggtggcggcggctgagggcgcgcaggggctctctttgtccatgaacatggcggggacgacccaaggcgctgctggcatgccacttctcgctggagagcgcgcacgggcgcccgagagtgtatcgacgtcagcacagggtggagccgtcgtcgtcacggcgccgaaggaggatagcggtggcagcggtgttgccggcgctctagtagccgtgagcacggacacgggtggcagcggcggcgcgtcggctgacaacacggcaaggaagacggtggacacgttcgggcagcgcacgtcgatttaccgtggcgtgacaaggcatagatggactgggagatatgaggcacatctttgggataacagttgcagaagggaagggcaaactcgtaagggtcgtcaagtctatttaggtggctatgataaagaggagaaagctgctagggcttatgatcttgctgctctgaagtactggggtgccacaacaacaacaaattttccagtgagtaactacgaaaaggagctcgaggacatgaagcacatgacaaggcaggagtttgtagcgtctctgagaaggaagagcagtggtttctccagaggtgcatccatttacaggggagtgactaggcatcaccaacatggaagatggcaagcacggattggacgagttgcagggaacaaggatctttacttgggcaccttcagcacccaggaggaggcagcggaggcgtacgacatcgcggcgatcaagttccgcggcctcaacgccgtcaccaacttcgacatgagccgctacgacgtgaagagcatcctggacagcagcgccctccccatcggcagcgccgccaagcgcctcaaggaggccgaggccgcagcgtccgcgcagcaccaccacgccggcgtggtgagctacgacgtcggccgcatcgcctcgcagctcggcgacggcggagccctggcggcggcgtacggcgcgcactaccacggcgccgcctggccgaccatcgcgttccagccgggcgccgccagcacaggcctgtaccacccgtacgcgcagcagccaatgcgcggcggcgggtggtgcaagcaggagcaggaccacgcggtgatcgcggccgcgcacagcctgcaggacctccaccacctgaacctgggcgcggccggcgcgcacgactttttctcggcagggcagcaggccgccgccgctgcgatgcacggcctgggtagcatcgacagtgcgtcgctcgagcacagcaccggctccaactccgtcgtctacaacggcggggtcggcgacagcaacggcgccagcgccgtcggcggcagtggcggtggctacatgatgccgatgagcgctgccggagcaaccactacatcggcaatggtgagccacgagcaggtgcatgcacgggcctacgacgaagccaagcaggctgctcagatggggtacgagagctacctggtgaacgcggagaacaatggtggcggaaggatgtctgcatgggggactgtcgtgtctgcagccgcggcggcagcagcaagcagcaacgacaacatggccgccgacgtcgggcatggcggcgcgcagctcttcagtgtctggaacgacacttaagcgtacctagtggtacctgacatcttatagtctgcaacctctcgtgtctgaattcctatctttatcaagtgttattgcttccacgactataggacagctttcgtcgaaagcttttgctcatgtgatctcgaaggattcatctagtctgatttttcgtgacttgtatcggttttattggattcatccaacatatatcaataaaaaatgagttgtgtttcctttcttcctagttcagttaaaattatttccctcctgcgcttgtgctgtaattgtctgtgtacctgttgtttgtgactgtgttagttcccttggatatgatttcgtatttgatatgtacatggagatagcttagcttcattattggagtatgaagttagtatgacatagtcactctcctggaaaattgacactgcaaaccatatttttattctgaaccacaaatcctagtcagtccgctggcatatgccgtccgtttgctgaatccagaacgtgggtttggagatgtacggctgagatgcctctatgcgaaggggatttcgtggtgaaacgagatgggagtagagcaacgcccgtggaagatgcttcaaacttccacacttttgagcaacgatcggcagtagtaaggtagacgatttcaagatcaaagcatatgaagataaacaacatcaacaacaaaatttgttggggttctatagagagaaacagagctacatacatacactgttttgtatctaccatctgagatgatgaaaagatgaaaaactaaagaatgccccggcgccaacgccaggacacgccgcgcgcgcgtcacccgagccatctcttgacccagccggcgctgtatatttacacacgttgcagcatcgatcaccacctgttcgatcgcgtcgccgtcaccggtaccgagctcgaattccggtccgggcctagaaggccgatctcccgggcacccagctttcttgtacaaagtggccgttaacggatcggccagatccctatagtattttaaaattgcattaacaaacatgtcctaattggtactcctgagatactataccctcctgttttaaaatagttggcattatcgaattatcattttactctttaatgttttctcttcttttaatatattttatgaattttaatgtattttaaaatgttatgcagttcgctctggacttttctgctgcgcctacacttgggtgtactgggcctaaattcagcctgaccgaccgcctgcattgaataatggatgagcaccggtaaaatccgcgtacccaactttcgagaagaaccgagacgtggcgggccgggccaccgacgcacggcaccagcgactgcacacgtcccgccggcgtacgtgtacgtgctgttccctcactggccgcccaatccactcatgcatgcccacgtacacccctgccgtggcgcgcccagatcctaatcctttcgccgttctgcacttctgctgcctataaatggcggcatcgaccgtcacctgcttcaccaccggcgagccacatcgagaacacgatcgagcacacaagcacgaagactcgtttaggagaaaccacaaaccaccaagccgtgcaagcaccaagcttggtcacccggtccgggcctagaaggccagcttcaagtttgtacaaaaaagcaggcttcgaaggagatagaaccgatccaccatgtccaacctgctcacggttcaccagaaccttccggctcttccagtggacgcgacgtccgatgaagtcaggaagaacctcatggacatgttccgcgacaggcaagcgttcagcgagcacacctggaagatgctgctctccgtctgccgctcctgggctgcatggtgcaagctgaacaacaggaagtggttccccgctgagcccgaggacgtgagggattaccttctgtacctgcaagcgcgaggtttgtttctgcttctacctttgatatatatataataattatcattaattagtagtaatataatatttcaaatatttttttcaaaataaaagaatgtagtatatagcaattgcttttctgtagtttataagtgtgtatattttaatttataacttttctaatatatgaccaaaacatggtgatgcctaggtctggcagtgaagaccatccagcaacaccttggacaactgaacatgcttcacaggcgctccggcctcccgcgccccagcgactcgaacgccgtgagcctcgtcatgcgccgcatcaggaaggaaaacgtcgatgccggcgaaagggcaaagcaggccctcgcgttcgagaggaccgatttcgaccaggtccgcagcctgatggagaacagcgacaggtgccaggacattaggaacctggcgttcctcggaattgcatacaacacgctcctcaggatcgcggaaattgcccgcattcgcgtgaaggacattagccgcaccgacggcggcaggatgcttatccacattggcaggaccaagacgctcgtttccaccgcaggcgtcgaaaaggccctcagcctcggagtgaccaagctcgtcgaacgctggatctccgtgtccggcgtcgcggacgacccaaacaactacctcttctgccgcgtccgcaagaacggggtggctgcccctagcgccaccagccaactcagcacgagggccttggaaggtattttcgaggccacccaccgcctgatctacggcgcgaaggatgacagcggtcaacgctacctcgcatggtccgggcactccgcccgcgttggagctgctagggacatggcccgcgccggtgtttccatccccgaaatcatgcaggcgggtggatggacgaacgtgaacattgtcatgaactacattcgcaaccttgacagcgagacgggcgcaatggttcgcctcctggaagatggtgactgagctagacccagctttcttgtacaaagtggccgttaacggatccagacttgtccatcttctggattggccaacttaattaatgtatgaaataaaaggatgcacacatagtgacatgctaatcactataatgtgggcatcaaagttgtgtgttatgtgtaattactagttatctgaataaaagagaaagagatcatccatatttcttatcctaaatgaatgtcacgtgtctttataattctttgatgaaccagatgcatttcattaaccaaatccatatacatataaatattaatcatatataattaatatcaattgggttagcaaaacaaatctagtctaggtgtgttttgcgaatgcggccgccaccgcggtggagctcgaattccggtccgggcctagaaggccagcttcggccgccccgggcaactttattatacaaagttgatagataaatcagatatctggttcctaaggacccggcggaccgattaaactgattcggtccgacgcgttacctaataacttcgtatagcatacattatacgaagttattagctaactaactagtaagcttggtcacccggtccgtcaatattctgattccgatgacttcgtaggttcctagctcaagccgctcgtgtccaagcgtcacttacgattagctaatgattacggcatctaggaccgactagtggcgcgccgactagctagctaaggtacgacttagctatagttccggacttaccggcgccgctagcctgcagtgcagcgtgacccggtcgtgcccctctctagagataatgagcattgcatgtctaagttataaaaaattaccacatattttttttgtcacacttgtttgaagtgcagtttatctatctttatacatatatttaaactttactctacgaataatataatctatagtactacaataatatcagtgttttagagaatcatataaatgaacagttagacatggtctaaaggacaattgagtattttgacaacaggactctacagttttatctttttagtgtgcatgtgttctcctttttttttgcaaatagcttcacctatataatacttcatccattttattagtacatccatttagggtttagggttaatggtttttatagactaatttttttagtacatctattttattctattttagcctctaaattaagaaaactaaaactctattttagtttttttatttaataatttagatataaaatagaataaaataaagtgactaaaaattaaacaaataccctttaagaaattaaaaaaactaaggaaacatttttcttgtttcgagtagataatgccagcctgttaaacgccgtcgacgagtctaacggacaccaaccagcgaaccagcagcgtcgcgtcgggccaagcgaagcagacggcacggcatctctgtcgctgcctctggacccctctcgagagttccgctccaccgttggacttgctccgctgtcggcatccagaaattgcgtggcggagcggcagacgtgagccggcacggcaggcggcctcctcctcctctcacggcaccggcagctacgggggattcctttcccaccgctccttcgctttcccttcctcgcccgccgtaataaatagacaccccctccacaccctctttccccaacctcgtgttgttcggagcgcacacacacacaaccagatctcccccaaatccacccgtcggcacctccgcttcaaggtacgccgctcgtcctcccccccccccctctctaccttctctagatcggcgttccggtccatgcatggttagggcccggtagttctacttctgttcatgtttgtgttagatccgtgtttgtgttagatccgtgctgctagcgttcgtacacggatgcgacctgtacgtcagacacgttctgattgctaacttgccagtgtttctctttggggaatcctgggatggctctagccgttccgcagacgggatcgatttcatgattttttttgtttcgttgcatagggtttggtttgcccttttcctttatttcaatatatgccgtgcacttgtttgtcgggtcatcttttcatgcttttttttgtcttggttgtgatgatgtggtctggttgggcggtcgttctagatcggagtagaattctgtttcaaactacctggtggatttattaattttggatctgtatgtgtgtgccatacatattcatagttacgaattgaagatgatggatggaaatatcgatctaggataggtatacatgttgatgcgggttttactgatgcatatacagagatgctttttgttcgcttggttgtgatgatgtggtgtggttgggcggtcgttcattcgttctagatcggagtagaatactgtttcaaactacctggtgtatttattaattttggaactgtatgtgtgtgtcatacatcttcatagttacgagtttaagatggatggaaatatcgatctaggataggtatacatgttgatgtgggttttactgatgcatatacatgatggcatatgcagcatctattcatatgctctaaccttgagtacctatctattataataaacaagtatgttttataattattttgatcttgatatacttggatgatggcatatgcagcagctatatgtggatttttttagccctgccttcatacgctatttatttgcttggtactgtttcttttgtcgatgctcaccctgttgtttggtgttacttctgcaggtcgactctagaggatcaattcgctagcgaagttcctattccgaagttcctattctctagaaagtataggaacttcagatccaccgggatccaccatggttgaacaagatggattgcacgcaggttctccggccgcttgggtggagaggctattcggctatgactgggcacaacagacaatcggctgctctgatgccgccgtgttccggctgtcagcgcaggggcgcccggttctttttgtcaagaccgacctgtccggtgccctgaatgaactgcaggacgaggcagcgcggctatcgtggctggccacgacgggcgttccttgcgcagctgtgctcgacgttgtcactgaagcgggaagggactggctgctattgggcgaagtgccggggcaggatctcctgtcatctcaccttgctcctgccgagaaagtatccatcatggctgatgcaatgcggcggctgcatacgcttgatccggctacctgcccattcgaccaccaagcgaaacatcgcatcgagcgagcacgtactcggatggaagccggtcttgtcgatcaggatgatctggacgaagagcatcaggggctcgcgccagccgaactgttcgccaggctcaaggcgcgcatgcccgacggcgatgatctcgtcgtgacccatggcgatgcctgcttgccgaatatcatggtggaaaatggccgcttttctggattcatcgactgtggccggctgggtgtggcggaccgctatcaggacatagcgttggctacccgtgatattgctgaagagcttggcggcgaatgggctgaccgcttcctcgtgctttacggtatcgccgctcccgattcgcagcgcatcgccttctatcgccttcttgacgagttcttctgaggatccaccatggttaacctagacttgtccatcttctggattggccaacttaattaatgtatgaaataaaaggatgcacacatagtgacatgctaatcactataatgtgggcatcaaagttgtgtgttatgtgtaattactagttatctgaataaaagagaaagagatcatccatatttcttatcctaaatgaatgtcacgtgtctttataattctttgatgaaccagatgcatttcattaaccaaatccatatacatataaatattaatcatatataattaatatcaattgggttagcaaaacaaatctagtctaggtgtgttttgcaagcttgcatgcctgcagtgcagcgtgacccggtcgtgcccctctctagagataatgagcattgcatgtctaagttataaaaaattaccacatattttttttgtcacacttgtttgaagtgcagtttatctatctttatacatatatttaaactttactctacgaataatataatctatagtactacaataatatcagtgttttagagaatcatataaatgaacagttagacatggtctaaaggacaattgagtattttgacaacaggactctacagttttatctttttagtgtgcatgtgttctcctttttttttgcaaatagcttcacctatataatacttcatccattttattagtacatccatttagggtttagggttaatggtttttatagactaatttttttagtacatctattttattctattttagcctctaaattaagaaaactaaaactctattttagtttttttatttaataatttagatataaaatagaataaaataaagtgactaaaaattaaacaaataccctttaagaaattaaaaaaactaaggaaacatttttcttgtttcgagtagataatgccagcctgttaaacgccgtcgacgagtctaacggacaccaaccagcgaaccagcagcgtcgcgtcgggccaagcgaagcagacggcacggcatctctgtcgctgcctctggacccctctcgagagttccgctccaccgttggacttgctccgctgtcggcatccagaaattgcgtggcggagcggcagacgtgagccggcacggcaggcggcctcctcctcctctcacggcaccggcagctacgggggattcctttcccaccgctccttcgctttcccttcctcgcccgccgtaataaatagacaccccctccacaccctctttccccaacctcgtgttgttcggagcgcacacacacacaaccagatctcccccaaatccacccgtcggcacctccgcttcaaggtacgccgctcgtcctcccccccccccctctctaccttctctagatcggcgttccggtccatgcatggttagggcccggtagttctacttctgttcatgtttgtgttagatccgtgtttgtgttagatccgtgctgctagcgttcgtacacggatgcgacctgtacgtcagacacgttctgattgctaacttgccagtgtttctctttggggaatcctgggatggctctagccgttccgcagacgggatcgatttcatgattttttttgtttcgttgcatagggtttggtttgcccttttcctttatttcaatatatgccgtgcacttgtttgtcgggtcatcttttcatgcttttttttgtcttggttgtgatgatgtggtctggttgggcggtcgttctagatcggagtagaattctgtttcaaactacctggtggatttattaattttggatctgtatgtgtgtgccatacatattcatagttacgaattgaagatgatggatggaaatatcgatctaggataggtatacatgttgatgcgggttttactgatgcatatacagagatgctttttgttcgcttggttgtgatgatgtggtgtggttgggcggtcgttcattcgttctagatcggagtagaatactgtttcaaactacctggtgtatttattaattttggaactgtatgtgtgtgtcatacatcttcatagttacgagtttaagatggatggaaatatcgatctaggataggtatacatgttgatgtgggttttactgatgcatatacatgatggcatatgcagcatctattcatatgctctaaccttgagtacctatctattataataaacaagtatgttttataattattttgatcttgatatacttggatgatggcatatgcagcagctatatgtggatttttttagccctgccttcatacgctatttatttgcttggtactgtttcttttgtcgatgctcaccctgttgtttggtgttacttctgcaggtcgactctagaggatccaccggtcgccaccatggccctgtccaacaagttcatcggcgacgacatgaagatgacctaccacatggacggctgcgtgaacggccactacttcaccgtgaagggcgagggcagcggcaagccctacgagggcacccagacctccaccttcaaggtgaccatggccaacggcggccccctggccttctccttcgacatcctgtccaccgtgttcatgtacggcaaccgctgcttcaccgcctaccccaccagcatgcccgactacttcaagcaggccttccccgacggcatgtcctacgagagaaccttcacctacgaggacggcggcgtggccaccgccagctgggagatcagcctgaagggcaactgcttcgagcacaagtccaccttccacggcgtgaacttccccgccgacggccccgtgatggccaagaagaccaccggctgggacccctccttcgagaagatgaccgtgtgcgacggcatcttgaagggcgacgtgaccgccttcctgatgctgcagggcggcggcaactacagatgccagttccacacctcctacaagaccaagaagcccgtgaccatgccccccaaccacgtggtggagcaccgcatcgccagaaccgacctggacaagggcggcaacagcgtgcagctgaccgagcacgccgtggcccacatcacctccgtggtgcccttctgaagcggccgcaacctagacttgtccatcttctggattggccaacttaattaatgtatgaaataaaaggatgcacacatagtgacatgctaatcactataatgtgggcatcaaagttgtgtgttatgtgtaattactagttatctgaataaaagagaaagagatcatccatatttcttatcctaaatgaatgtcacgtgtctttataattctttgatgaaccagatgcatttcattaaccaaatccatatacatataaatattaatcatatataattaatatcaattgggttagcaaaacaaatctagtctaggtgtgttttgcgaatgcggccgccaccgcggtggagctcgaatgcggccctagcgtatacgaagttcctattccgaagttcctattcttcaaaaagtataggaacttctgtaccgagctcgaattcattccgattaatcgtggcctcttgctcttcaggatgaagagctatgtttaaacgtgcaagcgctactagacaattcagtacattaaaaacgtccgcaatgtgttattaagttgtctaagcgtcaatttgtttacaccacaatatatcctgcca

SEQ ID NO: 6 - DNA, 17675 bp, synthetic construct
  misc_feature 1..17675: note = PHP81856
  source 1..17675: mol_type = other DNA
gtttacccgccaatatatcctgtcaaacactgcggccgcacttgaccgcggatggagccggagctgtggtgaggccatcgacgggaggtgggggagaacacagtctcagtgttctttgtgagtccgcaaggtttttagcttttctgtattaattaaggttgctgttggctgtagaatacggtcgtggaagagctgtatcggtagctactacgtaagctattatatactggaagtctggagctcgtcgatctccggtcgtcttcctccatttctcctcgtcttgctttgactgctgctaccatttgcttctgttttctgatgaagcatgccatgtcggccaccagtgtttgtgtggtttttgcagggaatggctttcaagtgctgtgattgaatggccctcgtcgtcctcggctgagctcacatggacgcgtcatgtgagtgagatatatgatcatatgatgagtggggttcgggtgagtgcgtacttgaagtaggatcccgctttcactcattcattcattggcctttaaaccgggaaattttcgcgaggagatggagggaagcaagcagggtgacgagtgcagagtgccgcgagcgctttgtcaaaaggcaccgccgtaggcaaaaaaatcaatggccctgactgactcgatggtagtactactgtagagactagagagggttgctccccatatcttcgtgtgacttttactccagcattgcatttccgtcattgagacgttaattaatagcagctttcgggacagatgactgtggccatgtttcgtcacggccgcttcgtgccagctgggggtactatagtactgtgattttgttagtaaaaactttcattaggccaccattgacgaccgggccttcgcttttgctgcgctaattaaccatttcccggcgaccgaagggaacatgaacatgccccgacacatgagggcatgaggactagtgttctccctgtcgttcgttgacttgactagtgatagtttaaacgctcttcaactggaagagcggttactaccggttcactagctagctgctaatcgagctagttaccctatgaggtgacatgaagcgctcacggttactatgacggttagcttcacgactgttggtggcagtagcgtacgacttagctatagttccggacttacccttaagataacttcgtatagcatacattatacgaagttatgggcccacgcgtgaagagcggttaccagagctggtcacctttgtccaccaagatggaactgtcttcggccagaatggccatctggattcagcaggcctagaaggccatttatcgctatcaactttgtatagaaaagttgggccgagctcggtacggccagaatggcccggaccgggttaccgaattcaggcgacccatcgctgctttgtctacatcatgttcttcatcatcctccccaggcgacgcgtgctgctgttcttattcagactaccgttcgagtgactgcatggcgtacatctttctgcatcgactttgtacggctacatcgaacatatacacgagatgtctcgtgtgaatagagtcactaatgccttaagcatcggttactccgtagggtacattctgttcttcttatttgtgcatatttttattgttgtttactgattatacgagtagttatacatacatgcacatacatatcatcacatatatcacaatatttttctaaattaaattaaaactaaaaatgactaaatttctaacaccaacgacattgtaatgttttctccaacaactttacctattctacattgttctatttcgaatttcactctataaacaacatagtctacaatggaaaacagtgctttgtacgactatatacgcgatgtgtggctacaacataagacaatatagtcgtttgaagattgaacctatatatcggtacggttaatccgtctatgtacgtgggcatgacgaacacccgtgataacgaaggattaacgtgcacaatcataaatccaaagtaggagcggtgcatgatgagaatcgctctcagtactcgacataatgaaccttacgaggtacaacaggcaggcaggcagggaccaggggccgcctttatttcaggctcgctggccccacgggcgtgctgcgtgcacgaagggcactaccccaacctctcaccgaaaaccgcgctggatcggcaaatcaaacgaggtggtgccccgtgcccactctccacgtccacggcaccatccctctgcagccgctcaccagccatgccgtgtcgcggaacggcacaaccacccccaacccactcacgaaaccccgtcccggccgtgcccgtgtcggtccgcgctcggcaacgaggcggcccgcgctgctgagtcccctggacacccgacaccctgtcggccctttgtttattcatcccgaaatctcatctgcccccacggccgactgcgctgcgccgcccggatatatatacccatcgttatcgatcgactggggactctatcagtgatagagtctagaggatcgctcaggaaggccgctgagatagaggcatggcggccaatgcgggcggcggtggagcgggaggaggcagcggcagcggcagcgtggctgcgccggcggtgtgccgccccagcggctcgcggtggacgccgacgccggagcagatcaggatgctgaaggagctctactacggctgcggcatccggtcgcccagctcggagcagatccagcgcatcaccgccatgctgcggcagcacggcaagatcgagggcaagaacgtcttctactggttccagaaccacaaggcccgcgagcgccagaagcgccgcctcaccagcctcgacgtcaacgtgcccgccgccggcgcggccgacgccaccaccagccaactcggcgtcctctcgctgtcgtcgccgccgccttcaggcgcggcgcctccctcgcccaccctcggcttctacgccgccggcaatggcggcggatcggctgtgctgctggacacgagttccgactggggcagcagcggcgctgccatggccaccgagacatgcttcctgcaggactacatgggcgtgacggacacgggcagctcgtcgcagtggccacgcttctcgtcgtcggacacgataatggcggcggccgcggcgcgggcggcgacgacgcgggcgcccgagacgctccctctcttcccgacctgcggcgacgacggcggcagcggtagcagcagctacttgccgttctggggtgccgcgtccacaactgccggcgccacttcttccgttgcgatccagcagcaacaccagctgcaggagcagtacagcttttacagcaacagcaacagcacccagctggccggcaccggcaaccaagacgtatcggcaacagcagcagcagccgccgccctggagctgagcctcagctcatggtgctccccttaccctgctgcagggagtatgtgagagcaacgcgagctgccactgctcttcactggtaccgttaacagatcattcgacaaagcagcattagtccgttgatcggtggaagaccactcgtcagtgttgagttgaatgtttgatcaataaaatacggcaatgctgtaagggttgttttttatgccattgataatacactgtactgttcagttgttgaactctatttcttagccatgccaagtgcttttcttattttgaataacattacagcaaaaagttgaaagacaaaaaaaaaaacccccgaacagagtgctttgggtcccaagcttctttagactgtgttcggcgttccccctaaatttctccccctatatctcactcacttgtcacatcagcgttctctttccccctatatctccacgctctacagcagttccacctatatcaaacctctataccccaccacaacaatattatatactttcatcttcaactaactcatgtaccttccaatttttttctactaataattatttacgtgcacagaaacttagcaaggagagagagagcggggtgacccaccttgctagttggatattacctcttctcttcaaagtatccttgaacgctcaccggttatcaaatctctacactatagctctgtagtcttgctagatagttagttctttagctctcggtgaccaagcttggcgcgatcaagcttatcgataccgtcgacctcgaagcttggtcacccggtccgggcctagaaggccagcttcaagtttgtacaaaaaagcaggctccggccagaatggcccggaccgggttaccgaattcttaccctagctccctgcggctgttacgcggtcccccatcaatcttctgttcttgcggttgtagcctgtgtaacagtgctagagtatgtatgataaataggttttaagtctgcttacatgacattttttattgtggaagagacatataaaaattagagagagtggttctcatgcaacggcggacggcccggtgctaaaagagcttcaagacaaaataatgaaacaggaagagagtagatttatctaagagccaactttattatatgaatgtgtttattgttggctttagatgatatggtaaggagttagagctaataatagataggctctattattattattattaattaaactcgctctaaggaggaaagtgggaggaagggacgaggacgaagactactggaagcatcgtgcatggatgatggatgtggtgtctcttaatgtaggtggccggaggatgtacgtgttaattgcgcgataagcactcagatccaaccgcaaactacctccacactgacacactgatagagagaaagagagacctccgacgactgccgccgcagatgagccacgtacgtatacgacgtctgccggccggctcaggctgccgccatcaccctgctcgaaagtcgcgttaggcggcgccagctacataggagtatctagtctagccagttagtatactactactgcgctgatgatgaattaactctgcatagatactgtacttgcctccctccaacacccaaccacctcctgctcggctcttaataacttggacacggatcgatgccatccaaggaagaacacgacgacgacgacggaacatccaccatgcaagcttgcatccatacgccgatacgcgtgcatccatccatccaccattatttccattttccaccgatcacacgtacacaggcctatttaaggagcgacatcccactgcaactctcctcactctatcagtgatagagtctctagcaaagcacttgccatctaccgaccgccgcattccaaacagcccgacgagctagcagagcggcaggcacctccctcctcaaggaacccatggccactgtgaacaactggctcgctttctccctctccccgcaggagctgccgccctcccagacgacggactccacactcatctcggccgccaccgccgaccatgtctccggcgatgtctgcttcaacatcccccaagattggagcatgaggggatcagagctttcggcgctcgtcgcggagccgaagctggaggacttcctcggcggcatctccttctccgagcagcatcacaaggccaactgcaacatgatacccagcactagcagcacagtttgctacgcgagctcaggtgctagcaccggctaccatcaccagctgtaccaccagcccaccagctcagcgctccacttcgcggactccgtaatggtggcttcctcggccggtgtccacgacggcggtgccatgctcagcgcggccgccgctaacggtgtcgctggcgctgccagtgccaacggcggcggcatcgggctgtccatgattaagaactggctgcggagccaaccggcgcccatgcagccgagggtggcggcggctgagggcgcgcaggggctctctttgtccatgaacatggcggggacgacccaaggcgctgctggcatgccacttctcgctggagagcgcgcacgggcgcccgagagtgtatcgacgtcagcacagggtggagccgtcgtcgtcacggcgccgaaggaggatagcggtggcagcggtgttgccggcgctctagtagccgtgagcacggacacgggtggcagcggcggcgcgtcggctgacaacacggcaaggaagacggtggacacgttcgggcagcgcacgtcgatttaccgtggcgtgacaaggcatagatggactgggagatatgaggcacatctttgggataacagttgcagaagggaagggcaaactcgtaagggtcgtcaagtctatttaggtggctatgataaagaggagaaagctgctagggcttatgatcttgctgctctgaagtactggggtgccacaacaacaacaaattttccagtgagtaactacgaaaaggagctcgaggacatgaagcacatgacaaggcaggagtttgtagcgtctctgagaaggaagagcagtggtttctccagaggtgcatccatttacaggggagtgactaggcatcaccaacatggaagatggcaagcacggattggacgagttgcagggaacaaggatctttacttgggcaccttcagcacccaggaggaggcagcggaggcgtacgacatcgcggcgatcaagttccgcggcctcaacgccgtcaccaacttcgacatgagccgctacgacgtgaagagcatcctggacagcagcgccctccccatcggcagcgccgccaagcgcctcaaggaggccgaggccgcagcgtccgcgcagcaccaccacgccggcgtggtgagctacgacgtcggccgcatcgcctcgcagctcggcgacggcggagccctggcggcggcgtacggcgcgcactaccacggcgccgcctggccgaccatcgcgttccagccgggcgccgccagcacaggcctgtaccacccgtacgcgcagcagccaatgcgcggcggcgggtggtgcaagcaggagcaggaccacgcggtgatcgcggccgcgcacagcctgcaggacctccaccacctgaacctgggcgcggccggcgcgcacgactttttctcggcagggcagcaggccgccgccgctgcgatgcacggcctgggtagcatcgacagtgcgtcgctcgagcacagcaccggctccaactccgtcgtctacaacggcggggtcggcgacagcaacggcgccagcgccgtcggcggcagtggcggtggctacatgatgccgatgagcgctgccggagcaaccactacatcggcaatggtgagccacgagcaggtgcatgcacgggcctacgacgaagccaagcaggctgctcagatggggtacgagagctacctggtgaacgcggagaacaatggtggcggaaggatgtctgcatgggggactgtcgtgtctgcagccgcggcggcagcagcaagcagcaacgacaacatggccgccgacgtcgggcatggcggcgcgcagctcttcagtgtctggaacgacacttaagcgtacctagtggtacctgacatcttatagtctgcaacctctcgtgtctgaattcctatctttatcaagtgttattgcttccacgactataggacagctttcgtcgaaagcttttgctcatgtgatctcgaaggattcatctagtctgatttttcgtgacttgtatcggttttattggattcatccaacatatatcaataaaaaatgagttgtgtttcctttcttcctagttcagttaaaattatttccctcctgcgcttgtgctgtaattgtctgtgtacctgttgtttgtgactgtgttagttcccttggatatgatttcgtatttgatatgtacatggagatagcttagcttcattattggagtatgaagttagtatgacatagtcactctcctggaaaattgacactgcaaaccatatttttattctgaaccacaaatcctagtcagtccgctggcatatgccgtccgtttgctgaatccagaacgtgggtttggagatgtacggctgagatgcctctatgcgaaggggatttcgtggtgaaacgagatgggagtagagcaacgcccgtggaagatgcttcaaacttccacacttttgagcaacgatcggcagtagtaaggtagacgatttcaagatcaaagcatatgaagataaacaacatcaacaacaaaatttgttggggttctatagagagaaacagagctacatacatacactgttttgtatctaccatctgagatgatgaaaagatgaaaaactaaagaatgccccggcgccaacgccaggacacgccgcgcgcgcgtcacccgagccatctcttgacccagccggcgctgtatatttacacacgttgcagcatcgatcaccacctgttcgatcgcgtcgccgtcaccggtaccgagctcgaattccggtccgggcctagaaggccgatctcccgggcacccagctttcttgtacaaagtggccgttaacggatcggccagatccctatagtattttaaaattgcattaacaaacatgtcctaattggtactcctgagatactataccctcctgttttaaaatagttggcattatcgaattatcattttactctttaatgttttctcttcttttaatatattttatgaattttaatgtattttaaaatgttatgcagttcgctctggacttttctgctgcgcctacacttgggtgtactgggcctaaattcagcctgaccgaccgcctgcattgaataatggatgagcaccggtaaaatccgcgtacccaactttcgagaagaaccgagacgtggcgggccgggccaccgacgcacggcaccagcgactgcacacgtcccgccggcgtacgtgtacgtgctgttccctcactggccgcccaatccactcatgcatgcccacgtacacccctgccgtggcgcgcccagatcctaatcctttcgccgttctgcacttctgctgcctataaatggcggcatcgaccgtcacctgcttcaccaccggcgagccacatcgagaacacgatcgagcacacaagcacgaagactcgtttaggagaaaccacaaaccaccaagccgtgcaagcaccaagcttggtcacccggtccgggcctagaaggccagcttcaagtttgtacaaaaaagcaggcttcgaaggagatagaaccgatccaccatgtccaacctgctcacggttcaccagaaccttccggctcttccagtggacgcgacgtccgatgaagtcaggaagaacctcatggacatgttccgcgacaggcaagcgttcagcgagcacacctggaagatgctgctctccgtctgccgctcctgggctgcatggtgcaagctgaacaacaggaagtggttccccgctgagcccgaggacgtgagggattaccttctgtacctgcaagcgcgaggtttgtttctgcttctacctttgatatatatataataattatcattaattagtagtaatataatatttcaaatatttttttcaaaataaaagaatgtagtatatagcaattgcttttctgtagtttataagtgtgtatattttaatttataacttttctaatatatgaccaaaacatggtgatgcctaggtctggcagtgaagaccatccagcaacaccttggacaactgaacatgcttcacaggcgctccggcctcccgcgccccagcgactcgaacgccgtgagcctcgtcatgcgccgcatcaggaaggaaaacgtcgatgccggcgaaagggcaaagcaggccctcgcgttcgagaggaccgatttcgaccaggtccgcagcctgatggagaacagcgacaggtgccaggacattaggaacctggcgttcctcggaattgcatacaacacgctcctcaggatcgcggaaattgcccgcattcgcgtgaaggacattagccgcaccgacggcggcaggatgcttatccacattggcaggaccaagacgctcgtttccaccgcaggcgtcgaaaaggccctcagcctcggagtgaccaagctcgtcgaacgctggatctccgtgtccggcgtcgcggacgacccaaacaactacctcttctgccgcgtccgcaagaacggggtggctgcccctagcgccaccagccaactcagcacgagggccttggaaggtattttcgaggccacccaccgcctgatctacggcgcgaaggatgacagcggtcaacgctacctcgcatggtccgggcactccgcccgcgttggagctgctagggacatggcccgcgccggtgtttccatccccgaaatcatgcaggcgggtggatggacgaacgtgaacattgtcatgaactacattcgcaaccttgacagcgagacgggcgcaatggttcgcctcctggaagatggtgactgagctagacccagctttcttgtacaaagtggccgttaacggatccagacttgtccatcttctggattggccaacttaattaatgtatgaaataaaaggatgcacacatagtgacatgctaatcactataatgtgggcatcaaagttgtgtgttatgtgtaattactagttatctgaataaaagagaaagagatcatccatatttcttatcctaaatgaatgtcacgtgtctttataattctttgatgaaccagatgcatttcattaaccaaatccatatacatataaatattaatcatatataattaatatcaattgggttagcaaaacaaatctagtctaggtgtgttttgcgaatgcggccgccaccgcggtggagctcgaattccggtccgggcctagaaggccagcttcggccgccccgggcaactttattatacaaagttgatagataaatcagatatctggttcctaaggacccggcggaccgattaaactgattcggtccgacgcgttacctaataacttcgtatagcatacattatacgaagttattagctaactaactagtaagcttggtcacccggtccgtcaatattctgattccgatgacttcgtaggttcctagctcaagccgctcgtgtccaagcgtcacttacgattagctaatgattacggcatctaggaccgactagtggcgcgccgactagctagctaaggtacgacttagctatagttccggacttaccggcgccgctagcctgcagtgcagcgtgacccggtcgtgcccctctctagagataatgagcattgcatgtctaagttataaaaaattaccacatattttttttgtcacacttgtttgaagtgcagtttatctatctttatacatatatttaaactttactctacgaataatataatctatagtactacaataatatcagtgttttagagaatcatataaatgaacagttagacatggtctaaaggacaattgagtattttgacaacaggactctacagttttatctttttagtgtgcatgtgttctcctttttttttgcaaatagcttcacctatataatacttcatccattttattagtacatccatttagggtttagggttaatggtttttatagactaatttttttagtacatctattttattctattttagcctctaaattaagaaaactaaaactctattttagtttttttatttaataatttagatataaaatagaataaaataaagtgactaaaaattaaacaaataccctttaagaaattaaaaaaactaaggaaacatttttcttgtttcgagtagataatgccagcctgttaaacgccgtcgacgagtctaacggacaccaaccagcgaaccagcagcgtcgcgtcgggccaagcgaagcagacggcacggcatctctgtcgctgcctctggacccctctcgagagttccgctccaccgttggacttgctccgctgtcggcatccagaaattgcgtggcggagcggcagacgtgagccggcacggcaggcggcctcctcctcctctcacggcaccggcagctacgggggattcctttcccaccgctccttcgctttcccttcctcgcccgccgtaataaatagacaccccctccacaccctctttccccaacctcgtgttgttcggagcgcacacacacacaaccagatctcccccaaatccacccgtcggcacctccgcttcaaggtacgccgctcgtcctcccccccccccctctctaccttctctagatcggcgttccggtccatgcatggttagggcccggtagttctacttctgttcatgtttgtgttagatccgtgtttgtgttagatccgtgctgctagcgttcgtacacggatgcgacctgtacgtcagacacgttctgattgctaacttgccagtgtttctctttggggaatcctgggatggctctagccgttccgcagacgggatcgatttcatgattttttttgtttcgttgcatagggtttggtttgcccttttcctttatttcaatatatgccgtgcacttgtttgtcgggtcatcttttcatgcttttttttgtcttggttgtgatgatgtggtctggttgggcggtcgttctagatcggagtagaattctgtttcaaactacctggtggatttattaattttggatctgtatgtgtgtgccatacatattcatagttacgaattgaagatgatggatggaaatatcgatctaggataggtatacatgttgatgcgggttttactgatgcatatacagagatgctttttgttcgcttggttgtgatgatgtggtgtggttgggcggtcgttcattcgttctagatcggagtagaatactgtttcaaactacctggtgtatttattaattttggaactgtatgtgtgtgtcatacatcttcatagttacgagtttaagatggatggaaatatcgatctaggataggtatacatgttgatgtgggttttactgatgcatatacatgatggcatatgcagcatctattcatatgctctaaccttgagtacctatctattataataaacaagtatgttttataattattttgatcttgatatacttggatgatggcatatgcagcagctatatgtggatttttttagccctgccttcatacgctatttatttgcttggtactgtttcttttgtcgatgctcaccctgttgtttggtgttacttctgcaggtcgactctagaggatcaattcgctagcgaagttcctattccgaagttcctattctctagaaagtataggaacttcagatccaccgggatccaccatggttgaacaagatggattgcacgcaggttctccggccgcttgggtggagaggctattcggctatgactgggcacaacagacaatcggctgctctgatgccgccgtgttccggctgtcagcgcaggggcgcccggttctttttgtcaagaccgacctgtccggtgccctgaatgaactgcaggacgaggcagcgcggctatcgtggctggccacgacgggcgttccttgcgcagctgtgctcgacgttgtcactgaagcgggaagggactggctgctattgggcgaagtgccggggcaggatctcctgtcatctcaccttgctcctgccgagaaagtatccatcatggctgatgcaatgcggcggctgcatacgcttgatccggctacctgcccattcgaccaccaagcgaaacatcgcatcgagcgagcacgtactcggatggaagccggtcttgtcgatcaggatgatctggacgaagagcatcaggggctcgcgccagccgaactgttcgccaggctcaaggcgcgcatgcccgacggcgatgatctcgtcgtgacccatggcgatgcctgcttgccgaatatcatggtggaaaatggccgcttttctggattcatcgactgtggccggctgggtgtggcggaccgctatcaggacatagcgttggctacccgtgatattgctgaagagcttggcggcgaatgggctgaccgcttcctcgtgctttacggtatcgccgctcccgattcgcagcgcatcgccttctatcgccttcttgacgagttcttctgaggatccaccatggttaacctagacttgtccatcttctggattggccaacttaattaatgtatgaaataaaaggatgcacacatagtgacatgctaatcactataatgtgggcatcaaagttgtgtgttatgtgtaattactagttatctgaataaaagagaaagagatcatccatatttcttatcctaaatgaatgtcacgtgtctttataattctttgatgaaccagatgcatttcattaaccaaatccatatacatataaatattaatcatatataattaatatcaattgggttagcaaaacaaatctagtctaggtgtgttttgcaagcttgcatgcctgcagtgcagcgtgacccggtcgtgcccctctctagagataatgagcattgcatgtctaagttataaaaaattaccacatattttttttgtcacacttgtttgaagtgcagtttatctatctttatacatatatttaaactttactctacgaataatataatctatagtactacaataatatcagtgttttagagaatcatataaatgaacagttagacatggtctaaaggacaattgagtattttgacaacaggactctacagttttatctttttagtgtgcatgtgttctcctttttttttgcaaatagcttcacctatataatacttcatccattttattagtacatccatttagggtttagggttaatggtttttatagactaatttttttagtacatctattttattctattttagcctctaaattaagaaaactaaaactctattttagtttttttatttaataatttagatataaaatagaataaaataaagtgactaaaaattaaacaaataccctttaagaaattaaaaaaactaaggaaacatttttcttgtttcgagtagataatgccagcctgttaaacgccgtcgacgagtctaacggacaccaaccagcgaaccagcagcgtcgcgtcgggccaagcgaagcagacggcacggcatctctgtcgctgcctctggacccctctcgagagttccgctccaccgttggacttgctccgctgtcggcatccagaaattgcgtggcggagcggcagacgtgagccggcacggcaggcggcctcctcctcctctcacggcaccggcagctacgggggattcctttcccaccgctccttcgctttcccttcctcgcccgccgtaataaatagacaccccctccacaccctctttccccaacctcgtgttgttcggagcgcacacacacacaaccagatctcccccaaatccacccgtcggcacctccgcttcaaggtacgccgctcgtcctcccccccccccctctctaccttctctagatcggcgttccggtccatgcatggttagggcccggtagttctacttctgttcatgtttgtgttagatccgtgtttgtgttagatccgtgctgctagcgttcgtacacggatgcgacctgtacgtcagacacgttctgattgctaacttgccagtgtttctctttggggaatcctgggatggctctagccgttccgcagacgggatcgatttcatgattttttttgtttcgttgcatagggtttggtttgcccttttcctttatttcaatatatgccgtgcacttgtttgtcgggtcatcttttcatgcttttttttgtcttggttgtgatgatgtggtctggttgggcggtcgttctagatcggagtagaattctgtttcaaactacctggtggatttattaattttggatctgtatgtgtgtgccatacatattcatagttacgaattgaagatgatggatggaaatatcgatctaggataggtatacatgttgatgcgggttttactgatgcatatacagagatgctttttgttcgcttggttgtgatgatgtggtgtggttgggcggtcgttcattcgttctagatcggagtagaatactgtttcaaactacctggtgtatttattaattttggaactgtatgtgtgtgtcatacatcttcatagttacgagtttaagatggatggaaatatcgatctaggataggtatacatgttgatgtgggttttactgatgcatatacatgatggcatatgcagcatctattcatatgctctaaccttgagtacctatctattataataaacaagtatgttttataattattttgatcttgatatacttggatgatggcatatgcagcagctatatgtggatttttttagccctgccttcatacgctatttatttgcttggtactgtttcttttgtcgatgctcaccctgttgtttggtgttacttctgcaggtcgactctagaggatccaccggtcgccaccatggccctgtccaacaagttcatcggcgacgacatgaagatgacctaccacatggacggctgcgtgaacggccactacttcaccgtgaagggcgagggcagcggcaagccctacgagggcacccagacctccaccttcaaggtgaccatggccaacggcggccccctggccttctccttcgacatcctgtccaccgtgttcatgtacggcaaccgctgcttcaccgcctaccccaccagcatgcccgactacttcaagcaggccttccccgacggcatgtcctacgagagaaccttcacctacgaggacggcggcgtggccaccgccagctgggagatcagcctgaagggcaactgcttcgagcacaagtccaccttccacggcgtgaacttccccgccgacggccccgtgatggccaagaagaccaccggctgggacccctccttcgagaagatgaccgtgtgcgacggcatcttgaagggcgacgtgaccgccttcctgatgctgcagggcggcggcaactacagatgccagttccacacctcctacaagaccaagaagcccgtgaccatgccccccaaccacgtggtggagcaccgcatcgccagaaccgacctggacaagggcggcaacagcgtgcagctgaccgagcacgccgtggcccacatcacctccgtggtgcccttctgaagcggccgcaacctagacttgtccatcttctggattggccaacttaattaatgtatgaaataaaaggatgcacacatagtgacatgctaatcactataatgtgggcatcaaagttgtgtgttatgtgtaattactagttatctgaataaaagagaaagagatcatccatatttcttatcctaaatgaatgtcacgtgtctttataattctttgatgaaccagatgcatttcattaaccaaatccatatacatataaatattaatcatatataattaatatcaattgggttagcaaaacaaatctagtctaggtgtgttttgcgaatgcggccgccaccgcggtggagctcgaatgcggccctagcgtatacgaagttcctattccgaagttcctattcttcaaaaagtataggaacttctgtaccgagctcgaattcattccgattaatcgtggcctcttgctcttcaggatgaagagctatgtttaaacgtgcaagcgctactagacaattcagtacattaaaaacgtccgcaatgtgttattaagttgtctaagcgtcaatttgtttacaccacaatatatcctgcca

SEQ ID NO: 7 - DNA, 16906 bp, synthetic construct
  misc_feature 1..16906: note = PHP81857
  source 1..16906: mol_type = other DNA
gtttacccgccaatatatcctgtcaaacactgcggccgcacttgaccgcggatggagccggagctgtggtgaggccatcgacgggaggtgggggagaacacagtctcagtgttctttgtgagtccgcaaggtttttagcttttctgtattaattaaggttgctgttggctgtagaatacggtcgtggaagagctgtatcggtagctactacgtaagctattatatactggaagtctggagctcgtcgatctccggtcgtcttcctccatttctcctcgtcttgctttgactgctgctaccatttgcttctgttttctgatgaagcatgccatgtcggccaccagtgtttgtgtggtttttgcagggaatggctttcaagtgctgtgattgaatggccctcgtcgtcctcggctgagctcacatggacgcgtcatgtgagtgagatatatgatcatatgatgagtggggttcgggtgagtgcgtacttgaagtaggatcccgctttcactcattcattcattggcctttaaaccgggaaattttcgcgaggagatggagggaagcaagcagggtgacgagtgcagagtgccgcgagcgctttgtcaaaaggcaccgccgtaggcaaaaaaatcaatggccctgactgactcgatggtagtactactgtagagactagagagggttgctccccatatcttcgtgtgacttttactccagcattgcatttccgtcattgagacgttaattaatagcagctttcgggacagatgactgtggccatgtttcgtcacggccgcttcgtgccagctgggggtactatagtactgtgattttgttagtaaaaactttcattaggccaccattgacgaccgggccttcgcttttgctgcgctaattaaccatttcccggcgaccgaagggaacatgaacatgccccgacacatgagggcatgaggactagtgttctccctgtcgttcgttgacttgactagtgatagtttaaacgctcttcaactggaagagcggttactaccggttcactagctagctgctaatcgagctagttaccctatgaggtgacatgaagcgctcacggttactatgacggttagcttcacgactgttggtggcagtagcgtacgacttagctatagttccggacttacccttaagataacttcgtatagcatacattatacgaagttatgggcccacgcgtgaagagcggttaccagagctggtcacctttgtccaccaagatggaactgtcttcggccagaatggccatctggattcagcaggcctagaaggccatttatcgctatcaactttgtatagaaaagttgggccgaattcgagctcggtacggccagaatggcccggaccgaagcttcggccgcacactgatagtttaaactgaaggcgggaaacgacaatctgatcatgagcggagaattaagggagtcacgttatgacccccgccgatgacgcgggacaagccgttttacgtttggaactgacagaaccgcaacgttgaaggagccactcagccgcgggtttctggagtttaatgagctaagcacatacgtcagaaaccattattgcgcgttcaaaagtcgcctaaggtcactatcagctagcaaatatttcttgtcaaaaatgctccactgacgttccataaattcccctcggtatccaattactctatcagtgatagagtactggcgcgccactctatcagtgatagagtctagaggatcgctcaggaaggccgctgagatagaggcatggcggccaatgcgggcggcggtggagcgggaggaggcagcggcagcggcagcgtggctgcgccggcggtgtgccgccccagcggctcgcggtggacgccgacgccggagcagatcaggatgctgaaggagctctactacggctgcggcatccggtcgcccagctcggagcagatccagcgcatcaccgccatgctgcggcagcacggcaagatcgagggcaagaacgtcttctactggttccagaaccacaaggcccgcgagcgccagaagcgccgcctcaccagcctcgacgtcaacgtgcccgccgccggcgcggccgacgccaccaccagccaactcggcgtcctctcgctgtcgtcgccgccgccttcaggcgcggcgcctccctcgcccaccctcggcttctacgccgccggcaatggcggcggatcggctgtgctgctggacacgagttccgactggggcagcagcggcgctgccatggccaccgagacatgcttcctgcaggactacatgggcgtgacggacacgggcagctcgtcgcagtggccacgcttctcgtcgtcggacacgataatggcggcggccgcggcgcgggcggcgacgacgcgggcgcccgagacgctccctctcttcccgacctgcggcgacgacggcggcagcggtagcagcagctacttgccgttctggggtgccgcgtccacaactgccggcgccacttcttccgttgcgatccagcagcaacaccagctgcaggagcagtacagcttttacagcaacagcaacagcacccagctggccggcaccggcaaccaagacgtatcggcaacagcagcagcagccgccgccctggagctgagcctcagctcatggtgctccccttaccctgctgcagggagtatgtgagagcaacgcgagctgccactgctcttcactggtaccgttaacagatcattcgacaaagcagcattagtccgttgatcggtggaagaccactcgtcagtgttgagttgaatgtttgatcaataaaatacggcaatgctgtaagggttgttttttatgccattgataatacactgtactgttcagttgttgaactctatttcttagccatgccaagtgcttttcttattttgaataacattacagcaaaaagttgaaagacaaaaaaaaaaacccccgaacagagtgctttgggtcccaagcttctttagactgtgttcggcgttccccctaaatttctccccctatatctcactcacttgtcacatcagcgttctctttccccctatatctccacgctctacagcagttccacctatatcaaacctctataccccaccacaacaatattatatactttcatcttcaactaactcatgtaccttccaatttttttctactaataattatttacgtgcacagaaacttagcaaggagagagagagcggggtgacccaccttgctagttggatattacctcttctcttcaaagtatccttgaacgctcaccggttatcaaatctctacactatagctctgtagtcttgctagatagttagttctttagctctcggtgaccaagcttggcgcgatcaagcttatcgataccgtcgacctcgaagcttggtcacccggtccgggcctagaaggccagcttcaagtttgtacaaaaaagcaggctccggccagaatggcccggaccgggttaccgaattcttaccctagctccctgcggctgttacgcggtcccccatcaatcttctgttcttgcggttgtagcctgtgtaacagtgctagagtatgtatgataaataggttttaagtctgcttacatgacattttttattgtggaagagacatataaaaattagagagagtggttctcatgcaacggcggacggcccggtgctaaaagagcttcaagacaaaataatgaaacaggaagagagtagatttatctaagagccaactttattatatgaatgtgtttattgttggctttagatgatatggtaaggagttagagctaataatagataggctctattattattattattaattaaactcgctctaaggaggaaagtgggaggaagggacgaggacgaagactactggaagcatcgtgcatggatgatggatgtggtgtctcttaatgtaggtggccggaggatgtacgtgttaattgcgcgataagcactcagatccaaccgcaaactacctccacactgacacactgatagagagaaagagagacctccgacgactgccgccgcagatgagccacgtacgtatacgacgtctgccggccggctcaggctgccgccatcaccctgctcgaaagtcgcgttaggcggcgccagctacataggagtatctagtctagccagttagtatactactactgcgctgatgatgaattaactctgcatagatactgtacttgcctccctccaacacccaaccacctcctgctcggctcttaataacttggacacggatcgatgccatccaaggaagaacacgacgacgacgacggaacatccaccatgcaagcttgcatccatacgccgatacgcgtgcatccatccatccaccattatttccattttccaccgatcacacgtacacaggcctatttaaggagcgacatcccactgcaactctcctcaccactcatcaccagctagctctagcaaagcacttgccatctaccgaccgccgcattccaaacagcccgacgagctagcagagcggcaggcacctccctcctcaaggaacccatggccactgtgaacaactggctcgctttctccctctccccgcaggagctgccgccctcccagacgacggactccacactcatctcggccgccaccgccgaccatgtctccggcgatgtctgcttcaacatcccccaagattggagcatgaggggatcagagctttcggcgctcgtcgcggagccgaagctggaggacttcctcggcggcatctccttctccgagcagcatcacaaggccaactgcaacatgatacccagcactagcagcacagtttgctacgcgagctcaggtgctagcaccggctaccatcaccagctgtaccaccagcccaccagctcagcgctccacttcgcggactccgtaatggtggcttcctcggccggtgtccacgacggcggtgccatgctcagcgcggccgccgctaacggtgtcgctggcgctgccagtgccaacggcggcggcatcgggctgtccatgattaagaactggctgcggagccaaccggcgcccatgcagccgagggtggcggcggctgagggcgcgcaggggctctctttgtccatgaacatggcggggacgacccaaggcgctgctggcatgccacttctcgctggagagcgcgcacgggcgcccgagagtgtatcgacgtcagcacagggtggagccgtcgtcgtcacggcgccgaaggaggatagcggtggcagcggtgttgccggcgctctagtagccgtgagcacggacacgggtggcagcggcggcgcgtcggctgacaacacggcaaggaagacggtggacacgttcgggcagcgcacgtcgatttaccgtggcgtgacaaggcatagatggactgggagatatgaggcacatctttgggataacagttgcagaagggaagggcaaactcgtaagggtcgtcaagtctatttaggtggctatgataaagaggagaaagctgctagggcttatgatcttgctgctctgaagtactggggtgccacaacaacaacaaattttccagtgagtaactacgaaaaggagctcgaggacatgaagcacatgacaaggcaggagtttgtagcgtctctgagaaggaagagcagtggtttctccagaggtgcatccatttacaggggagtgactaggcatcaccaacatggaagatggcaagcacggattggacgagttgcagggaacaaggatctttacttgggcaccttcagcacccaggaggaggcagcggaggcgtacgacatcgcggcgatcaagttccgcggcctcaacgccgtcaccaacttcgacatgagccgctacgacgtgaagagcatcctggacagcagcgccctccccatcggcagcgccgccaagcgcctcaaggaggccgaggccgcagcgtccgcgcagcaccaccacgccggcgtggtgagctacgacgtcggccgcatcgcctcgcagctcggcgacggcggagccctggcggcggcgtacggcgcgcactaccacggcgccgcctggccgaccatcgcgttccagccgggcgccgccagcacaggcctgtaccacccgtacgcgcagcagccaatgcgcggcggcgggtggtgcaagcaggagcaggaccacgcggtgatcgcggccgcgcacagcctgcaggacctccaccacctgaacctgggcgcggccggcgcgcacgactttttctcggcagggcagcaggccgccgccgctgcgatgcacggcctgggtagcatcgacagtgcgtcgctcgagcacagcaccggctccaactccgtcgtctacaacggcggggtcggcgacagcaacggcgccagcgccgtcggcggcagtggcggtggctacatgatgccgatgagcgctgccggagcaaccactacatcggcaatggtgagccacgagcaggtgcatgcacgggcctacgacgaagccaagcaggctgctcagatggggtacgagagctacctggtgaacgcggagaacaatggtggcggaaggatgtctgcatgggggactgtcgtgtctgcagccgcggcggcagcagcaagcagcaacgacaacatggccgccgacgtcgggcatggcggcgcgcagctcttcagtgtctggaacgacacttaagcgtacctagtggtacctgacatcttatagtctgcaacctctcgtgtctgaattcctatctttatcaagtgttattgcttccacgactataggacagctttcgtcgaaagcttttgctcatgtgatctcgaaggattcatctagtctgatttttcgtgacttgtatcggttttattggattcatccaacatatatcaataaaaaatgagttgtgtttcctttcttcctagttcagttaaaattatttccctcctgcgcttgtgctgtaattgtctgtgtacctgttgtttgtgactgtgttagttcccttggatatgatttcgtatttgatatgtacatggagatagcttagcttcattattggagtatgaagttagtatgacatagtcactctcctggaaaattgacactgcaaaccatatttttattctgaaccacaaatcctagtcagtccgctggcatatgccgtccgtttgctgaatccagaacgtgggtttggagatgtacggctgagatgcctctatgcgaaggggatttcgtggtgaaacgagatgggagtagagcaacgcccgtggaagatgcttcaaacttccacacttttgagcaacgatcggcagtagtaaggtagacgatttcaagatcaaagcatatgaagataaacaacatcaacaacaaaatttgttggggttctatagagagaaacagagctacatacatacactgttttgtatctaccatctgagatgatgaaaagatgaaaaactaaagaatgccccggcgccaacgccaggacacgccgcgcgcgcgtcacccgagccatctcttgacccagccggcgctgtatatttacacacgttgcagcatcgatcaccacctgttcgatcgcgtcgccgtcaccggtaccgagctcgaattccggtccgggcctagaaggccgatctcccgggcacccagctttcttgtacaaagtggccgttaacggatcggccagatccctatagtattttaaaattgcattaacaaacatgtcctaattggtactcctgagatactataccctcctgttttaaaatagttggcattatcgaattatcattttactctttaatgttttctcttcttttaatatattttatgaattttaatgtattttaaaatgttatgcagttcgctctggacttttctgctgcgcctacacttgggtgtactgggcctaaattcagcctgaccgaccgcctgcattgaataatggatgagcaccggtaaaatccgcgtacccaactttcgagaagaaccgagacgtggcgggccgggccaccgacgcacggcaccagcgactgcacacgtcccgccggcgtacgtgtacgtgctgttccctcactggccgcccaatccactcatgcatgcccacgtacacccctgccgtggcgcgcccagatcctaatcctttcgccgttctgcacttctgctgcctataaatggcggcatcgaccgtcacctgcttcaccaccggcgagccacatcgagaacacgatcgagcacacaagcacgaagactcgtttaggagaaaccacaaaccaccaagccgtgcaagcaccaagcttggtcacccggtccgggcctagaaggccagcttcaagtttgtacaaaaaagcaggcttcgaaggagatagaaccgatccaccatgtccaacctgctcacggttcaccagaaccttccggctcttccagtggacgcgacgtccgatgaagtcaggaagaacctcatggacatgttccgcgacaggcaagcgttcagcgagcacacctggaagatgctgctctccgtctgccgctcctgggctgcatggtgcaagctgaacaacaggaagtggttccccgctgagcccgaggacgtgagggattaccttctgtacctgcaagcgcgaggtttgtttctgcttctacctttgatatatatataataattatcattaattagtagtaatataatatttcaaatatttttttcaaaataaaagaatgtagtatatagcaattgcttttctgtagtttataagtgtgtatattttaatttataacttttctaatatatgaccaaaacatggtgatgcctaggtctggcagtgaagaccatccagcaacaccttggacaactgaacatgcttcacaggcgctccggcctcccgcgccccagcgactcgaacgccgtgagcctcgtcatgcgccgcatcaggaaggaaaacgtcgatgccggcgaaagggcaaagcaggccctcgcgttcgagaggaccgatttcgaccaggtccgcagcctgatggagaacagcgacaggtgccaggacattaggaacctggcgttcctcggaattgcatacaacacgctcctcaggatcgcggaaattgcccgcattcgcgtgaaggacattagccgcaccgacggcggcaggatgcttatccacattggcaggaccaagacgctcgtttccaccgcaggcgtcgaaaaggccctcagcctcggagtgaccaagctcgtcgaacgctggatctccgtgtccggcgtcgcggacgacccaaacaactacctcttctgccgcgtccgcaagaacggggtggctgcccctagcgccaccagccaactcagcacgagggccttggaaggtattttcgaggccacccaccgcctgatctacggcgcgaaggatgacagcggtcaacgctacctcgcatggtccgggcactccgcccgcgttggagctgctagggacatggcccgcgccggtgtttccatccccgaaatcatgcaggcgggtggatggacgaacgtgaacattgtcatgaactacattcgcaaccttgacagcgagacgggcgcaatggttcgcctcctggaagatggtgactgagctagacccagctttcttgtacaaagtggccgttaacggatccagacttgtccatcttctggattggccaacttaattaatgtatgaaataaaaggatgcacacatagtgacatgctaatcactataatgtgggcatcaaagttgtgtgttatgtgtaattactagttatctgaataaaagagaaagagatcatccatatttcttatcctaaatgaatgtcacgtgtctttataattctttgatgaaccagatgcatttcattaaccaaatccatatacatataaatattaatcatatataattaatatcaattgggttagcaaaacaaatctagtctaggtgtgttttgcgaatgcggccgccaccgcggtggagctcgaattccggtccgggcctagaaggccagcttcggccgccccgggcaactttattatacaaagttgatagataaatcagatatctggttcctaaggacccggcggaccgattaaactgattcggtccgacgcgttacctaataacttcgtatagcatacattatacgaagttattagctaactaactagtaagcttggtcacccggtccgtcaatattctgattccgatgacttcgtaggttcctagctcaagccgctcgtgtccaagcgtcacttacgattagctaatgattacggcatctaggaccgactagtggcgcgccgactagctagctaaggtacgacttagctatagttccggacttaccggcgccgctagcctgcagtgcagcgtgacccggtcgtgcccctctctagagataatgagcattgcatgtctaagttataaaaaattaccacatattttttttgtcacacttgtttgaagtgcagtttatctatctttatacatatatttaaactttactctacgaataatataatctatagtactacaataatatcagtgttttagagaatcatataaatgaacagttagacatggtctaaaggacaattgagtattttgacaacaggactctacagttttatctttttagtgtgcatgtgttctcctttttttttgcaaatagcttcacctatataatacttcatccattttattagtacatccatttagggtttagggttaatggtttttatagactaatttttttagtacatctattttattctattttagcctctaaattaagaaaactaaaactctattttagtttttttatttaataatttagatataaaatagaataaaataaagtgactaaaaattaaacaaataccctttaagaaattaaaaaaactaaggaaacatttttcttgtttcgagtagataatgccagcctgttaaacgccgtcgacgagtctaacggacaccaaccagcgaaccagcagcgtcgcgtcgggccaagcgaagcagacggcacggcatctctgtcgctgcctctggacccctctcgagagttccgctccaccgttggacttgctccgctgtcggcatccagaaattgcgtggcggagcggcagacgtgagccggcacggcaggcggcctcctcctcctctcacggcaccggcagctacgggggattcctttcccaccgctccttcgctttcccttcctcgcccgccgtaataaatagacaccccctccacaccctctttccccaacctcgtgttgttcggagcgcacacacacacaaccagatctcccccaaatccacccgtcggcacctccgcttcaaggtacgccgctcgtcctcccccccccccctctctaccttctctagatcggcgttccggtccatgcatggttagggcccggtagttctacttctgttcatgtttgtgttagatccgtgtttgtgttagatccgtgctgctagcgttcgtacacggatgcgacctgtacgtcagacacgttctgattgctaacttgccagtgtttctctttggggaatcctgggatggctctagccgttccgcagacgggatcgatttcatgattttttttgtttcgttgcatagggtttggtttgcccttttcctttatttcaatatatgccgtgcacttgtttgtcgggtcatcttttcatgcttttttttgtcttggttgtgatgatgtggtctggttgggcggtcgttctagatcggagtagaattctgtttcaaactacctggtggatttattaattttggatctgtatgtgtgtgccatacatattcatagttacgaattgaagatgatggatggaaatatcgatctaggataggtatacatgttgatgcgggttttactgatgcatatacagagatgctttttgttcgcttggttgtgatgatgtggtgtggttgggcggtcgttcattcgttctagatcggagtagaatactgtttcaaactacctggtgtatttattaattttggaactgtatgtgtgtgtcatacatcttcatagttacgagtttaagatggatggaaatatcgatctaggataggtatacatgttgatgtgggttttactgatgcatatacatgatggcatatgcagcatctattcatatgctctaaccttgagtacctatctattataataaacaagtatgttttataattattttgatcttgatatacttggatgatggcatatgcagcagctatatgtggatttttttagccctgccttcatacgctatttatttgcttggtactgtttcttttgtcgatgctcaccctgttgtttggtgttacttctgcaggtcgactctagaggatcaattcgctagcgaagttcctattccgaagttcctattctctagaaagtataggaacttcagatccaccgggatccaccatggttgaacaagatggattgcacgcaggttctccggccgcttgggtggagaggctattcggctatgactgggcacaacagacaatcggctgctctgatgccgccgtgttccggctgtcagcgcaggggcgcccggttctttttgtcaagaccgacctgtccggtgccctgaatgaactgcaggacgaggcagcgcggctatcgtggctggccacgacgggcgttccttgcgcagctgtgctcgacgttgtcactgaagcgggaagggactggctgctattgggcgaagtgccggggcaggatctcctgtcatctcaccttgctcctgccgagaaagtatccatcatggctgatgcaatgcggcggctgcatacgcttgatccggctacctgcccattcgaccaccaagcgaaacatcgcatcgagcgagcacgtactcggatggaagccggtcttgtcgatcaggatgatctggacgaagagcatcaggggctcgcgccagccgaactgttcgccaggctcaaggcgcgcatgcccgacggcgatgatctcgtcgtgacccatggcgatgcctgcttgccgaatatcatggtggaaaatggccgcttttctggattcatcgactgtggccggctgggtgtggcggaccgctatcaggacatagcgttggctacccgtgatattgctgaagagcttggcggcgaatgggctgaccgcttcctcgtgctttacggtatcgccgctcccgattcgcagcgcatcgccttctatcgccttcttgacgagttcttctgaggatccaccatggttaacctagacttgtccatcttctggattggccaacttaattaatgtatgaaataaaaggatgcacacatagtgacatgctaatcactataatgtgggcatcaaagttgtgtgttatgtgtaattactagttatctgaataaaagagaaagagatcatccatatttcttatcctaaatgaatgtcacgtgtctttataattctttgatgaaccagatgcatttcattaaccaaatccatatacatataaatattaatcatatataattaatatcaattgggttagcaaaacaaatctagtctaggtgtgttttgcaagcttgcatgcctgcagtgcagcgtgacccggtcgtgcccctctctagagataatgagcattgcatgtctaagttataaaaaattaccacatattttttttgtcacacttgtttgaagtgcagtttatctatctttatacatatatttaaactttactctacgaataatataatctatagtactacaataatatcagtgttttagagaatcatataaatgaacagttagacatggtctaaaggacaattgagtattttgacaacaggactctacagttttatctttttagtgtgcatgtgttctcctttttttttgcaaatagcttcacctatataatacttcatccattttattagtacatccatttagggtttagggttaatggtttttatagactaatttttttagtacatctattttattctattttagcctctaaattaagaaaactaaaactctattttagtttttttatttaataatttagatataaaatagaataaaataaagtgactaaaaattaaacaaataccctttaagaaattaaaaaaactaaggaaacatttttcttgtttcgagtagataatgccagcctgttaaacgccgtcgacgagtctaacggacaccaaccagcgaaccagcagcgtcgcgtcgggccaagcgaagcagacggcacggcatctctgtcgctgcctctggacccctctcgagagttccgctccaccgttggacttgctccgctgtcggcatccagaaattgcgtggcggagcggcagacgtgagccggcacggcaggcggcctcctcctcctctcacggcaccggcagctacgggggattcctttcccaccgctccttcgctttcccttcctcgcccgccgtaataaatagacaccccctccacaccctctttccccaacctcgtgttgttcggagcgcacacacacacaaccagatctcccccaaatccacccgtcggcacctccgcttcaaggtacgccgctcgtcctcccccccccccctctctaccttctctagatcggcgttccggtccatgcatggttagggcccggtagttctacttctgttcatgtttgtgttagatccgtgtttgtgttagatccgtgctgctagcgttcgtacacggatgcgacctgtacgtcagacacgttctgattgctaacttgccagtgtttctctttggggaatcctgggatggctctagccgttccgcagacgggatcgatttcatgattttttttgtttcgttgcatagggtttggtttgcccttttcctttatttcaatatatgccgtgcacttgtttgtcgggtcatcttttcatgcttttttttgtcttggttgtgatgatgtggtctggttgggcggtcgttctagatcggagtagaattctgtttcaaactacctggtggatttattaattttggatctgtatgtgtgtgccatacatattcatagttacgaattgaagatgatggatggaaatatcgatctaggataggtatacatgttgatgcgggttttactgatgcatatacagagatgctttttgttcgcttggttgtgatgatgtggtgtggttgggcggtcgttcattcgttctagatcggagtagaatactgtttcaaactacctggtgtatttattaattttggaactgtatgtgtgtgtcatacatcttcatagttacgagtttaagatggatggaaatatcgatctaggataggtatacatgttgatgtgggttttactgatgcatatacatgatggcatatgcagcatctattcatatgctctaaccttgagtacctatctattataataaacaagtatgttttataattattttgatcttgatatacttggatgatggcatatgcagcagctatatgtggatttttttagccctgccttcatacgctatttatttgcttggtactgtttcttttgtcgatgctcaccctgttgtttggtgttacttctgcaggtcgactctagaggatccaccggtcgccaccatggccctgtccaacaagttcatcggcgacgacatgaagatgacctaccacatggacggctgcgtgaacggccactacttcaccgtgaagggcgagggcagcggcaagccctacgagggcacccagacctccaccttcaaggtgaccatggccaacggcggccccctggccttctccttcgacatcctgtccaccgtgttcatgtacggcaaccgctgcttcaccgcctaccccaccagcatgcccgactacttcaagcaggccttccccgacggcatgtcctacgagagaaccttcacctacgaggacggcggcgtggccaccgccagctgggagatcagcctgaagggcaactgcttcgagcacaagtccaccttccacggcgtgaacttccccgccgacggccccgtgatggccaagaagaccaccggctgggacccctccttcgagaagatgaccgtgtgcgacggcatcttgaagggcgacgtgaccgccttcctgatgctgcagggcggcggcaactacagatgccagttccacacctcctacaagaccaagaagcccgtgaccatgccccccaaccacgtggtggagcaccgcatcgccagaaccgacctggacaagggcggcaacagcgtgcagctgaccgagcacgccgtggcccacatcacctccgtggtgcccttctgaagcggccgcaacctagacttgtccatcttctggattggccaacttaattaatgtatgaaataaaaggatgcacacatagtgacatgctaatcactataatgtgggcatcaaagttgtgtgttatgtgtaattactagttatctgaataaaagagaaagagatcatccatatttcttatcctaaatgaatgtcacgtgtctttataattctttgatgaaccagatgcatttcattaaccaaatccatatacatataaatattaatcatatataattaatatcaattgggttagcaaaacaaatctagtctaggtgtgttttgcgaatgcggccgccaccgcggtggagctcgaatgcggccctagcgtatacgaagttcctattccgaagttcctattcttcaaaaagtataggaacttctgtaccgagctcgaattcattccgattaatcgtggcctcttgctcttcaggatgaagagctatgtttaaacgtgcaagcgctactagacaattcagtacattaaaaacgtccgcaatgtgttattaagttgtctaagcgtcaatttgtttacaccacaatatatcctgcca

SEQ ID NO: 8 - DNA, 17189 bp, synthetic construct
  misc_feature 1..17189: note = PHP81858
  source 1..17189: mol_type = other DNA
gtttacccgccaatatatcctgtcaaacactgcggccgcacttgaccgcggatggagccggagctgtggtgaggccatcgacgggaggtgggggagaacacagtctcagtgttctttgtgagtccgcaaggtttttagcttttctgtattaattaaggttgctgttggctgtagaatacggtcgtggaagagctgtatcggtagctactacgtaagctattatatactggaagtctggagctcgtcgatctccggtcgtcttcctccatttctcctcgtcttgctttgactgctgctaccatttgcttctgttttctgatgaagcatgccatgtcggccaccagtgtttgtgtggtttttgcagggaatggctttcaagtgctgtgattgaatggccctcgtcgtcctcggctgagctcacatggacgcgtcatgtgagtgagatatatgatcatatgatgagtggggttcgggtgagtgcgtacttgaagtaggatcccgctttcactcattcattcattggcctttaaaccgggaaattttcgcgaggagatggagggaagcaagcagggtgacgagtgcagagtgccgcgagcgctttgtcaaaaggcaccgccgtaggcaaaaaaatcaatggccctgactgactcgatggtagtactactgtagagactagagagggttgctccccatatcttcgtgtgacttttactccagcattgcatttccgtcattgagacgttaattaatagcagctttcgggacagatgactgtggccatgtttcgtcacggccgcttcgtgccagctgggggtactatagtactgtgattttgttagtaaaaactttcattaggccaccattgacgaccgggccttcgcttttgctgcgctaattaaccatttcccggcgaccgaagggaacatgaacatgccccgacacatgagggcatgaggactagtgttctccctgtcgttcgttgacttgactagtgatagtttaaacgctcttcaactggaagagcggttactaccggttcactagctagctgctaatcgagctagttaccctatgaggtgacatgaagcgctcacggttactatgacggttagcttcacgactgttggtggcagtagcgtacgacttagctatagttccggacttacccttaagataacttcgtatagcatacattatacgaagttatgggcccacgcgtgaagagcggttaccagagctggtcacctttgtccaccaagatggaactgtcttcggccagaatggccatctggattcagcaggcctagaaggccatttatcgctatcaactttgtatagaaaagttgggccgaattcgagctcggtacggccagaatccggtaagtgactagggtcacgtgaccctagtcacttaaattcggccagaatggccatctggattcagcaggcgaggccggccacactgatagtttaaactgaaggcgggaaacgacaatctgatcatgagcggagaattaagggagtcacgttatgacccccgccgatgacgcgggacaagccgttttacgtttggaactgacagaaccgcaacgattgaaggagccactcagccgcgggtttctggagtttaatgagctaagcacatacgtcagaaaccattattgcgcgttcaaaagtcgcctaaggtcactatcagctagcaaatatttcttgtcaaaaatgctccactgacgttccataaattcccctcggtatccaattagagtctcatattcactctcccggcggatctcgactctagaggatcgctcaggaaggccgctgagatagagccatggcggccaatgcgggcggcggtggagcgggaggaggcagcggcagcggcagcgtggctgcgccggcggtgtgccgccccagcggctcgcggtggacgccgacgccggagcagatcaggatgctgaaggagctctactacggctgcggcatccggtcgcccagctcggagcagatccagcgcatcaccgccatgctgcggcagcacggcaagatcgagggcaagaacgtcttctactggttccagaaccacaaggcccgcgagcgccagaagcgccgcctcaccagcctcgacgtcaacgtgcccgccgccggcgcggccgacgccaccaccagccaactcggcgtcctctcgctgtcgtcgccgccgccttcaggcgcggcgcctccctcgcccaccctcggcttctacgccgccggcaatggcggcggatcggctgtgctgctggacacgagttccgactggggcagcagcggcgctgctatggccaccgagacatgcttcctgcaggactacatgggcgtgacggacacgggcagctcgtcgcagtggccacgcttctcgtcgtcggacacgataatggcggcggccgcggcgcgggcggcgacgacgcgggcgcccgagacgctccctctcttcccgacctgcggcgacgacggcggcagcggtagcagcagctacttgccgttctggggtgccgcgtccacaactgccggcgccacttcttccgttgcgatccaacagcaacaccagctgcaggagcagtacagcttttacagcaacagcaacagcacccagctggccggcaccggcaaccaagacgtatcggcaacagcagcagcagccgccgccctggagctgagcctcagctcatggtgctccccttaccctgctgcagggagtatgtgagagcaacgcgagctgccactgctcttcactgatgtctctggaatggaaggaggaggaagtgagcatagcgttggtgcgttgctgtcaagggcgaattgtaccacatggttaacctagacttgtccatcttctggattggccaacttaattaatgtatgaaataaaaggatgcacacatagtgacatgctaatcactataatgtgggcatcaaagttgtgtgttatgtgtaattactagttatctgaataaaagagaaagagatcatccatatttcttatcctaaatgaatgtcacgtgtctttataattctttgatgaaccagatgcatttcattaaccaaatccatatacatataaatattaatcatatataattaatatcaattgggttagcaaaacaaatctagtctaggtgtgttttgcgaatgcggccgccaccgcggtggagctcgaattccggtccgggttaccagagctggtcacctaagtgactagggtcacgtgaccctagtcacttattcccagcttcaagtttgtacaaaaaagcaggctccggccagaatggcccggaccgggttaccgaattcgagctcggtaccatttaaattgcgcccgccacggccgtggaggtcgtattccggtcagcttgcatccctgcagtgcagcgtgacccggtcgtgcccctctctagagataatgagcattgcatgtctaagttataaaaaattaccacatattttttttgtcacacttgtttgaagtgcagtttatctatctttatacatatatttaaactttactctacgaataatataatctatagtactacaataatatcagtgttttagagaatcatataaatgaacagttagacatggtctaaaggacaattgagtattttgacaacaggactctacagttttatctttttagtgtgcatgtgttctcctttttttttgcaaatagcttcacctatataatacttcatccattttattagtacatccatttagggtttagggttaatggtttttatagactaatttttttagtacatctattttattctattttagcctctaaattaagaaaactaaaactctattttagtttttttatttaataatttagatataaaatagaataaaataaagtgactaaaaattaaacaaataccctttaagaaattaaaaaaactaaggaaacatttttcttgtttcgagtagataatgccagcctgttaaacgccgtcgacgagtctaacggacaccaaccagcgaaccagcagcgtcgcgtcgggccaagcgaagcagacggcacggcatctctgtcgctgcctctggacccctctcgagagttccgctccaccgttggacttgctccgctgtcggcatccagaaattgcgtggcggagcggcagacgtgagccggcacggcaggcggcctcctcctcctctcacggcaccggcagctacgggggattcctttcccaccgctccttcgctttcccttcctcgcccgccgtaataaatagacaccccctccacaccctctttccccaacctcgtgttgttcggagcgcacacacacacaaccagatctcccccaaatccacccgtcggcacctccgcttcaaggtacgccgctcgtcctcccccccccccctctctaccttctctagatcggcgttccggtccatgcatggttagggcccggtagttctacttctgttcatgtttgtgttagatccgtgtttgtgttagatccgtgctgctagcgttcgtacacggatgcgacctgtacgtcagacacgttctgattgctaacttgccagtgtttctctttggggaatcctgggatggctctagccgttccgcagacgggatcgatttcatgattttttttgtttcgttgcatagggtttggtttgcccttttcctttatttcaatatatgccgtgcacttgtttgtcgggtcatcttttcatgcttttttttgtcttggttgtgatgatgtggtctggttgggcggtcgttctagatcggagtagaattctgtttcaaactacctggtggatttattaattttggatctgtatgtgtgtgccatacatattcatagttacgaattgaagatgatggatggaaatatcgatctaggataggtatacatgttgatgcgggttttactgatgcatatacagagatgctttttgttcgcttggttgtgatgatgtggtgtggttgggcggtcgttcattcgttctagatcggagtagaatactgtttcaaactacctggtgtatttattaattttggaactgtatgtgtgtgtcatacatcttcatagttacgagtttaagatggatggaaatatcgatctaggataggtatacatgttgatgtgggttttactgatgcatatacatgatggcatatgcagcatctattcatatgctctaaccttgagtacctatctattataataaacaagtatgttttataattattttgatcttgatatacttggatgatggcatatgcagcagctatatgtggatttttttagccctgccttcatacgctatttatttgcttggtactgtttcttttgtcgatgctcaccctgttgtttggtgttacttctgcaggtcgactctagaggatccatggccactgtgaacaactggctcgctttctccctctccccgcaggagctgccgccctcccagacgacggactccacactcatctcggccgccaccgccgaccatgtctccggcgatgtctgcttcaacatcccccaagattggagcatgaggggatcagagctttcggcgctcgtcgcggagccgaagctggaggacttcctcggcggcatctccttctccgagcagcatcacaaggccaactgcaacatgatacccagcactagcagcacagtttgctacgcgagctcaggtgctagcaccggctaccatcaccagctgtaccaccagcccaccagctcagcgctccacttcgcggactccgtaatggtggcttcctcggccggtgtccacgacggcggtgccatgctcagcgcggccgccgctaacggtgtcgctggcgctgccagtgccaacggcggcggcatcgggctgtccatgattaagaactggctgcggagccaaccggcgcccatgcagccgagggtggcggcggctgagggcgcgcaggggctctctttgtccatgaacatggcggggacgacccaaggcgctgctggcatgccacttctcgctggagagcgcgcacgggcgcccgagagtgtatcgacgtcagcacagggtggagccgtcgtcgtcacggcgccgaaggaggatagcggtggcagcggtgttgccggcgctctagtagccgtgagcacggacacgggtggcagcggcggcgcgtcggctgacaacacggcaaggaagacggtggacacgttcgggcagcgcacgtcgatttaccgtggcgtgacaaggcatagatggactgggagatatgaggcacatctttgggataacagttgcagaagggaagggcaaactcgtaagggtcgtcaagtctatttaggtggctatgataaagaggagaaagctgctagggcttatgatcttgctgctctgaagtactggggtgccacaacaacaacaaattttccagtgagtaactacgaaaaggagctcgaggacatgaagcacatgacaaggcaggagtttgtagcgtctctgagaaggaagagcagtggtttctccagaggtgcatccatttacaggggagtgactaggcatcaccaacatggaagatggcaagcacggattggacgagttgcagggaacaaggatctttacttgggcaccttcagcacccaggaggaggcagcggaggcgtacgacatcgcggcgatcaagttccgcggcctcaacgccgtcaccaacttcgacatgagccgctacgacgtgaagagcatcctggacagcagcgccctccccatcggcagcgccgccaagcgcctcaaggaggccgaggccgcagcgtccgcgcagcaccaccacgccggcgtggtgagctacgacgtcggccgcatcgcctcgcagctcggcgacggcggagccctggcggcggcgtacggcgcgcactaccacggcgccgcctggccgaccatcgcgttccagccgggcgccgccagcacaggcctgtaccacccgtacgcgcagcagccaatgcgcggcggcgggtggtgcaagcaggagcaggaccacgcggtgatcgcggccgcgcacagcctgcaggacctccaccacctgaacctgggcgcggccggcgcgcacgactttttctcggcagggcagcaggccgccgccgctgcgatgcacggcctgggtagcatcgacagtgcgtcgctcgagcacagcaccggctccaactccgtcgtctacaacggcggggtcggcgacagcaacggcgccagcgccgtcggcggcagtggcggtggctacatgatgccgatgagcgctgccggagcaaccactacatcggcaatggtgagccacgagcaggtgcatgcacgggcctacgacgaagccaagcaggctgctcagatggggtacgagagctacctggtgaacgcggagaacaatggtggcggaaggatgtctgcatgggggactgtcgtgtctgcagccgcggcggcagcagcaagcagcaacgacaacatggccgccgacgtcgggcatggcggcgcgcagctcttcagtgtctggaacgacacttaagcgtacgtgccggcctggctctccgaaagggcgtattccagcacactggcggccgttactagacccaacctagacttgtccatcttctggattggccaacttaattaatgtatgaaataaaaggatgcacacatagtgacatgctaatcactataatgtgggcatcaaagttgtgtgttatgtgtaattactagttatctgaataaaagagaaagagatcatccatatttcttatcctaaatgaatgtcacgtgtctttataattctttgatgaaccagatgcatttcattaaccaaatccatatacatataaatattaatcatatataattaatatcaattgggttagcaaaacaaatctagtctaggtgtgttttgcgaatgcggcctccgggcacccagctttcttgtacaaagtggccgttaacggatcggccagatccctatagtattttaaaattgcattaacaaacatgtcctaattggtactcctgagatactataccctcctgttttaaaatagttggcattatcgaattatcattttactctttaatgttttctcttcttttaatatattttatgaattttaatgtattttaaaatgttatgcagttcgctctggacttttctgctgcgcctacacttgggtgtactgggcctaaattcagcctgaccgaccgcctgcattgaataatggatgagcaccggtaaaatccgcgtacccaactttcgagaagaaccgagacgtggcgggccgggccaccgacgcacggcaccagcgactgcacacgtcccgccggcgtacgtgtacgtgctgttccctcactggccgcccaatccactcatgcatgcccacgtacacccctgccgtggcgcgcccagatcctaatcctttcgccgttctgcacttctgctgcctataaatggcggcatcgaccgtcacctgcttcaccaccggcgagccacatcgagaacacgatcgagcacacaagcacgaagactcgtttaggagaaaccacaaaccaccaagccgtgcaagcaccaagcttggtcacccggtccgggcctagaaggccagcttcaagtttgtacaaaaaagcaggcttcgaaggagatagaaccgatccaccatgtccaacctgctcacggttcaccagaaccttccggctcttccagtggacgcgacgtccgatgaagtcaggaagaacctcatggacatgttccgcgacaggcaagcgttcagcgagcacacctggaagatgctgctctccgtctgccgctcctgggctgcatggtgcaagctgaacaacaggaagtggttccccgctgagcccgaggacgtgagggattaccttctgtacctgcaagcgcgaggtttgtttctgcttctacctttgatatatatataataattatcattaattagtagtaatataatatttcaaatatttttttcaaaataaaagaatgtagtatatagcaattgcttttctgtagtttataagtgtgtatattttaatttataacttttctaatatatgaccaaaacatggtgatgcctaggtctggcagtgaagaccatccagcaacaccttggacaactgaacatgcttcacaggcgctccggcctcccgcgccccagcgactcgaacgccgtgagcctcgtcatgcgccgcatcaggaaggaaaacgtcgatgccggcgaaagggcaaagcaggccctcgcgttcgagaggaccgatttcgaccaggtccgcagcctgatggagaacagcgacaggtgccaggacattaggaacctggcgttcctcggaattgcatacaacacgctcctcaggatcgcggaaattgcccgcattcgcgtgaaggacattagccgcaccgacggcggcaggatgcttatccacattggcaggaccaagacgctcgtttccaccgcaggcgtcgaaaaggccctcagcctcggagtgaccaagctcgtcgaacgctggatctccgtgtccggcgtcgcggacgacccaaacaactacctcttctgccgcgtccgcaagaacggggtggctgcccctagcgccaccagccaactcagcacgagggccttggaaggtattttcgaggccacccaccgcctgatctacggcgcgaaggatgacagcggtcaacgctacctcgcatggtccgggcactccgcccgcgttggagctgctagggacatggcccgcgccggtgtttccatccccgaaatcatgcaggcgggtggatggacgaacgtgaacattgtcatgaactacattcgcaaccttgacagcgagacgggcgcaatggttcgcctcctggaagatggtgactgagctagacccagctttcttgtacaaagtggccgttaacggatccagacttgtccatcttctggattggccaacttaattaatgtatgaaataaaaggatgcacacatagtgacatgctaatcactataatgtgggcatcaaagttgtgtgttatgtgtaattactagttatctgaataaaagagaaagagatcatccatatttcttatcctaaatgaatgtcacgtgtctttataattctttgatgaaccagatgcatttcattaaccaaatccatatacatataaatattaatcatatataattaatatcaattgggttagcaaaacaaatctagtctaggtgtgttttgcgaatgcggccgccaccgcggtggagctcgaattccggtccgggcctagaaggccagcttcggccgccccgggcaactttattatacaaagttgatagataaatcagatatctggttcctaaggacccggcggaccgattaaactgattcggtccgacgcgttacctaataacttcgtatagcatacattatacgaagttattagctaactaactagtaagcttggtcacccggtccgtcaatattctgattccgatgacttcgtaggttcctagctcaagccgctcgtgtccaagcgtcacttacgattagctaatgattacggcatctaggaccgactagtggcgcgccgactagctagctaaggtacgacttagctatagttccggacttaccggcgccgctagcctgcagtgcagcgtgacccggtcgtgcccctctctagagataatgagcattgcatgtctaagttataaaaaattaccacatattttttttgtcacacttgtttgaagtgcagtttatctatctttatacatatatttaaactttactctacgaataatataatctatagtactacaataatatcagtgttttagagaatcatataaatgaacagttagacatggtctaaaggacaattgagtattttgacaacaggactctacagttttatctttttagtgtgcatgtgttctcctttttttttgcaaatagcttcacctatataatacttcatccattttattagtacatccatttagggtttagggttaatggtttttatagactaatttttttagtacatctattttattctattttagcctctaaattaagaaaactaaaactctattttagtttttttatttaataatttagatataaaatagaataaaataaagtgactaaaaattaaacaaataccctttaagaaattaaaaaaactaaggaaacatttttcttgtttcgagtagataatgccagcctgttaaacgccgtcgacgagtctaacggacaccaaccagcgaaccagcagcgtcgcgtcgggccaagcgaagcagacggcacggcatctctgtcgctgcctctggacccctctcgagagttccgctccaccgttggacttgctccgctgtcggcatccagaaattgcgtggcggagcggcagacgtgagccggcacggcaggcggcctcctcctcctctcacggcaccggcagctacgggggattcctttcccaccgctccttcgctttcccttcctcgcccgccgtaataaatagacaccccctccacaccctctttccccaacctcgtgttgttcggagcgcacacacacacaaccagatctcccccaaatccacccgtcggcacctccgcttcaaggtacgccgctcgtcctcccccccccccctctctaccttctctagatcggcgttccggtccatgcatggttagggcccggtagttctacttctgttcatgtttgtgttagatccgtgtttgtgttagatccgtgctgctagcgttcgtacacggatgcgacctgtacgtcagacacgttctgattgctaacttgccagtgtttctctttggggaatcctgggatggctctagccgttccgcagacgggatcgatttcatgattttttttgtttcgttgcatagggtttggtttgcccttttcctttatttcaatatatgccgtgcacttgtttgtcgggtcatcttttcatgcttttttttgtcttggttgtgatgatgtggtctggttgggcggtcgttctagatcggagtagaattctgtttcaaactacctggtggatttattaattttggatctgtatgtgtgtgccatacatattcatagttacgaattgaagatgatggatggaaatatcgatctaggataggtatacatgttgatgcgggttttactgatgcatatacagagatgctttttgttcgcttggttgtgatgatgtggtgtggttgggcggtcgttcattcgttctagatcggagtagaatactgtttcaaactacctggtgtatttattaattttggaactgtatgtgtgtgtcatacatcttcatagttacgagtttaagatggatggaaatatcgatctaggataggtatacatgttgatgtgggttttactgatgcatatacatgatggcatatgcagcatctattcatatgctctaaccttgagtacctatctattataataaacaagtatgttttataattattttgatcttgatatacttggatgatggcatatgcagcagctatatgtggatttttttagccctgccttcatacgctatttatttgcttggtactgtttcttttgtcgatgctcaccctgttgtttggtgttacttctgcaggtcgactctagaggatcaattcgctagcgaagttcctattccgaagttcctattctctagaaagtataggaacttcagatccaccgggatccaccatggttgaacaagatggattgcacgcaggttctccggccgcttgggtggagaggctattcggctatgactgggcacaacagacaatcggctgctctgatgccgccgtgttccggctgtcagcgcaggggcgcccggttctttttgtcaagaccgacctgtccggtgccctgaatgaactgcaggacgaggcagcgcggctatcgtggctggccacgacgggcgttccttgcgcagctgtgctcgacgttgtcactgaagcgggaagggactggctgctattgggcgaagtgccggggcaggatctcctgtcatctcaccttgctcctgccgagaaagtatccatcatggctgatgcaatgcggcggctgcatacgcttgatccggctacctgcccattcgaccaccaagcgaaacatcgcatcgagcgagcacgtactcggatggaagccggtcttgtcgatcaggatgatctggacgaagagcatcaggggctcgcgccagccgaactgttcgccaggctcaaggcgcgcatgcccgacggcgatgatctcgtcgtgacccatggcgatgcctgcttgccgaatatcatggtggaaaatggccgcttttctggattcatcgactgtggccggctgggtgtggcggaccgctatcaggacatagcgttggctacccgtgatattgctgaagagcttggcggcgaatgggctgaccgcttcctcgtgctttacggtatcgccgctcccgattcgcagcgcatcgccttctatcgccttcttgacgagttcttctgaggatccaccatggttaacctagacttgtccatcttctggattggccaacttaattaatgtatgaaataaaaggatgcacacatagtgacatgctaatcactataatgtgggcatcaaagttgtgtgttatgtgtaattactagttatctgaataaaagagaaagagatcatccatatttcttatcctaaatgaatgtcacgtgtctttataattctttgatgaaccagatgcatttcattaaccaaatccatatacatataaatattaatcatatataattaatatcaattgggttagcaaaacaaatctagtctaggtgtgttttgcaagcttgcatgcctgcagtgcagcgtgacccggtcgtgcccctctctagagataatgagcattgcatgtctaagttataaaaaattaccacatattttttttgtcacacttgtttgaagtgcagtttatctatctttatacatatatttaaactttactctacgaataatataatctatagtactacaataatatcagtgttttagagaatcatataaatgaacagttagacatggtctaaaggacaattgagtattttgacaacaggactctacagttttatctttttagtgtgcatgtgttctcctttttttttgcaaatagcttcacctatataatacttcatccattttattagtacatccatttagggtttagggttaatggtttttatagactaatttttttagtacatctattttattctattttagcctctaaattaagaaaactaaaactctattttagtttttttatttaataatttagatataaaatagaataaaataaagtgactaaaaattaaacaaataccctttaagaaattaaaaaaactaaggaaacatttttcttgtttcgagtagataatgccagcctgttaaacgccgtcgacgagtctaacggacaccaaccagcgaaccagcagcgtcgcgtcgggccaagcgaagcagacggcacggcatctctgtcgctgcctctggacccctctcgagagttccgctccaccgttggacttgctccgctgtcggcatccagaaattgcgtggcggagcggcagacgtgagccggcacggcaggcggcctcctcctcctctcacggcaccggcagctacgggggattcctttcccaccgctccttcgctttcccttcctcgcccgccgtaataaatagacaccccctccacaccctctttccccaacctcgtgttgttcggagcgcacacacacacaaccagatctcccccaaatccacccgtcggcacctccgcttcaaggtacgccgctcgtcctcccccccccccctctctaccttctctagatcggcgttccggtccatgcatggttagggcccggtagttctacttctgttcatgtttgtgttagatccgtgtttgtgttagatccgtgctgctagcgttcgtacacggatgcgacctgtacgtcagacacgttctgattgctaacttgccagtgtttctctttggggaatcctgggatggctctagccgttccgcagacgggatcgatttcatgattttttttgtttcgttgcatagggtttggtttgcccttttcctttatttcaatatatgccgtgcacttgtttgtcgggtcatcttttcatgcttttttttgtcttggttgtgatgatgtggtctggttgggcggtcgttctagatcggagtagaattctgtttcaaactacctggtggatttattaattttggatctgtatgtgtgtgccatacatattcatagttacgaattgaagatgatggatggaaatatcgatctaggataggtatacatgttgatgcgggttttactgatgcatatacagagatgctttttgttcgcttggttgtgatgatgtggtgtggttgggcggtcgttcattcgttctagatcggagtagaatactgtttcaaactacctggtgtatttattaattttggaactgtatgtgtgtgtcatacatcttcatagttacgagtttaagatggatggaaatatcgatctaggataggtatacatgttgatgtgggttttactgatgcatatacatgatggcatatgcagcatctattcatatgctctaaccttgagtacctatctattataataaacaagtatgttttataattattttgatcttgatatacttggatgatggcatatgcagcagctatatgtggatttttttagccctgccttcatacgctatttatttgcttggtactgtttcttttgtcgatgctcaccctgttgtttggtgttacttctgcaggtcgactctagaggatccaccggtcgccaccatggccctgtccaacaagttcatcggcgacgacatgaagatgacctaccacatggacggctgcgtgaacggccactacttcaccgtgaagggcgagggcagcggcaagccctacgagggcacccagacctccaccttcaaggtgaccatggccaacggcggccccctggccttctccttcgacatcctgtccaccgtgttcatgtacggcaaccgctgcttcaccgcctaccccaccagcatgcccgactacttcaagcaggccttccccgacggcatgtcctacgagagaaccttcacctacgaggacggcggcgtggccaccgccagctgggagatcagcctgaagggcaactgcttcgagcacaagtccaccttccacggcgtgaacttccccgccgacggccccgtgatggccaagaagaccaccggctgggacccctccttcgagaagatgaccgtgtgcgacggcatcttgaagggcgacgtgaccgccttcctgatgctgcagggcggcggcaactacagatgccagttccacacctcctacaagaccaagaagcccgtgaccatgccccccaaccacgtggtggagcaccgcatcgccagaaccgacctggacaagggcggcaacagcgtgcagctgaccgagcacgccgtggcccacatcacctccgtggtgcccttctgaagcggccgcaacctagacttgtccatcttctggattggccaacttaattaatgtatgaaataaaaggatgcacacatagtgacatgctaatcactataatgtgggcatcaaagttgtgtgttatgtgtaattactagttatctgaataaaagagaaagagatcatccatatttcttatcctaaatgaatgtcacgtgtctttataattctttgatgaaccagatgcatttcattaaccaaatccatatacatataaatattaatcatatataattaatatcaattgggttagcaaaacaaatctagtctaggtgtgttttgcgaatgcggccgccaccgcggtggagctcgaatgcggccctagcgtatacgaagttcctattccgaagttcctattcttcaaaaagtataggaacttctgtaccgagctcgaattcattccgattaatcgtggcctcttgctcttcaggatgaagagctatgtttaaacgtgcaagcgctactagacaattcagtacattaaaaacgtccgcaatgtgttattaagttgtctaagcgtcaatttgtttacaccacaatatatcctgcca

SEQ ID NO: 9 - DNA, 13795 bp, synthetic construct
  misc_feature 1..13795: note = PHP83475
  source 1..13795: mol_type = other DNA
gtttacccgccaatatatcctgtcaaacactgatagtttaaactgaaggcgggaaacgacaatctgatcatgagcggagaattaagggagtcacgttatgacccccgccgatgacgcgggacaagccgttttacgtttggaactgacagaaccgcaacgttgaaggagccactcagcaagctggtacgattgtaatacgactcactatagggcgaattgagcgctgtttaaacgctcttcaactggaagagcggttacgctgtttaaacgctcttcaactggaagagcggttactaccggttcactagctagctgctaaggttaccagagctggtcacctttgtccaccaacttattaagtatctagttgaagacacgttcttcttcacgtaagaagacactcagtagtcttcggccagaatggcctcttgattcagcgggcctagaaggccggatcactgactagctaatttaaatcctgaggatctggtcttcctaaggacccgggatatcggaccgattaaactttaattcggtccgataacttcgtatagcatacattatacgaagttatatgcatacgcgtcttaagtcgatcgctatcaactttgtatagaaaagttgggccgagctcggtacggccagaatggcccggaccgggttaccgaattcttaccctagctccctgcggctgttacgcggtcccccatcaatcttctgttcttgcggttgtagcctgtgtaacagtgctagagtatgtatgataaataggttttaagtctgcttacatgacattttttattgtggaagagacatataaaaattagagagagtggttctcatgcaacggcggacggcccggtgctaaaagagcttcaagacaaaataatgaaacaggaagagagtagatttatctaagagccaactttattatatgaatgtgtttattgttggctttagatgatatggtaaggagttagagctaataatagataggctctattattattattattaattaaactcgctctaaggaggaaagtgggaggaagggacgaggacgaagactactggaagcatcgtgcatggatgatggatgtggtgtctcttaatgtaggtggccggaggatgtacgtgttaattgcgcgataagcactcagatccaaccgcaaactacctccacactgacacactgatagagagaaagagagacctccgacgactgccgccgcagatgagccacgtacgtatacgacgtctgccggccggctcaggctgccgccatcaccctgctcgaaagtcgcgttaggcggcgccagctacataggagtatctagtctagccagttagtatactactactgcgctgatgatgaattaactctgcatagatactgtacttgcctccctccaacacccaaccacctcctgctcggctcttaataacttggacacggatcgatgccatccaaggaagaacacgacgacgacgacggaacatccaccatgcaagcttgcatccatacgccgatacgcgtgcatccatccatccaccattatttccattttccaccgatcacacgtacacaggcctatttaaggagcgacatcccactgcaactctcctcaccactcatcaccagctagctctagcaaagcacttgccatctaccgaccgccgcattccaaacagcccgacgagctagcagagcggcaggcacctccctcctcaaggaacccatggcggccaatgcgggcggcggtggagcgggaggaggcagcggcagcggcagcgtggctgcgccggcggtgtgccgccccagcggctcgcggtggacgccgacgccggagcagatcaggatgctgaaggagctctactacggctgcggcatccggtcgcccagctcggagcagatccagcgcatcaccgccatgctgcggcagcacggcaagatcgagggcaagaacgtcttctactggttccagaaccacaaggcccgcgagcgccagaagcgccgcctcaccagcctcgacgtcaacgtgcccgccgccggcgcggccgacgccaccaccagccaactcggcgtcctctcgctgtcgtcgccgccgccttcaggcgcggcgcctccctcgcccaccctcggcttctacgccgccggcaatggcggcggatcggctgtgctgctggacacgagttccgactggggcagcagcggcgctgctatggccaccgagacatgcttcctgcaggactacatgggcgtgacggacacgggcagctcgtcgcagtggccacgcttctcgtcgtcggacacgataatggcggcggccgcggcgcgggcggcgacgacgcgggcgcccgagacgctccctctcttcccgacctgcggcgacgacggcggcagcggtagcagcagctacttgccgttctggggtgccgcgtccacaactgccggcgccacttcttccgttgcgatccaacagcaacaccagctgcaggagcagtacagcttttacagcaacagcaacagcacccagctggccggcaccggcaaccaagacgtatcggcaacagcagcagcagccgccgccctggagctgagcctcagctcatggtgctccccttaccctgctgcagggagtatgtgagagcaacgcgagctgccactgctcttcactgatgtctctggaatggaaggaggaggaagtgagaacagatcattcgacaaagcagcattagtccgttgatcggtggaagaccactcgtcagtgttgagttgaatgtttgatcaataaaatacggcaatgctgtaagggttgttttttatgccattgataatacactgtactgttcagttgttgaactctatttcttagccatgccaagtgcttttcttattttgaataacattacagcaaaaagttgaaagacaaaaaaaaaaacccccgaacagagtgctttgggtcccaagcttctttagactgtgttcggcgttccccctaaatttctccccctatatctcactcacttgtcacatcagcgttctctttccccctatatctccacgctctacagcagttccacctatatcaaacctctataccccaccacaacaatattatatactttcatcttcaactaactcatgtaccttccaatttttttctactaataattatttacgtgcacagaaacttagcaaggagagagagagcggggtgacccaccttgctagttggatattacctcttctcttcaaagtatccttgaacgctcaccggttatcaaatctctacactatagctctgtagtcttgctagatagttagttctttagctctcggtgaccaagcttggcgcgatcaagcttatcgataccgtcgacctcgaagcttggtcacccggtccgggcctagaaggccagcttcaagtttgtacaaaaaagcaggctccggccagaatggcccggaccgggttaccgaattcgagctcggtaccctggttcacaaactcaatacaacacacagtggagtagggtattacgctccggcggcccgaaccactctaaatccttgtgtcctcgtgtgctcttccaccattaatgactgtaattgcagggacacgaagagttgtagcgcttttgccaacaagatccgctatatgctagtagagtggaacctgcacagcaacaagcatccaataatctgagaataagaattatgtgtggtgatggttctcatctctgcaactcgccattttcgcgagagaaccaaatccaagttggtgaagatcatgatttgggctcatgggctggcatagtagctattacctttgcaattgtggttcgaatctatccgatattctccttttcagggagagctaatgcttatgcttattgggtattttggtttgacactgcttcacgcccaaaaaaaggcaactatgtctgagttggatatggcccaaaaaaaggcagctatgtctgagttggatatggaagtcttctttcgtttagggtgaagtaagaccaagctcatgagcttattatcttaggtcggaacaaattagttgataggcatggcacatttatcaaattataatgattttaacagaaaagcaacacctctttttcagcagcaccagctttgcaagctgcaattgacactccaagcatagtatttgctccaaactcagcctgcatttcgcacaatatcatatctatttccatttggataaaatatattttccagaaatatgggaacagaatcaagatacagaaaaaagttgtggtagtagtggtaagtggaaacacaagtacagtgaaaagatagcattatttctgaacagtcaaattaaccgaaataagtagtatcacatactgcccctaaattgactacacccaatgtaaagaattgcttgagcatattgagccatcagttgtttgtttgtgtaacggatttgacaatgcagagttcaggagcaaaaaaccgcaaaggagagaaagagggaaaggatctcctagtatcccaccttgtggcgcgccctgtcaagtgcatgatggcctggtcgatctgcgtctgctgctgcggttccatcccaacgagtgcctccgacaccttgtcgttgatcacccgcaccgcgtaggcgacccccctggcgaggaacttccgcctctcggaggccccggccgcgtcggcggcggcgccctcgagcgcgcccacgctagccgtagatgctcggtgcacggccttgttggtgtgcaactcgacctcaacggccggtgcgctacgcccgtcaaggatctggcgcgcccgcaccctcgtgatcacggtgggcgcctcccgcctcatgtggccgacgatgaaaagcgccgggttaggggccttggcgcgcaccgccgtattcagggcctcctcgctcttgcgcgagagcaggtgcttccccaggtactcctgcactgacaaggctgccacagcggtggaatttgtcctcacgacttcgccacgtcgtcctcacctccctggcttcccacgactccgccgtatcgaggtgctcggtgggtcgtcttaatccgaagtccgaactaggaagacgagacagagaggtctgaggaatgggcctcgtttgatgttgagctgaattatttttccagcataagcccaggtcttggtccatgaacaaaattactagaaacccagcccagtactacgatctaaaagagggactgccactggatagctctctctagcattctccacgctccaatacagcggcgtcgtgtctatccgggtctatccgcgaacacgtgagaactctccagaaactgctttctcctccacttcatctctctcgctttccctctataaaaagaccccttctaggaattgagggagacagcaagcaccaagcagcgatccgaagctcaatcaattcactcaaacctcttccccaaatcttcgattagatcttcgttgacaagaagactagaaccgaacctgacatgtccaacctgctcacggttcaccagaaccttccggctcttccagtggacgcgacgtccgatgaagtcaggaagaacctcatggacatgttccgcgacaggcaagcgttcagcgagcacacctggaagatgctgctctccgtctgccgctcctgggctgcatggtgcaagctgaacaacaggaagtggttccccgctgagcccgaggacgtgagggattaccttctgtacctgcaagcgcgaggtttgtttctgcttctacctttgatatatatataataattatcattaattagtagtaatataatatttcaaatatttttttcaaaataaaagaatgtagtatatagcaattgcttttctgtagtttataagtgtgtatattttaatttataacttttctaatatatgaccaaaacatggtgatgcctaggtctggcagtgaagaccatccagcaacaccttggacaactgaacatgcttcacaggcgctccggcctcccgcgccccagcgactcgaacgccgtgagcctcgtcatgcgccgcatcaggaaggaaaacgtcgatgccggcgaaagggcaaagcaggccctcgcgttcgagaggaccgatttcgaccaggtccgcagcctgatggagaacagcgacaggtgccaggacattaggaacctggcgttcctcggaattgcatacaacacgctcctcaggatcgcggaaattgcccgcattcgcgtgaaggacattagccgcaccgacggcggcaggatgcttatccacattggcaggaccaagacgctcgtttccaccgcaggcgtcgaaaaggccctcagcctcggagtgaccaagctcgtcgaacgctggatctccgtgtccggcgtcgcggacgacccaaacaactacctcttctgccgcgtccgcaagaacggggtggctgcccctagcgccaccagccaactcagcacgagggccttggaaggtattttcgaggccacccaccgcctgatctacggcgcgaaggatgacagcggtcaacgctacctcgcatggtccgggcactccgcccgcgttggagctgctagggacatggcccgcgccggtgtttccatccccgaaatcatgcaggcgggtggatggacgaacgtgaacattgtcatgaactacattcgcaaccttgacagcgagacgggcgcaatggttcgcctcctggaagatggtgactgaggtacccaacctagacttgtccatcttctggattggccaacttaattaatgtatgaaataaaaggatgcacacatagtgacatgctaatcactataatgtgggcatcaaagttgtgtgttatgtgtaattactagttatctgaataaaagagaaagagatcatccatatttcttatcctaaatgaatgtcacgtgtctttataattctttgatgaaccagatgcatttcattaaccaaatccatatacatataaatattaatcatatataattaatatcaattgggttagcaaaacaaatctagtctaggtgtgttttgcgatccgatatcgatgggccctggccgaagcttggtcacccggtccgggcctagaaggccgatctcccgggcacccagctttcttgtacaaagtggccgttaacggatcggccagaatggcccggaccgggttacccggaccgaagcttgcatgcctgcagtgcagcgtgacccggtcgtgcccctctctagagataatgagcattgcatgtctaagttataaaaaattaccacatattttttttgtcacacttgtttgaagtgcagtttatctatctttatacatatatttaaactttactctacgaataatataatctatagtactacaataatatcagtgttttagagaatcatataaatgaacagttagacatggtctaaaggacaattgagtattttgacaacaggactctacagttttatctttttagtgtgcatgtgttctcctttttttttgcaaatagcttcacctatataatacttcatccattttattagtacatccatttagggtttagggttaatggtttttatagactaatttttttagtacatctattttattctattttagcctctaaattaagaaaactaaaactctattttagtttttttatttaataatttagatataaaatagaataaaataaagtgactaaaaattaaacaaataccctttaagaaattaaaaaaactaaggaaacatttttcttgtttcgagtagataatgccagcctgttaaacgccgtcgacgagtctaacggacaccaaccagcgaaccagcagcgtcgcgtcgggccaagcgaagcagacggcacggcatctctgtcgctgcctctggacccctctcgagagttccgctccaccgttggacttgctccgctgtcggcatccagaaattgcgtggcggagcggcagacgtgagccggcacggcaggcggcctcctcctcctctcacggcaccggcagctacgggggattcctttcccaccgctccttcgctttcccttcctcgcccgccgtaataaatagacaccccctccacaccctctttccccaacctcgtgttgttcggagcgcacacacacacaaccagatctcccccaaatccacccgtcggcacctccgcttcaaggtacgccgctcgtcctcccccccccccctctctaccttctctagatcggcgttccggtccatgcatggttagggcccggtagttctacttctgttcatgtttgtgttagatccgtgtttgtgttagatccgtgctgctagcgttcgtacacggatgcgacctgtacgtcagacacgttctgattgctaacttgccagtgtttctctttggggaatcctgggatggctctagccgttccgcagacgggatcgatttcatgattttttttgtttcgttgcatagggtttggtttgcccttttcctttatttcaatatatgccgtgcacttgtttgtcgggtcatcttttcatgcttttttttgtcttggttgtgatgatgtggtctggttgggcggtcgttctagatcggagtagaattctgtttcaaactacctggtggatttattaattttggatctgtatgtgtgtgccatacatattcatagttacgaattgaagatgatggatggaaatatcgatctaggataggtatacatgttgatgcgggttttactgatgcatatacagagatgctttttgttcgcttggttgtgatgatgtggtgtggttgggcggtcgttcattcgttctagatcggagtagaatactgtttcaaactacctggtgtatttattaattttggaactgtatgtgtgtgtcatacatcttcatagttacgagtttaagatggatggaaatatcgatctaggataggtatacatgttgatgtgggttttactgatgcatatacatgatggcatatgcagcatctattcatatgctctaaccttgagtacctatctattataataaacaagtatgttttataattattttgatcttgatatacttggatgatggcatatgcagcagctatatgtggatttttttagccctgccttcatacgctatttatttgcttggtactgtttcttttgtcgatgctcaccctgttgtttggtgttacttctgcaggtcgactttaacttagcctaggatccaccggtcgccaccatggcctcctccgagaacgtcatcaccgagttcatgcgcttcaaggtgcgcatggagggcaccgtgaacggccacgagttcgagatcgagggcgagggcgagggccgcccctacgagggccacaacaccgtgaagctgaaggtgacgaagggcggccccctgcccttcgcctgggacatcctgtccccccagttccagtacggctccaaggtgtacgtgaagcaccccgccgacatccccgactacaagaagctgtccttccccgagggcttcaagtgggagcgcgtgatgaacttcgaggacggcggcgtggcgaccgtgacccaggactcctccctgcaggacggctgcttcatctacaaggtgaagttcatcggcgtgaacttcccctccgacggccccgtgatgcagaagaagaccatgggctgggaggcctccaccgagcgcctgtacccccgcgacggcgtgctgaagggcgagacccacaaggccctgaagctgaaggacggcggccactacctggtggagttcaagtccatctacatggccaagaagcccgtgcagctgcccggctactactacgtggacgccaagctggacatcacctcccacaacgaggactacaccatcgtggagcagtacgagcgcaccgagggccgccaccacctgttcctgtagcggcccatggatattcgaacgcgtaggtaccacatggttaacctagacttgtccatcttctggattggccaacttaattaatgtatgaaataaaaggatgcacacatagtgacatgctaatcactataatgtgggcatcaaagttgtgtgttatgtgtaattactagttatctgaataaaagagaaagagatcatccatatttcttatcctaaatgaatgtcacgtgtctttataattctttgatgaaccagatgcatttcattaaccaaatccatatacatataaatattaatcatatataattaatatcaattgggttagcaaaacaaatctagtctaggtgtgttttgcgaatgcggccgccaccgcggtggagctcgaattccggtccgaagctgggcaactttattatacaaagttgatagatcgaataacttcgtatagcatacattatacgaagttatacctggtggcgccgctaggggctgcaggaattcgatatcaagcttatcgataccgtcgacctcgagggggggcccggtaccctgggatctgcccttactttaacgcctctaaccaacacccctttatctttataaggaacaataaacagaatttgccccactgttctaaatcacctaataatatccccagctaaaaacaataaaggtttcctagaattaagacaagcatgactgttcctccaggagggtttggaacattgttgcagtcttgcagatacgggcgaagggtgagaaacagagcggagggctggaggtgacctcggtagtcgacgccggagttgagcttgacaacgacggggcggcccctgatggacttgaggaagtccgatggcgtcttcaccgtcccgccggcgcccgaggcgggcctgtcgctgccgccgccgccgctgctcatcttgcgcgctgtgcccccggcggtgtccctgtgttgcggatcgcgggtgggccaggtggatgcgagggcgacccgtttggactccggccggagccgccggatccctggtcggtgtcagtgccgtttactctgggccccacgtgtcagtaccgtctgtagatgacaacaacccgtcgtccacagtcatgtccaaaatatcctttcttcttttttttcgattcggatatctatcttccttttttttttccaaaaatcttcttgacgcaccagcgcgcacgtttgtggtaaacgccgacacgtcggtcccacgtcgatagaccccacccaccagtgagtagcgtgtacgtattcgggggtgacggacgtgtcgccgtcgtcttgctagtcccattcccatctgagccacacatctctgaacaaaaaaaaggagggaggcctccacgcacatccccctccgtgccacccgccccaaaccctcgcgccgcctccgagacagccgccgcaaccatggccaccgccgccgccgcgtctaccgcgctcactggcgccactaccgctgcgcccaaggcgaggcgccgggcgcacctcctggccacccgccgcgccctcgccgcgcccatcaggtgctcagcggcgtcacccgccatgccgatggctcccccggccaccccgctccggccgtggggccccaccgagccccgcaagggtgctgacatcctcgtcgagtccctcgagcgctgcggcgtccgcgacgtcttcgcctaccccggcggcgcgtccatggagatccaccaggcactcacccgctcccccgtcatcgccaaccacctcttccgccacgagcaaggggaggcctttgccgcctccggctacgcgcgctcctcgggccgcgtcggcgtctgcatcgccacctccggccccggcgccaccaacctagtctccgcgctcgccgacgcgctgctcgattccgtccccatggtcgccatcacgggacaggtggcgcgacgcatgattggcaccgacgccttccaggagacgcccatcgtcgaggtcacccgctccatcaccaagcacaactacctggtcctcgacgtcgacgacatcccccgcgtcgtgcaggaggctttcttcctcgcctcctctggtcgaccagggccggtgcttgtcgacatccccaaggacatccagcagcagatggcggtgcctgtctgggacaagcccatgagtctgcctgggtacattgcgcgccttcccaagccccctgcgactgagttgcttgagcaggtgctgcgtcttgttggtgaatcgcggcgccctgttctttatgtgggcggtggctgcgcagcatctggtgaggagttgcgacgctttgtggagctgactggaatcccggtcacaactactcttatgggcctcggcaacttccccagcgacgacccactgtctctgcgcatgctaggtatgcatgggacggtgtatgcaaattatgcagtggataaggccgatctgttgcttgcacttggtgtgcggtttgatgatcgcgtgacagggaagattgaggcttttgcaagcagggctaagattgtgcacgttgatattgatccggctgagattggcaagaacaagcagccacatgtgtccatctgtgcagatgttaagcttgctttgcagggcatgaatgctcttcttgaaggaagcacatcaaagaagagctttgactttggctcatggaacgatgagttggatcagcagaagagggaattcccccttgggtataaaacatctaatgaggagatccagccacaatatgctattcaggttcttgatgagctgacgaaaggcgaggccatcatcggcacaggtgttgggcagcaccagatgtgggcggcacagtactacacttacaagcggccaaggcagtggttgtcttcagctggtcttggggctatgggatttggtttgccggctgctgctggtgcttctgtggcaaacccaggtgtcactgttgttgacatcgatggagatggtagctttctcatgaacgttcaggagctagctatgatccgaattgagaacctcccagtgaaggtctttgtgctaaacaaccagcacctggggatggtggtgcagttggaggacaggttctataaggccaacagagcgcacacatacttgggaaacccagagaatgaaagtgagatatatccagatttcgtgacgatcgccaaagggttcaacattccagcggtccgtgtgacaaagaagaacgaagtccgcgcagcgataaagaagatgctcgagactccagggccgtacctcttggatataatcgtcccacaccaggagcatgtgttgcctatgatccctagtggtggggctttcaaggatatgatcctggatggtgatggcaggactgtgtactgactagctagtcagttaacctagacttgtccatcttctggattggccaacttaattaatgtatgaaataaaaggatgcacacatagtgacatgctaatcactataatgtgggcatcaaagttgtgtgttatgtgtaattactagttatctgaataaaagagaaagagatcatccatatttcttatcctaaatgaatgtcacgtgtctttataattctttgatgaaccagatgcatttcattaaccaaatccatatacatataaatattaatcatatataattaatatcaattgggttagcaaaacaaatctagtctaggtgtgttttgcgaatgcggccgcctgcagagttaacggcgcgccgactagctagctaaggtaccgagctcgaattcattccgattaatcgtggcctcttgctcttcaggatgaagagctatgtttaaacgtgcaagcgctactagacaattcagtacattaaaaacgtccgcaatgtgttattaagttgtctaagcgtcaatttgtttacaccacaatatatcctgcca

SEQ ID NO: 10 - DNA, 14961 bp, synthetic construct
  misc_feature 1..14961: note = PHP83621
  source 1..14961: mol_type = other DNA
gtttacccgccaatatatcctgtcaaacactgatagtttaaactgaaggcgggaaacgacaatctgatcatgagcggagaattaagggagtcacgttatgacccccgccgatgacgcgggacaagccgttttacgtttggaactgacagaaccgcaacgttgaaggagccactcagcaagctggtacgattgtaatacgactcactatagggcgaattgagcgctgtttaaacgctcttcaactggaagagcggttacgctgtttaaacgctcttcaactggaagagcggttactaccggttcactagctagctgctaaggttaccagagctggtcacctttgtccaccaacttattaagtatctagttgaagacacgttcttcttcacgtaagaagacactcagtagtcttcggccagaatggcctcttgattcagcgggcctagaaggccggatcactgactagctaatttaaatcctgaggatctggtcttcctaaggacccgggatatcggaccgattaaactttaattcggtccgataacttcgtatagcatacattatacgaagttatatgcatacgcgtcttaagtcgatcgctatcaactttgtatagaaaagttgggccgagctcggtacggccagaatggcccggaccgggttaccgaattcttaccctagctccctgcggctgttacgcggtcccccatcaatcttctgttcttgcggttgtagcctgtgtaacagtgctagagtatgtatgataaataggttttaagtctgcttacatgacattttttattgtggaagagacatataaaaattagagagagtggttctcatgcaacggcggacggcccggtgctaaaagagcttcaagacaaaataatgaaacaggaagagagtagatttatctaagagccaactttattatatgaatgtgtttattgttggctttagatgatatggtaaggagttagagctaataatagataggctctattattattattattaattaaactcgctctaaggaggaaagtgggaggaagggacgaggacgaagactactggaagcatcgtgcatggatgatggatgtggtgtctcttaatgtaggtggccggaggatgtacgtgttaattgcgcgataagcactcagatccaaccgcaaactacctccacactgacacactgatagagagaaagagagacctccgacgactgccgccgcagatgagccacgtacgtatacgacgtctgccggccggctcaggctgccgccatcaccctgctcgaaagtcgcgttaggcggcgccagctacataggagtatctagtctagccagttagtatactactactgcgctgatgatgaattaactctgcatagatactgtacttgcctccctccaacacccaaccacctcctgctcggctcttaataacttggacacggatcgatgccatccaaggaagaacacgacgacgacgacggaacatccaccatgcaagcttgcatccatacgccgatacgcgtgcatccatccatccaccattatttccattttccaccgatcacacgtacacaggcctatttaaggagcgacatcccactgcaactctcctcaccactcatcaccagctagctctagcaaagcacttgccatctaccgaccgccgcattccaaacagcccgacgagctagcagagcggcaggcacctccctcctcaaggaacccatggcggccaatgcgggcggcggtggagcgggaggaggcagcggcagcggcagcgtggctgcgccggcggtgtgccgccccagcggctcgcggtggacgccgacgccggagcagatcaggatgctgaaggagctctactacggctgcggcatccggtcgcccagctcggagcagatccagcgcatcaccgccatgctgcggcagcacggcaagatcgagggcaagaacgtcttctactggttccagaaccacaaggcccgcgagcgccagaagcgccgcctcaccagcctcgacgtcaacgtgcccgccgccggcgcggccgacgccaccaccagccaactcggcgtcctctcgctgtcgtcgccgccgccttcaggcgcggcgcctccctcgcccaccctcggcttctacgccgccggcaatggcggcggatcggctgtgctgctggacacgagttccgactggggcagcagcggcgctgctatggccaccgagacatgcttcctgcaggactacatgggcgtgacggacacgggcagctcgtcgcagtggccacgcttctcgtcgtcggacacgataatggcggcggccgcggcgcgggcggcgacgacgcgggcgcccgagacgctccctctcttcccgacctgcggcgacgacggcggcagcggtagcagcagctacttgccgttctggggtgccgcgtccacaactgccggcgccacttcttccgttgcgatccaacagcaacaccagctgcaggagcagtacagcttttacagcaacagcaacagcacccagctggccggcaccggcaaccaagacgtatcggcaacagcagcagcagccgccgccctggagctgagcctcagctcatggtgctccccttaccctgctgcagggagtatgtgagagcaacgcgagctgccactgctcttcactgatgtctctggaatggaaggaggaggaagtgagaacagatcattcgacaaagcagcattagtccgttgatcggtggaagaccactcgtcagtgttgagttgaatgtttgatcaataaaatacggcaatgctgtaagggttgttttttatgccattgataatacactgtactgttcagttgttgaactctatttcttagccatgccaagtgcttttcttattttgaataacattacagcaaaaagttgaaagacaaaaaaaaaaacccccgaacagagtgctttgggtcccaagcttctttagactgtgttcggcgttccccctaaatttctccccctatatctcactcacttgtcacatcagcgttctctttccccctatatctccacgctctacagcagttccacctatatcaaacctctataccccaccacaacaatattatatactttcatcttcaactaactcatgtaccttccaatttttttctactaataattatttacgtgcacagaaacttagcaaggagagagagagcggggtgacccaccttgctagttggatattacctcttctcttcaaagtatccttgaacgctcaccggttatcaaatctctacactatagctctgtagtcttgctagatagttagttctttagctctcggtgaccaagcttggcgcgatcaagcttatcgataccgtcgacctcgaagcttggtcacccggtccgggcctagaaggccagcttcaagtttgtacaaaaaagcaggctccggccagaatggcccggaccgggttacgttaccgaattcttaccctagctccctgcggctgttacgcggtcccccatcaatcttctgttcttgcggttgtagcctgtgtaacagtgctagagtatgtatgataaataggttttaagtctgcttacatgacattttttattgtggaagagacatataaaaattagagagagtggttctcatgcaacggcggacggcccggtgctaaaagagcttcaagacaaaataatgaaacaggaagagagtagatttatctaagagccaactttattatatgaatgtgtttattgttggctttagatgatatggtaaggagttagagctaataatagataggctctattattattattattaattaaactcgctctaaggaggaaagtgggaggaagggacgaggacgaagactactggaagcatcgtgcatggatgatggatgtggtgtctcttaatgtaggtggccggaggatgtacgtgttaattgcgcgataagcactcagatccaaccgcaaactacctccacactgacacactgatagagagaaagagagacctccgacgactgccgccgcagatgagccacgtacgtatacgacgtctgccggccggctcaggctgccgccatcaccctgctcgaaagtcgcgttaggcggcgccagctacataggagtatctagtctagccagttagtatactactactgcgctgatgatgaattaactctgcatagatactgtacttgcctccctccaacacccaaccacctcctgctcggctcttaataacttggacacggatcgatgccatccaaggaagaacacgacgacgacgacggaacatccaccatgcaagcttgcatccatacgccgatacgcgtgcatccatccatccaccattatttccattttccaccgatcacacgtacacaggcctatttaaggagcgacatcccactgcaactctcctcaccactcatcaccagctagctctagcaaagcacttgccatctaccgaccgccgcattccaaacagcccgacgagctagcagagcggcaggcacctccctcctcaaggaacccatggccactgtgaacaactggctcgctttctccctctccccgcaggagctgccgccctcccagacgacggactccacactcatctcggccgccaccgccgaccatgtctccggcgatgtctgcttcaacatcccccaagattggagcatgaggggatcagagctttcggcgctcgtcgcggagccgaagctggaggacttcctcggcggcatctccttctccgagcagcatcacaaggccaactgcaacatgatacccagcactagcagcacagtttgctacgcgagctcaggtgctagcaccggctaccatcaccagctgtaccaccagcccaccagctcagcgctccacttcgcggactccgtaatggtggcttcctcggccggtgtccacgacggcggtgccatgctcagcgcggccgccgctaacggtgtcgctggcgctgccagtgccaacggcggcggcatcgggctgtccatgattaagaactggctgcggagccaaccggcgcccatgcagccgagggtggcggcggctgagggcgcgcaggggctctctttgtccatgaacatggcggggacgacccaaggcgctgctggcatgccacttctcgctggagagcgcgcacgggcgcccgagagtgtatcgacgtcagcacagggtggagccgtcgtcgtcacggcgccgaaggaggatagcggtggcagcggtgttgccggcgctctagtagccgtgagcacggacacgggtggcagcggcggcgcgtcggctgacaacacggcaaggaagacggtggacacgttcgggcagcgcacgtcgatttaccgtggcgtgacaaggcatagatggactgggagatatgaggcacatctttgggataacagttgcagaagggaagggcaaactcgtaagggtcgtcaagtctatttaggtggctatgataaagaggagaaagctgctagggcttatgatcttgctgctctgaagtactggggtgccacaacaacaacaaattttccagtgagtaactacgaaaaggagctcgaggacatgaagcacatgacaaggcaggagtttgtagcgtctctgagaaggaagagcagtggtttctccagaggtgcatccatttacaggggagtgactaggcatcaccaacatggaagatggcaagcacggattggacgagttgcagggaacaaggatctttacttgggcaccttcagcacccaggaggaggcagcggaggcgtacgacatcgcggcgatcaagttccgcggcctcaacgccgtcaccaacttcgacatgagccgctacgacgtgaagagcatcctggacagcagcgccctccccatcggcagcgccgccaagcgcctcaaggaggccgaggccgcagcgtccgcgcagcaccaccacgccggcgtggtgagctacgacgtcggccgcatcgcctcgcagctcggcgacggcggagccctggcggcggcgtacggcgcgcactaccacggcgccgcctggccgaccatcgcgttccagccgggcgccgccagcacaggcctgtaccacccgtacgcgcagcagccaatgcgcggcggcgggtggtgcaagcaggagcaggaccacgcggtgatcgcggccgcgcacagcctgcaggacctccaccacctgaacctgggcgcggccggcgcgcacgactttttctcggcagggcagcaggccgccgccgctgcgatgcacggcctgggtagcatcgacagtgcgtcgctcgagcacagcaccggctccaactccgtcgtctacaacggcggggtcggcgacagcaacggcgccagcgccgtcggcggcagtggcggtggctacatgatgccgatgagcgctgccggagcaaccactacatcggcaatggtgagccacgagcaggtgcatgcacgggcctacgacgaagccaagcaggctgctcagatggggtacgagagctacctggtgaacgcggagaacaatggtggcggaaggatgtctgcatgggggactgtcgtgtctgcagccgcggcggcagcagcaagcagcaacgacaacatggccgccgacgtcgggcatggcggcgcgcagctcttcagtgtctggaacgacacttaagcgtacctagtggtacctgacatcttatagtctgcaacctctcgtgtctgaattcctatctttatcaagtgttattgcttccacgactataggacagctttcgtcgaaagcttttgctcatgtgatctcgaaggattcatctagtctgatttttcgtgacttgtatcggttttattggattcatccaacatatatcaataaaaaatgagttgtgtttcctttcttcctagttcagttaaaattatttccctcctgcgcttgtgctgtaattgtctgtgtacctgttgtttgtgactgtgttagttcccttggatatgatttcgtatttgatatgtacatggagatagcttagcttcattattggagtatgaagttagtatgacatagtcactctcctggaaaattgacactgcaaaccatatttttattctgaaccacaaatcctagtcagtccgctggcatatgccgtccgtttgctgaatccagaacgtgggtttggagatgtacggctgagatgcctctatgcgaaggggatttcgtggtgaaacgagatgggagtagagcaacgcccgtggaagatgcttcaaacttccacacttttgagcaacgatcggcagtagtaaggtagacgatttcaagatcaaagcatatgaagataaacaacatcaacaacaaaatttgttggggttctatagagagaaacagagctacatacatacactgttttgtatctaccatctgagatgatgaaaagatgaaaaactaaagaatgccccggcgccaacgccaggacacgccgcgcgcgcgtcacccgagccatctcttgacccagccggcgctgtatatttacacacgttgcagcatcgatcaccacctgttcgatcgcgtcgccgtcaccggtaccgagctcgaattccggtccgggcctagaaggccgatctcccgggcacccagctttcttgtacaaagtggccgttaacggatcggccagaatggcccggaccgggttaccgaattcgagagcttgccgagtgccatccttggacactcgataaagtatattttattttttttattttgccaaccaaactttttgtggtatgttcctacactatgtagatctacatgtaccattttggcacaattacatatttacaaaaatgttttctataaatattagatttagttcgtttatttgaatttcttcggaaaattcacatttaaactgcaagtcactcgaaacatggaaaaccgtgcatgcaaaataaatgatatgcatgttatctagcacaagttacgaccgatttcagaagcagaccagaatcttcaagcaccatgctcactaaacatgaccgtgaacttgttatctagttgtttaaaaattgtataaaacacaaataaagtcagaaattaatgaaacttgtccacatgtcatgatatcatatatagaggttgtgataaaaatttgataatgtttcggtaaagttgtgacgtactatgtgtagaaacctaagtgacctacacataaaatcatagagtttcaatgtagttcactcgacaaagactttgtcaagtgtccgataaaaagtactcgacaaagaagccgttgtcgatgtactgttcgtcgagatctctttgtcgagtgtcacactaggcaaagtctttacggagtgtttttcaggctttgacactcggcaaagcgctcgattccagtagtgacagtaatttgcatcaaaaatagctgagagatttaggccccgtttcaatctcacgggataaagtttagcttcctgctaaactttagctatatgaattgaagtgctaaagtttagtttcaattaccaccattagctctcctgtttagattacaaatggctaaaagtagctaaaaaatagctgctaaagtttatctcgcgagattgaaacagggccttaaaatgagtcaactaatagaccaactaattattagctattagtcgttagcttctttaatctaagctaaaaccaactaatagcttatttgttgaattacaattagctcaacggaattctctgtttttctaaaaaaaaactgcccctctcttacagcaaattgtccgctgcccgtcgtccagatacaatgaacgtacctagtaggaactcttttacacgctcggtcgctcgccgcggatcggagtccccggaacacgacaccactgtggaacacgacaaagtctgctcagaggcggccacaccctggcgtgcaccgagccggagcccggataagcacggtaaggagagtacggcgggacgtggcgacccgtgtgtctgctgccacgcagccttcctccacgtagccgcgcggccgcgccacgtaccagggcccggcgctggtataaatcccgcgccacctccgctttagttctgcatacagccaacccaaggatccaacacacacccgaggatatcacagtcgaccgccggggatccaccatgtccaacctgctcacggttcaccagaaccttccggctcttccagtggacgcgacgtccgatgaagtcaggaagaacctcatggacatgttccgcgacaggcaagcgttcagcgagcacacctggaagatgctgctctccgtctgccgctcctgggctgcatggtgcaagctgaacaacaggaagtggttccccgctgagcccgaggacgtgagggattaccttctgtacctgcaagcgcgaggtttgtttctgcttctacctttgatatatatataataattatcattaattagtagtaatataatatttcaaatatttttttcaaaataaaagaatgtagtatatagcaattgcttttctgtagtttataagtgtgtatattttaatttataacttttctaatatatgaccaaaacatggtgatgcctaggtctggcagtgaagaccatccagcaacaccttggacaactgaacatgcttcacaggcgctccggcctcccgcgccccagcgactcgaacgccgtgagcctcgtcatgcgccgcatcaggaaggaaaacgtcgatgccggcgaaagggcaaagcaggccctcgcgttcgagaggaccgatttcgaccaggtccgcagcctgatggagaacagcgacaggtgccaggacattaggaacctggcgttcctcggaattgcatacaacacgctcctcaggatcgcggaaattgcccgcattcgcgtgaaggacattagccgcaccgacggcggcaggatgcttatccacattggcaggaccaagacgctcgtttccaccgcaggcgtcgaaaaggccctcagcctcggagtgaccaagctcgtcgaacgctggatctccgtgtccggcgtcgcggacgacccaaacaactacctcttctgccgcgtccgcaagaacggggtggctgcccctagcgccaccagccaactcagcacgagggccttggaaggtattttcgaggccacccaccgcctgatctacggcgcgaaggatgacagcggtcaacgctacctcgcatggtccgggcactccgcccgcgttggagctgctagggacatggcccgcgccggtgtttccatccccgaaatcatgcaggcgggtggatggacgaacgtgaacattgtcatgaactacattcgcaaccttgacagcgagacgggcgcaatggttcgcctcctggaagatggtgactgaggtaccacccctcgctcaaacgagcaggaagcaacgagagggtggcgcgcgaccgacgtgcgtacgtagcatgagcctgagtggagacgttggacgtgtatgtatatacctctctgcgtgttaactatgtacgtaagcggcaggcagtgcaataagtgtggctctgtagtatgtacgtgcgggtacgatgctgtaagctactgaggcaagtccataaataaataatgacacgtgcgtgttctataatctcttcgcttcttcatttgtccccttgcggagtttggcatccattgatgccgttacgctgagaacagacacagcagacgaaccaaaagtgagttcttgtatgaaactatgacccttcatcgctaggctcaaacagcaccccgtacgaacacagcaaattagtcatctaactattagcccctacatgtttcagacgatacataaatatagcccatccttagcaattagctattggccctgcccatcccaagcaatgatctcgaagtatttttaatatatagtatttttaatatgtagcttttaaaattagaagataattttgagacaaaaatctccaagtatttttttgggtattttttactgcctccgtttttctttatttctcgtcacctagtttaattttgtgctaatcggctataaacgaaacagagagaaaagttactctaaaagcaactccaacagattagatataaatcttatatcctgcctagagctgttaaaaagatagacaactttagtggattagtgtatgcaacaaactctccaaatttaagtatcccaactacccaacgcatatcgttcccttttcattggcgcacgaactttcacctgctatagccgacgtacatgttcgttttttttgggcggcgcttactttcttccccgttcgttctcagcatcgcaactcaatttgttatggcggagaagcccttgtatcccaggtagtaatgcacagatatgcattattattattcataaaagaattcatcgatctcgagggggggccccggccgaagcttggtcacccggtccgggcctagaaggccagcttcggccgccccgggcaactttattatacaaagttgatagatcgaataacttcgtatagcatacattatacgaagttatacctggtggcgccgctaggggctgcaggaattcgatatcaagcttatcgataccgtcgacctcgagggggggcccggtaccctgggatctgcccttactttaacgcctctaaccaacacccctttatctttataaggaacaataaacagaatttgccccactgttctaaatcacctaataatatccccagctaaaaacaataaaggtttcctagaattaagacaagcatgactgttcctccaggagggtttggaacattgttgcagtcttgcagatacgggcgaagggtgagaaacagagcggagggctggaggtgacctcggtagtcgacgccggagttgagcttgacaacgacggggcggcccctgatggacttgaggaagtccgatggcgtcttcaccgtcccgccggcgcccgaggcgggcctgtcgctgccgccgccgccgctgctcatcttgcgcgctgtgcccccggcggtgtccctgtgttgcggatcgcgggtgggccaggtggatgcgagggcgacccgtttggactccggccggagccgccggatccctggtcggtgtcagtgccgtttactctgggccccacgtgtcagtaccgtctgtagatgacaacaacccgtcgtccacagtcatgtccaaaatatcctttcttcttttttttcgattcggatatctatcttccttttttttttccaaaaatcttcttgacgcaccagcgcgcacgtttgtggtaaacgccgacacgtcggtcccacgtcgatagaccccacccaccagtgagtagcgtgtacgtattcgggggtgacggacgtgtcgccgtcgtcttgctagtcccattcccatctgagccacacatctctgaacaaaaaaaaggagggaggcctccacgcacatccccctccgtgccacccgccccaaaccctcgcgccgcctccgagacagccgccgcaaccatggccaccgccgccgccgcgtctaccgcgctcactggcgccactaccgctgcgcccaaggcgaggcgccgggcgcacctcctggccacccgccgcgccctcgccgcgcccatcaggtgctcagcggcgtcacccgccatgccgatggctcccccggccaccccgctccggccgtggggccccaccgagccccgcaagggtgctgacatcctcgtcgagtccctcgagcgctgcggcgtccgcgacgtcttcgcctaccccggcggcgcgtccatggagatccaccaggcactcacccgctcccccgtcatcgccaaccacctcttccgccacgagcaaggggaggcctttgccgcctccggctacgcgcgctcctcgggccgcgtcggcgtctgcatcgccacctccggccccggcgccaccaacctagtctccgcgctcgccgacgcgctgctcgattccgtccccatggtcgccatcacgggacaggtggcgcgacgcatgattggcaccgacgccttccaggagacgcccatcgtcgaggtcacccgctccatcaccaagcacaactacctggtcctcgacgtcgacgacatcccccgcgtcgtgcaggaggctttcttcctcgcctcctctggtcgaccagggccggtgcttgtcgacatccccaaggacatccagcagcagatggcggtgcctgtctgggacaagcccatgagtctgcctgggtacattgcgcgccttcccaagccccctgcgactgagttgcttgagcaggtgctgcgtcttgttggtgaatcgcggcgccctgttctttatgtgggcggtggctgcgcagcatctggtgaggagttgcgacgctttgtggagctgactggaatcccggtcacaactactcttatgggcctcggcaacttccccagcgacgacccactgtctctgcgcatgctaggtatgcatgggacggtgtatgcaaattatgcagtggataaggccgatctgttgcttgcacttggtgtgcggtttgatgatcgcgtgacagggaagattgaggcttttgcaagcagggctaagattgtgcacgttgatattgatccggctgagattggcaagaacaagcagccacatgtgtccatctgtgcagatgttaagcttgctttgcagggcatgaatgctcttcttgaaggaagcacatcaaagaagagctttgactttggctcatggaacgatgagttggatcagcagaagagggaattcccccttgggtataaaacatctaatgaggagatccagccacaatatgctattcaggttcttgatgagctgacgaaaggcgaggccatcatcggcacaggtgttgggcagcaccagatgtgggcggcacagtactacacttacaagcggccaaggcagtggttgtcttcagctggtcttggggctatgggatttggtttgccggctgctgctggtgcttctgtggcaaacccaggtgtcactgttgttgacatcgatggagatggtagctttctcatgaacgttcaggagctagctatgatccgaattgagaacctcccagtgaaggtctttgtgctaaacaaccagcacctggggatggtggtgcagttggaggacaggttctataaggccaacagagcgcacacatacttgggaaacccagagaatgaaagtgagatatatccagatttcgtgacgatcgccaaagggttcaacattccagcggtccgtgtgacaaagaagaacgaagtccgcgcagcgataaagaagatgctcgagactccagggccgtacctcttggatataatcgtcccacaccaggagcatgtgttgcctatgatccctagtggtggggctttcaaggatatgatcctggatggtgatggcaggactgtgtactgactagctagtcagttaacctagacttgtccatcttctggattggccaacttaattaatgtatgaaataaaaggatgcacacatagtgacatgctaatcactataatgtgggcatcaaagttgtgtgttatgtgtaattactagttatctgaataaaagagaaagagatcatccatatttcttatcctaaatgaatgtcacgtgtctttataattctttgatgaaccagatgcatttcattaaccaaatccatatacatataaatattaatcatatataattaatatcaattgggttagcaaaacaaatctagtctaggtgtgttttgcgaatgcggccgcctgcagagttaacggcgcgccgactagctagctaaggtaccgagctcgaattcattccgattaatcgtggcctcttgctcttcaggatgaagagctatgtttaaacgtgcaagcgctactagacaattcagtacattaaaaacgtccgcaatgtgttattaagttgtctaagcgtcaatttgtttacaccacaatatatcctgcca

SEQ ID NO: 11 - DNA, 21186 bp, synthetic construct
  misc_feature 1..21186: note = PHP83652
  source 1..21186: mol_type = other DNA
gtttacccgccaatatatcctgtcaaacactgatagtttaaactgaaggcgggaaacgacaatctgatcatgagcggagaattaagggagtcacgttatgacccccgccgatgacgcgggacaagccgttttacgtttggaactgacagaaccgcaacgttgaaggagccactcagcaagctggtacgattgtaatacgactcactatagggcgaattgagcgctgtttaaacgctcttcaactggaagagcggttacgctgtttaaacgctcttcaactggaagagcggttactaccggttcactagctagctgctaaggttaccagagctggtcacctttgtccaccaacttattaagtatctagttgaagacacgttcttcttcacgtaagaagacactcagtagtcttcggccagaatggcctcttgattcagcgggcctagaaggccggatcactgactagctaatttaaatcctgaggatctggtcttcctaaggacccgggatatcggaccgattaaactttaattcggtccgataacttcgtatagcatacattatacgaagttatatgcatacgcgtcttaagtcgatcgctatcaactttgtatagaaaagttgggccgagctcggtacggccagaatggcccggaccgggttaccgaattcaggcgacccatcgctgctttgtctacatcatgttcttcatcatcctccccaggcgacgcgtgctgctgttcttattcagactaccgttcgagtgactgcatggcgtacatctttctgcatcgactttgtacggctacatcgaacatatacacgagatgtctcgtgtgaatagagtcactaatgccttaagcatcggttactccgtagggtacattctgttcttcttatttgtgcatatttttattgttgtttactgattatacgagtagttatacatacatgcacatacatatcatcacatatatcacaatatttttctaaattaaattaaaactaaaaatgactaaatttctaacaccaacgacattgtaatgttttctccaacaactttacctattctacattgttctatttcgaatttcactctataaacaacatagtctacaatggaaaacagtgctttgtacgactatatacgcgatgtgtggctacaacataagacaatatagtcgtttgaagattgaacctatatatcggtacggttaatccgtctatgtacgtgggcatgacgaacacccgtgataacgaaggattaacgtgcacaatcataaatccaaagtaggagcggtgcatgatgagaatcgctctcagtactcgacataatgaaccttacgaggtacaacaggcaggcaggcagggaccaggggccgcctttatttcaggctcgctggccccacgggcgtgctgcgtgcacgaagggcactaccccaacctctcaccgaaaaccgcgctggatcggcaaatcaaacgaggtggtgccccgtgcccactctccacgtccacggcaccatccctctgcagccgctcaccagccatgccgtgtcgcggaacggcacaaccacccccaacccactcacgaaaccccgtcccggccgtgcccgtgtcggtccgcgctcggcaacgaggcggcccgcgctgctgagtcccctggacacccgacaccctgtcggccctttgtttattcatcccgaaatctcatctgcccccacggccgactgcgctgcgccgcccggatatatatacccatcgttatcgatcgactggggactctatcagtgatagagtctagaggatcgctcaggaaggccgctgagatagaggcatggcggccaatgcgggcggcggtggagcgggaggaggcagcggcagcggcagcgtggctgcgccggcggtgtgccgccccagcggctcgcggtggacgccgacgccggagcagatcaggatgctgaaggagctctactacggctgcggcatccggtcgcccagctcggagcagatccagcgcatcaccgccatgctgcggcagcacggcaagatcgagggcaagaacgtcttctactggttccagaaccacaaggcccgcgagcgccagaagcgccgcctcaccagcctcgacgtcaacgtgcccgccgccggcgcggccgacgccaccaccagccaactcggcgtcctctcgctgtcgtcgccgccgccttcaggcgcggcgcctccctcgcccaccctcggcttctacgccgccggcaatggcggcggatcggctgtgctgctggacacgagttccgactggggcagcagcggcgctgccatggccaccgagacatgcttcctgcaggactacatgggcgtgacggacacgggcagctcgtcgcagtggccacgcttctcgtcgtcggacacgataatggcggcggccgcggcgcgggcggcgacgacgcgggcgcccgagacgctccctctcttcccgacctgcggcgacgacggcggcagcggtagcagcagctacttgccgttctggggtgccgcgtccacaactgccggcgccacttcttccgttgcgatccagcagcaacaccagctgcaggagcagtacagcttttacagcaacagcaacagcacccagctggccggcaccggcaaccaagacgtatcggcaacagcagcagcagccgccgccctggagctgagcctcagctcatggtgctccccttaccctgctgcagggagtatgtgagagcaacgcgagctgccactgctcttcactggtaccgttaacagatcattcgacaaagcagcattagtccgttgatcggtggaagaccactcgtcagtgttgagttgaatgtttgatcaataaaatacggcaatgctgtaagggttgttttttatgccattgataatacactgtactgttcagttgttgaactctatttcttagccatgccaagtgcttttcttattttgaataacattacagcaaaaagttgaaagacaaaaaaaaaaacccccgaacagagtgctttgggtcccaagcttctttagactgtgttcggcgttccccctaaatttctccccctatatctcactcacttgtcacatcagcgttctctttccccctatatctccacgctctacagcagttccacctatatcaaacctctataccccaccacaacaatattatatactttcatcttcaactaactcatgtaccttccaatttttttctactaataattatttacgtgcacagaaacttagcaaggagagagagagcggggtgacccaccttgctagttggatattacctcttctcttcaaagtatccttgaacgctcaccggttatcaaatctctacactatagctctgtagtcttgctagatagttagttctttagctctcggtgaccaagcttggcgcgatcaagcttatcgataccgtcgacctcgaagcttggtcacccggtccgggcctagaaggccagcttcaagtttgtacaaaaaagcaggctccggccagaatggcccggaccgggttaccgaattcttaccctagctccctgcggctgttacgcggtcccccatcaatcttctgttcttgcggttgtagcctgtgtaacagtgctagagtatgtatgataaataggttttaagtctgcttacatgacattttttattgtggaagagacatataaaaattagagagagtggttctcatgcaacggcggacggcccggtgctaaaagagcttcaagacaaaataatgaaacaggaagagagtagatttatctaagagccaactttattatatgaatgtgtttattgttggctttagatgatatggtaaggagttagagctaataatagataggctctattattattattattaattaaactcgctctaaggaggaaagtgggaggaagggacgaggacgaagactactggaagcatcgtgcatggatgatggatgtggtgtctcttaatgtaggtggccggaggatgtacgtgttaattgcgcgataagcactcagatccaaccgcaaactacctccacactgacacactgatagagagaaagagagacctccgacgactgccgccgcagatgagccacgtacgtatacgacgtctgccggccggctcaggctgccgccatcaccctgctcgaaagtcgcgttaggcggcgccagctacataggagtatctagtctagccagttagtatactactactgcgctgatgatgaattaactctgcatagatactgtacttgcctccctccaacacccaaccacctcctgctcggctcttaataacttggacacggatcgatgccatccaaggaagaacacgacgacgacgacggaacatccaccatgcaagcttgcatccatacgccgatacgcgtgcatccatccatccaccattatttccattttccaccgatcacacgtacacaggcctatttaaggagcgacatcccactgcaactctcctcaccactcatcaccagctagctctagcaaagcacttgccatctaccgaccgccgcattccaaacagcccgacgagctagcagagcggcaggcacctccctcctcaaggaacccatggccactgtgaacaactggctcgctttctccctctccccgcaggagctgccgccctcccagacgacggactccacactcatctcggccgccaccgccgaccatgtctccggcgatgtctgcttcaacatcccccaagattggagcatgaggggatcagagctttcggcgctcgtcgcggagccgaagctggaggacttcctcggcggcatctccttctccgagcagcatcacaaggccaactgcaacatgatacccagcactagcagcacagtttgctacgcgagctcaggtgctagcaccggctaccatcaccagctgtaccaccagcccaccagctcagcgctccacttcgcggactccgtaatggtggcttcctcggccggtgtccacgacggcggtgccatgctcagcgcggccgccgctaacggtgtcgctggcgctgccagtgccaacggcggcggcatcgggctgtccatgattaagaactggctgcggagccaaccggcgcccatgcagccgagggtggcggcggctgagggcgcgcaggggctctctttgtccatgaacatggcggggacgacccaaggcgctgctggcatgccacttctcgctggagagcgcgcacgggcgcccgagagtgtatcgacgtcagcacagggtggagccgtcgtcgtcacggcgccgaaggaggatagcggtggcagcggtgttgccggcgctctagtagccgtgagcacggacacgggtggcagcggcggcgcgtcggctgacaacacggcaaggaagacggtggacacgttcgggcagcgcacgtcgatttaccgtggcgtgacaaggcatagatggactgggagatatgaggcacatctttgggataacagttgcagaagggaagggcaaactcgtaagggtcgtcaagtctatttaggtggctatgataaagaggagaaagctgctagggcttatgatcttgctgctctgaagtactggggtgccacaacaacaacaaattttccagtgagtaactacgaaaaggagctcgaggacatgaagcacatgacaaggcaggagtttgtagcgtctctgagaaggaagagcagtggtttctccagaggtgcatccatttacaggggagtgactaggcatcaccaacatggaagatggcaagcacggattggacgagttgcagggaacaaggatctttacttgggcaccttcagcacccaggaggaggcagcggaggcgtacgacatcgcggcgatcaagttccgcggcctcaacgccgtcaccaacttcgacatgagccgctacgacgtgaagagcatcctggacagcagcgccctccccatcggcagcgccgccaagcgcctcaaggaggccgaggccgcagcgtccgcgcagcaccaccacgccggcgtggtgagctacgacgtcggccgcatcgcctcgcagctcggcgacggcggagccctggcggcggcgtacggcgcgcactaccacggcgccgcctggccgaccatcgcgttccagccgggcgccgccagcacaggcctgtaccacccgtacgcgcagcagccaatgcgcggcggcgggtggtgcaagcaggagcaggaccacgcggtgatcgcggccgcgcacagcctgcaggacctccaccacctgaacctgggcgcggccggcgcgcacgactttttctcggcagggcagcaggccgccgccgctgcgatgcacggcctgggtagcatcgacagtgcgtcgctcgagcacagcaccggctccaactccgtcgtctacaacggcggggtcggcgacagcaacggcgccagcgccgtcggcggcagtggcggtggctacatgatgccgatgagcgctgccggagcaaccactacatcggcaatggtgagccacgagcaggtgcatgcacgggcctacgacgaagccaagcaggctgctcagatggggtacgagagctacctggtgaacgcggagaacaatggtggcggaaggatgtctgcatgggggactgtcgtgtctgcagccgcggcggcagcagcaagcagcaacgacaacatggccgccgacgtcgggcatggcggcgcgcagctcttcagtgtctggaacgacacttaagcgtacctagtggtacctgacatcttatagtctgcaacctctcgtgtctgaattcctatctttatcaagtgttattgcttccacgactataggacagctttcgtcgaaagcttttgctcatgtgatctcgaaggattcatctagtctgatttttcgtgacttgtatcggttttattggattcatccaacatatatcaataaaaaatgagttgtgtttcctttcttcctagttcagttaaaattatttccctcctgcgcttgtgctgtaattgtctgtgtacctgttgtttgtgactgtgttagttcccttggatatgatttcgtatttgatatgtacatggagatagcttagcttcattattggagtatgaagttagtatgacatagtcactctcctggaaaattgacactgcaaaccatatttttattctgaaccacaaatcctagtcagtccgctggcatatgccgtccgtttgctgaatccagaacgtgggtttggagatgtacggctgagatgcctctatgcgaaggggatttcgtggtgaaacgagatgggagtagagcaacgcccgtggaagatgcttcaaacttccacacttttgagcaacgatcggcagtagtaaggtagacgatttcaagatcaaagcatatgaagataaacaacatcaacaacaaaatttgttggggttctatagagagaaacagagctacatacatacactgttttgtatctaccatctgagatgatgaaaagatgaaaaactaaagaatgccccggcgccaacgccaggacacgccgcgcgcgcgtcacccgagccatctcttgacccagccggcgctgtatatttacacacgttgcagcatcgatcaccacctgttcgatcgcgtcgccgtcaccgggatctgagtcgaaacctagacttgtccatcttctggattggccaacttaattaatgtatgaaataaaaggatgcacacatagtgacatgctaatcactataatgtgggcatcaaagttgtgtgttatgtgtaattactagttatctgaataaaagagaaagagatcatccatatttcttatcctaaatgaatgtcacgtgtctttataattctttgatgaaccagatgcatttcattaaccaaatccatatacatataaatattaatcatatataattaatatcaattgggttagcaaaacaaatctagtctaggtgtgttttgcgaatgcgaccttcttatgtgcttctagtctccaaatgtggttgatagttattttgctctaagatcaacagtaatgaagtataaatcatcgttgtggtgtgctactcggttaattgagcattaacacacacaaacatgacgaggatggtataatctccaaaaatgtgtactttgttaggtgggaccctatagccttgattaatgtgctatgttaggcatgcctggaaacgtgtgacgcatatgttttgtgaacctgttgatattatatgtgcttttatattaccatattttattaaaatactaatatttattactagtaagatataacattctatctagcttaaaaactaaccataaatattccataataactagatttaccaaactaatatactaaatatacataataaatacaaaattaacaagacaataatcaatatttatgagcttaatatatttagacattatggttggtcgacgataatcatgctaacttttcgtaattgcttgattgaaatatgcttagaataatgcctctttgttctacatggcaaatagggaccattatggtgtaacaccctgggaaccacaaacaccccgaaatgctactaaactacacaactaaccttcatatataaaatttcgacagcatctcctttgaaaatttgcatagacgtggaagcaacagagtataaacagatatcatgataagaaaacatactagacattaataatctgctagaaatgggaagaatcctaacttgacgactgcgtaactgactagagtcacacttagctgaccctagtcacttacaactgacttcgtgtcctagatcgatgggccctggccgaagcttggtcacccggtccgggcctagaaggccagcttcaagtttgtacaaaaaagcaggctccggccagaatggcccggaccgggttaccgaattcgagctcggtaccctggtcacgtgcgtgtgtaactacagttcgcaaagcgacagaaggccaagacttgaagttttggccgggcgtcccgccatggcgacggcgagtcaacccgctgcccccacgcccaacggctacggcggtggtattttggctggcggagacggggtgcacgacactggcacggtgtcagatcagtctgggtcaccgtgagcctgtgtcgcagcactgctgctgttgcactgtggtagtgcggtggggctattgtcaaaggctcaaagcgtggctcggcagtcggcacccgcgcgatcagggcagccatcactcatcatcgcaggacatggcggtggagtggctacatagaaatctgtcctggtctgggcctgtgtagggtacgtacagctgaaatcagatccgccgcgtgtcaatttctgcttcgtttgacagtgtgtgcccacgccgcggagcgtgttcggtggcctttttcggcgttctagcggaatgggcgaccgcatttatcggctatgcttcattacataaaaccaaggctctgttttttagtacattagtagtaatgttcattgactgcgccgaactgtccgtatcatggcacagatgctcgttgatgacaacctcaacaggtggcagcgttacaacacgccatgcgacggtgtgttcccctcatgatgcgcaagttgcaggcagcaggtagcaaagcacatggttcactgggcacgaataggatgtttccatgccgacgtcctaatctcgtacagtacgtaatctctactacttaagtaagagtagtctaccattccatgttctatcaccattccctgttcttctgccattccttattctgcctctctcattcctattctctattctgcctttctcattcctcctccccgcacagcctatttccatattctgtcatttcctattctgcctttctcattccccctccccacaaagcatatttctattctcattcccgcgtacagcccacgtttagctaaaataaaaaaacacaaatgaccccaaagggattcaaacccgtgacctctcaaacaaatgcgagcagttgctaccgctacaccacatgtgtgtttatgtctacatctataacaggaaaaatatctactacatctctccccaaacctaccctactacccttgcacaatgcgtagtactagataagtatcatcgagattcttaaattatatttttagatggaatgagtaatatctaaagaagagccttgcatgcaatttcttttgtttgaataatgttttcaacttaaatttctttttttgcatgcgtggcatttattctccataatattttttccatggatctgacttgtgagtcattttcataaaccaacgccaaggataaatccatgtttcttgcttggaaaccacgaacaaacaccactagcaggaggcgctcacgttggcatcgctcatcgacgacgagaagaagcttgacgattgtcagttcgacctctggaagcagtcctacctggccgcatgaaccgctgtgtatgacaagctccgacacagccgccgcttggaatcggtccaaagcgactgcaccgcgttgtccatcgtcaagcagggggacctcatggttgttgccaacgtcggtgactctcgggttgttctgggcaccgcatccaacgacggagccatcacaccgtctagctcatcgtccatctgaagctcaacctgccatgtaagttgctactgaccggccataaattcttgtgcgctcggacgacggtcgttgctgatgttgtgtgagtgtcctcgaacatgatgtatgtagaggagtagcgcatccggtggtgcaacggtcaggtgtactaccttgctgatgaacccgaggtgcacttcatctggcagtccaaccaagagtcatcggcactcgacatgtcgcgcgcgttcgacgactactatactgtgacgtcatctcggcaccggaggtgacgcagaggaggaccgacatcaatgatcagttcttcatcctccccaccgtcggggtagctttttgtgctggtctgtctgtaattctctttacaaacacacacaattgctttttttgtttgagcaagcgcgtatggtggtacgtgcctgatgactgacgatgtacgagggaacttcttccggcaggcgtggggcatgctcaccaatgatgagaccatgaaaatcatggcatatatcgaagtcggtactgatggttgcaatgtagtggtgaaacaactagattaaaacaacaaaatttatgtatgaccagaatcacaaatagattatgaaacattttctcataacagtataacacacattttgtatataagttaccgtggtgttatatgtccccgttgcaacgcacgggcactcacctagtctatatagaaagaccctacaaagtagtacaaagactctattttattctggactcttccggatatacatgtacatgtgggccggcctggcccggcacggcacaggcccacaaaagcacggcccacaaaggcacggcccataaaagcacatatctaattatgggccgtgccgtgccagcacgtgtgcccagtcatcggcccacggcacggcccacaattagttatgtgtgccaggccggcccaaatagcccaaaataccttaatatgccagaccggctcatatacatacaacagtaatacatcaacaaaaagtaatatatatatatatatatatatatatatatatatatatatatgaccaaaataaaactaagatgttttatggatgcacattataaacctttggtcagaaagaaaaaaacaactagctcataaataatatttagttctctgtttagtgtttaattgagtactatacatccatacagaatacatatacaatgatcatcactattcactatccatatctaggtattggttctcgatggcttattgaagctctagattctccaaattatgctagtcatgtgggctttgacgaaccttagttaaatactgagtctatatttagtgggcctcggtgggccttagttaaatgggccgtgccaggccggcccgtgggcttgacatgaggcccaggcacggcccacaatgtgggccgtgccggcccaggcccacaattaggttgggccgtaccagatatgggtcgtgccagaaattgtatgattaggcacagcacaaatgtacacctatacttccggaatcccgaccatcccacggagccacctttcagaaccttccttcgccttccagaagcccacccgtcaccaccatataaaccgcccctgttcgcgtcggcattccccacaccgagaatcacaatacgaaacgaattaatccccaatcaacacagcaagtcagcaacaagcaaagcagcgacccgagagatgtccaacctgctcacggttcaccagaaccttccggctcttccagtggacgcgacgtccgatgaagtcaggaagaacctcatggacatgttccgcgacaggcaagcgttcagcgagcacacctggaagatgctgctctccgtctgccgctcctgggctgcatggtgcaagctgaacaacaggaagtggttccccgctgagcccgaggacgtgagggattaccttctgtacctgcaagcgcgaggtttgtttctgcttctacctttgatatatatataataattatcattaattagtagtaatataatatttcaaatatttttttcaaaataaaagaatgtagtatatagcaattgcttttctgtagtttataagtgtgtatattttaatttataacttttctaatatatgaccaaaacatggtgatgcctaggtctggcagtgaagaccatccagcaacaccttggacaactgaacatgcttcacaggcgctccggcctcccgcgccccagcgactcgaacgccgtgagcctcgtcatgcgccgcatcaggaaggaaaacgtcgatgccggcgaaagggcaaagcaggccctcgcgttcgagaggaccgatttcgaccaggtccgcagcctgatggagaacagcgacaggtgccaggacattaggaacctggcgttcctcggaattgcatacaacacgctcctcaggatcgcggaaattgcccgcattcgcgtgaaggacattagccgcaccgacggcggcaggatgcttatccacattggcaggaccaagacgctcgtttccaccgcaggcgtcgaaaaggccctcagcctcggagtgaccaagctcgtcgaacgctggatctccgtgtccggcgtcgcggacgacccaaacaactacctcttctgccgcgtccgcaagaacggggtggctgcccctagcgccaccagccaactcagcacgagggccttggaaggtattttcgaggccacccaccgcctgatctacggcgcgaaggatgacagcggtcaacgctacctcgcatggtccgggcactccgcccgcgttggagctgctagggacatggcccgcgccggtgtttccatccccgaaatcatgcaggcgggtggatggacgaacgtgaacattgtcatgaactacattcgcaaccttgacagcgagacgggcgcaatggttcgcctcctggaagatggtgactgaggtacccaacctagacttgtccatcttctggattggccaacttaattaatgtatgaaataaaaggatgcacacatagtgacatgctaatcactataatgtgggcatcaaagttgtgtgttatgtgtaattactagttatctgaataaaagagaaagagatcatccatatttcttatcctaaatgaatgtcacgtgtctttataattctttgatgaaccagatgcatttcattaaccaaatccatatacatataaatattaatcatatataattaatatcaattgggttagcaaaacaaatctagtctaggtgtgttttgcgatccgatatcgatgggccctggccgaagcttggtcacccggtccgggcctagaaggccgatctcccgggcacccagctttcttgtacaaagtggccgttaacggatcggccagaatggcccggaccgggttaccgaattcctgcccttaaggccaattgttcaagattcattcaacaattgaaacatctcccatgattaaatcagtataaggttgctatggtcttgcttgacaaagtttttttttgagggaatttcaactaaatttttgagtgaaactatcaaatactgattttaaaaaatttttataaaaggaagcgcagagataaaaggccatctatgctacaaaagtacccaaaaatgtaatcctaaagtatgaattgcattttttttttgtttggacgaaaggaaaggagtattaccacaagaatgatatcatcttcatatttagatcttttttgggtaaagcttgagattctctaaatatagagaaatcagaagaaaaaaaaaccgtgttttggtggttttgatttctagcctccacaataactttgacggcgtcgacaagtctaacggacaccaagcagcgaaccaccagcgccgagccaagcgaagcagacggccgagacgttgacaccttcggcgcggcatctctcgagagttccgctccggcgctccacctccaccgctggcggtttcttattccgttccgttccgcctcctgctctgctcctctccacaccacacggcacgaaaccgttacggcaccggcagcacccagcacgggagaggggattcctttcccaccgttccttccctttccgccccgccgctataaatagccagccccatccccagcttttttccccaatctcatctcctctctcctgttgttcggagcacacgcacaatccgatcgatccccaaatccccttcgtctctcctcgcgagcctcgtggatcccagcttcaaggtacggcgatcgatcatcccccctccttctctctaccttcttttctctagactacatcggatggcgatccatggttagggcctgctagtttcccttcctgttttgtcgatggctgcgaggcacaatagatctgatggcgttatgacggctaacttgtcatgttgttgcgatttatagtccctttaggagatcagtttaatttctcggatggttcgagatcggtggtccatggttagtaccctaagatccgcgctgttagggttcgtagatggaggcgacctgttctgattgttaacttgtcagtacctgggaaatcctgggatggttctagctcgtccgcagatgagatcgatttcatgatcctctgtatcttgtttcgttgcctaggttccgtctaatctatccgtggtatgatgtagatgttttgatcgtgctaactacgtcttgtaaagttaattgtcaggtcataatttttagcatgcctttttttttgtttggttttgtctaattgggctgtcgttctagatcagagtagaagactgttccaaactacctgctggatttattgaacttggatctgtatgtgtgtcacatatcttcataaattcatgattaagatggattgaaatatcttttatctttttggtatggatagttctatatgttggtgtggctttgttagatgtatacatgcttagatacatgaagcaacgtgctgctactgtttagtaattgctgttcatttgtctaataaacagataaggatatgtatttatgttgctgttggttttgctggtactttgttggatacaaatgcttcaatacagaaaacagcatgctgctacgatttaccatttatctaatcttatcatatgtctaatctaataaacaaacatgcttttaaattatcttcatatgcttggatgatggcatacacagcggctatgtgtggttttttaaatacccagcatcatgggcatgcatgacactgctttaatatgctttttatttgcttgagactgtttcttttgtttatactgaccctttagttcggtgactcttctgcaggtcgactttaacttagcctaggatccatggcccagtccaagcacggcctgaccaaggagatgaccatgaagtaccgcatggagggctgcgtggacggccacaagttcgtgatcaccggcgagggcatcggctaccccttcaagggcaagcaggccatcaacctgtgcgtggtggagggcggccccttgcccttcgccgaggacatcttgtccgccgccttcatgtacggcaaccgcgtgttcaccgagtacccccaggacatcgtcgactacttcaagaactcctgccccgccggctacacctgggaccgctccttcctgttcgaggacggcgccgtgtgcatctgcaacgccgacatcaccgtgagcgtggaggagaactgcatgtaccacgagtccaagttctacggcgtgaacttccccgccgacggccccgtgatgaagaagatgaccgacaactgggagccctcctgcgagaagatcatccccgtgcccaagcagggcatcttgaagggcgacgtgagcatgtacctgctgctgaaggacggtggccgcttgcgctgccagttcgacaccgtgtacaaggccaagtccgtgccccgcaagatgcccgactggcacttcatccagcacaagctgacccgcgaggaccgcagcgacgccaagaaccagaagtggcacctgaccgagcacgccatcgcctccggctccgccttgccctccggactcagatctcgatagggtaccaatggccagttaacagatccagctgctgctgttctagggttcacaagtctgcctatttgtcttccccaatggagctatggttgtctggtctggtccttggtcgtgtcccgtttcattgtgtactatttacctgtaatgtgtatccttaagtctggtttgatggtgtctgaaacgttttgctgtggtagagcagcatggaagaactataatgaataagtgatccctaatcattgtgtccaaattttgcttctgctatacccttttgtgctgtttcttatgttttgcttaaaaatttgatctgacaaacaaatttgtctaaattatgctcttgttctgactgtgtactgtacacatttgtattgctaccggtttggcacatagttttctctttgattgcagatcaaacccttctgattgcagattgcttggctatggctgatgtgctcactgttcttctttagcttgtatattgctgatggtggcttggctacggctgaaaaagttgctgctgcgccgacttggcaactgttgctccagtaatgctttgtcctctcttcctagccgccgacttggcacttggcagctgttgctcctgtaatgcgttgttatctcttatctcttgagatgtactatgattttgaggctgtttgacttgtgccagattgccagtgctgatgctatattatctcaggtttttatgctagtatatgttttactgtgtgctgcctgtgtcgagttacgtaatctattgaaccgctatgcgtgttgatgccctgttgttgcttgccagattgatgcccctgttgcttgcagcttgcaagctgtagtgaaatcctaaaattcgaaaccaaatctattctgaacttttgaagatctgtgatgtccggaagaaaagattcaaacagataaacgggactctccagaatctataaaataaatgatcgacaaacgctttgctttggtaggcttcctagttagttagcggaccgaagcttcggtccgggcctagaaggccagcttcggccgccccgggcaactttattatacaaagttgatagatcgaataacttcgtatagcatacattatacgaagttatacctggtggcgccgctaggggctgcaggaattcgatatcaagcttatcgataccgtcgacctcgagggggggcccggtaccctgggatctgcccttactttaacgcctctaaccaacacccctttatctttataaggaacaataaacagaatttgccccactgttctaaatcacctaataatatccccagctaaaaacaataaaggtttcctagaattaagacaagcatgactgttcctccaggagggtttggaacattgttgcagtcttgcagatacgggcgaagggtgagaaacagagcggagggctggaggtgacctcggtagtcgacgccggagttgagcttgacaacgacggggcggcccctgatggacttgaggaagtccgatggcgtcttcaccgtcccgccggcgcccgaggcgggcctgtcgctgccgccgccgccgctgctcatcttgcgcgctgtgcccccggcggtgtccctgtgttgcggatcgcgggtgggccaggtggatgcgagggcgacccgtttggactccggccggagccgccggatccctggtcggtgtcagtgccgtttactctgggccccacgtgtcagtaccgtctgtagatgacaacaacccgtcgtccacagtcatgtccaaaatatcctttcttcttttttttcgattcggatatctatcttccttttttttttccaaaaatcttcttgacgcaccagcgcgcacgtttgtggtaaacgccgacacgtcggtcccacgtcgatagaccccacccaccagtgagtagcgtgtacgtattcgggggtgacggacgtgtcgccgtcgtcttgctagtcccattcccatctgagccacacatctctgaacaaaaaaaaggagggaggcctccacgcacatccccctccgtgccacccgccccaaaccctcgcgccgcctccgagacagccgccgcaaccatggccaccgccgccgccgcgtctaccgcgctcactggcgccactaccgctgcgcccaaggcgaggcgccgggcgcacctcctggccacccgccgcgccctcgccgcgcccatcaggtgctcagcggcgtcacccgccatgccgatggctcccccggccaccccgctccggccgtggggccccaccgagccccgcaagggtgctgacatcctcgtcgagtccctcgagcgctgcggcgtccgcgacgtcttcgcctaccccggcggcgcgtccatggagatccaccaggcactcacccgctcccccgtcatcgccaaccacctcttccgccacgagcaaggggaggcctttgccgcctccggctacgcgcgctcctcgggccgcgtcggcgtctgcatcgccacctccggccccggcgccaccaacctagtctccgcgctcgccgacgcgctgctcgattccgtccccatggtcgccatcacgggacaggtggcgcgacgcatgattggcaccgacgccttccaggagacgcccatcgtcgaggtcacccgctccatcaccaagcacaactacctggtcctcgacgtcgacgacatcccccgcgtcgtgcaggaggctttcttcctcgcctcctctggtcgaccagggccggtgcttgtcgacatccccaaggacatccagcagcagatggcggtgcctgtctgggacaagcccatgagtctgcctgggtacattgcgcgccttcccaagccccctgcgactgagttgcttgagcaggtgctgcgtcttgttggtgaatcgcggcgccctgttctttatgtgggcggtggctgcgcagcatctggtgaggagttgcgacgctttgtggagctgactggaatcccggtcacaactactcttatgggcctcggcaacttccccagcgacgacccactgtctctgcgcatgctaggtatgcatgggacggtgtatgcaaattatgcagtggataaggccgatctgttgcttgcacttggtgtgcggtttgatgatcgcgtgacagggaagattgaggcttttgcaagcagggctaagattgtgcacgttgatattgatccggctgagattggcaagaacaagcagccacatgtgtccatctgtgcagatgttaagcttgctttgcagggcatgaatgctcttcttgaaggaagcacatcaaagaagagctttgactttggctcatggaacgatgagttggatcagcagaagagggaattcccccttgggtataaaacatctaatgaggagatccagccacaatatgctattcaggttcttgatgagctgacgaaaggcgaggccatcatcggcacaggtgttgggcagcaccagatgtgggcggcacagtactacacttacaagcggccaaggcagtggttgtcttcagctggtcttggggctatgggatttggtttgccggctgctgctggtgcttctgtggcaaacccaggtgtcactgttgttgacatcgatggagatggtagctttctcatgaacgttcaggagctagctatgatccgaattgagaacctcccagtgaaggtctttgtgctaaacaaccagcacctggggatggtggtgcagttggaggacaggttctataaggccaacagagcgcacacatacttgggaaacccagagaatgaaagtgagatatatccagatttcgtgacgatcgccaaagggttcaacattccagcggtccgtgtgacaaagaagaacgaagtccgcgcagcgataaagaagatgctcgagactccagggccgtacctcttggatataatcgtcccacaccaggagcatgtgttgcctatgatccctagtggtggggctttcaaggatatgatcctggatggtgatggcaggactgtgtactgactagctagtcagttaacctagacttgtccatcttctggattggccaacttaattaatgtatgaaataaaaggatgcacacatagtgacatgctaatcactataatgtgggcatcaaagttgtgtgttatgtgtaattactagttatctgaataaaagagaaagagatcatccatatttcttatcctaaatgaatgtcacgtgtctttataattctttgatgaaccagatgcatttcattaaccaaatccatatacatataaatattaatcatatataattaatatcaattgggttagcaaaacaaatctagtctaggtgtgttttgcgaatgcggccgcctgcagagttaacggcgcgccgactagctagctaaggtaccgagctcgaattcattccgattaatcgtggcctcttgctcttcaggatgaagagctatgtttaaacgtgcaagcgctactagacaattcagtacattaaaaacgtccgcaatgtgttattaagttgtctaagcgtcaatttgtttacaccacaatatatcctgcca

SEQ ID NO: 12 - DNA, 7122 bp, synthetic construct
  misc_feature 1..7122: note = PHP89030
  source 1..7122: mol_type = other DNA
cccagtcttccgactgagcctttcgttttatttgatgcctggcagttccctactctcgcgttaacgctagcatggatgttttcccagtcacgacgttgtaaaacgacggccagtcttaagctcgggccccaaataatgattttattttgactgatagtgacctgttcgttgcaacaaattgatgagcaatgcttttttataatgccaactttgtacaaaaaagcaggctccggccagaatggcccggaccgggttacgttaccgaattcttaccctagctccctgcggctgttacgcggtcccccatcaatcttctgttcttgcggttgtagcctgtgtaacagtgctagagtatgtatgataaataggttttaagtctgcttacatgacattttttattgtggaagagacatataaaaattagagagagtggttctcatgcaacggcggacggcccggtgctaaaagagcttcaagacaaaataatgaaacaggaagagagtagatttatctaagagccaactttattatatgaatgtgtttattgttggctttagatgatatggtaaggagttagagctaataatagataggctctattattattattattaattaaactcgctctaaggaggaaagtgggaggaagggacgaggacgaagactactggaagcatcgtgcatggatgatggatgtggtgtctcttaatgtaggtggccggaggatgtacgtgttaattgcgcgataagcactcagatccaaccgcaaactacctccacactgacacactgatagagagaaagagagacctccgacgactgccgccgcagatgagccacgtacgtatacgacgtctgccggccggctcaggctgccgccatcaccctgctcgaaagtcgcgttaggcggcgccagctacataggagtatctagtctagccagttagtatactactactgcgctgatgatgaattaactctgcatagatactgtacttgcctccctccaacacccaaccacctcctgctcggctcttaataacttggacacggatcgatgccatccaaggaagaacacgacgacgacgacggaacatccaccatgcaagcttgcatccatacgccgatacgcgtgcatccatccatccaccattatttccattttccaccgatcacacgtacacaggcctatttaaggagcgacatcccactgcaactctcctcaccactcatcaccagctagctctagcaaagcacttgccatctaccgaccgccgcattccaaacagcccgacgagctagcagagcggcaggcacctccctcctcaaggaacccatggccactgtgaacaactggctcgctttctccctctccccgcaggagctgccgccctcccagacgacggactccacactcatctcggccgccaccgccgaccatgtctccggcgatgtctgcttcaacatcccccaagattggagcatgaggggatcagagctttcggcgctcgtcgcggagccgaagctggaggacttcctcggcggcatctccttctccgagcagcatcacaaggccaactgcaacatgatacccagcactagcagcacagtttgctacgcgagctcaggtgctagcaccggctaccatcaccagctgtaccaccagcccaccagctcagcgctccacttcgcggactccgtaatggtggcttcctcggccggtgtccacgacggcggtgccatgctcagcgcggccgccgctaacggtgtcgctggcgctgccagtgccaacggcggcggcatcgggctgtccatgattaagaactggctgcggagccaaccggcgcccatgcagccgagggtggcggcggctgagggcgcgcaggggctctctttgtccatgaacatggcggggacgacccaaggcgctgctggcatgccacttctcgctggagagcgcgcacgggcgcccgagagtgtatcgacgtcagcacagggtggagccgtcgtcgtcacggcgccgaaggaggatagcggtggcagcggtgttgccggcgctctagtagccgtgagcacggacacgggtggcagcggcggcgcgtcggctgacaacacggcaaggaagacggtggacacgttcgggcagcgcacgtcgatttaccgtggcgtgacaaggcatagatggactgggagatatgaggcacatctttgggataacagttgcagaagggaagggcaaactcgtaagggtcgtcaagtctatttaggtggctatgataaagaggagaaagctgctagggcttatgatcttgctgctctgaagtactggggtgccacaacaacaacaaattttccagtgagtaactacgaaaaggagctcgaggacatgaagcacatgacaaggcaggagtttgtagcgtctctgagaaggaagagcagtggtttctccagaggtgcatccatttacaggggagtgactaggcatcaccaacatggaagatggcaagcacggattggacgagttgcagggaacaaggatctttacttgggcaccttcagcacccaggaggaggcagcggaggcgtacgacatcgcggcgatcaagttccgcggcctcaacgccgtcaccaacttcgacatgagccgctacgacgtgaagagcatcctggacagcagcgccctccccatcggcagcgccgccaagcgcctcaaggaggccgaggccgcagcgtccgcgcagcaccaccacgccggcgtggtgagctacgacgtcggccgcatcgcctcgcagctcggcgacggcggagccctggcggcggcgtacggcgcgcactaccacggcgccgcctggccgaccatcgcgttccagccgggcgccgccagcacaggcctgtaccacccgtacgcgcagcagccaatgcgcggcggcgggtggtgcaagcaggagcaggaccacgcggtgatcgcggccgcgcacagcctgcaggacctccaccacctgaacctgggcgcggccggcgcgcacgactttttctcggcagggcagcaggccgccgccgctgcgatgcacggcctgggtagcatcgacagtgcgtcgctcgagcacagcaccggctccaactccgtcgtctacaacggcggggtcggcgacagcaacggcgccagcgccgtcggcggcagtggcggtggctacatgatgccgatgagcgctgccggagcaaccactacatcggcaatggtgagccacgagcaggtgcatgcacgggcctacgacgaagccaagcaggctgctcagatggggtacgagagctacctggtgaacgcggagaacaatggtggcggaaggatgtctgcatgggggactgtcgtgtctgcagccgcggcggcagcagcaagcagcaacgacaacatggccgccgacgtcgggcatggcggcgcgcagctcttcagtgtctggaacgacacttaagcgtacctagtggtacctgacatcttatagtctgcaacctctcgtgtctgaattcctatctttatcaagtgttattgcttccacgactataggacagctttcgtcgaaagcttttgctcatgtgatctcgaaggattcatctagtctgatttttcgtgacttgtatcggttttattggattcatccaacatatatcaataaaaaatgagttgtgtttcctttcttcctagttcagttaaaattatttccctcctgcgcttgtgctgtaattgtctgtgtacctgttgtttgtgactgtgttagttcccttggatatgatttcgtatttgatatgtacatggagatagcttagcttcattattggagtatgaagttagtatgacatagtcactctcctggaaaattgacactgcaaaccatatttttattctgaaccacaaatcctagtcagtccgctggcatatgccgtccgtttgctgaatccagaacgtgggtttggagatgtacggctgagatgcctctatgcgaaggggatttcgtggtgaaacgagatgggagtagagcaacgcccgtggaagatgcttcaaacttccacacttttgagcaacgatcggcagtagtaaggtagacgatttcaagatcaaagcatatgaagataaacaacatcaacaacaaaatttgttggggttctatagagagaaacagagctacatacatacactgttttgtatctaccatctgagatgatgaaaagatgaaaaactaaagaatgccccggcgccaacgccaggacacgccgcgcgcgcgtcacccgagccatctcttgacccagccggcgctgtatatttacacacgttgcagcatcgatcaccacctgttcgatcgcgtcgccgtcacccgtacgcgtgcgatcgagcagctggcttgtggggaccagacaaaaaaggaatggtgcagaattgttaggcgcacctaccaaaagcatctttgcctttattgcaaagataaagcagattcctctagtacaagtggggaacaaaataacgtggaaaagagctgtcctgacagcccactcactaatgcgtatgacgaacgcagtgacgaccacaaaaattccggactagtggcgcgcctcaacgagatcatgagccaatcaaagaggagtgatgtagacctaaagcaataatggagccatgacgtaagggcttacgcccatacgaaataattaaaggctgatgtgacctgtcggtctctcagaacctttactttttatgtttggcgtgtatttttaaatttccacggcaatgacgatgtgaccaccggtgcctaggcccgggcacccagctttcttgtacaaagttggcattataagaaagcattgcttatcaatttgttgcaacgaacaggtcactatcagtcaaaataaaatcattatttgccatccagctgatatcccctatagtgagtcgtattacatggtcatagctgtttcctggcagctctggcccgtgtctcaaaatctctgatgttacattgcacaagataaaaatatatcatcatgaacaataaaactgtctgcttacataaacagtaatacaaggggtgttatgagccatattcaacgggaaacgtcgaggccgcgattaaattccaacatggatgctgatttatatgggtataaatgggctcgcgataatgtcgggcaatcaggtgcgacaatctatcgcttgtatgggaagcccgatgcgccagagttgtttctgaaacatggcaaaggtagcgttgccaatgatgttacagatgagatggtcagactaaactggctgacggaatttatgcctcttccgaccatcaagcattttatccgtactcctgatgatgcatggttactcaccactgcgatccccggaaaaacagcattccaggtattagaagaatatcctgattcaggtgaaaatattgttgatgcgctggcagtgttcctgcgccggttgcattcgattcctgtttgtaattgtccttttaacagcgatcgcgtatttcgtctcgctcaggcgcaatcacgaatgaataacggtttggttgatgcgagtgattttgatgacgagcgtaatggctggcctgttgaacaagtctggaaagaaatgcataaacttttgccattctcaccggattcagtcgtcactcatggtgatttctcacttgataaccttatttttgacgaggggaaattaataggttgtattgatgttggacgagtcggaatcgcagaccgataccaggatcttgccatcctatggaactgcctcggtgagttttctccttcattacagaaacggctttttcaaaaatatggtattgataatcctgatatgaataaattgcagtttcatttgatgctcgatgagtttttctaatcagaattggttaattggttgtaacactggcagagcattacgctgacttgacgggacggcgcaagctcatgaccaaaatcccttaacgtgagttacgcgtcgttccactgagcgtcagaccccgtagaaaagatcaaaggatcttcttgagatcctttttttctgcgcgtaatctgctgcttgcaaacaaaaaaaccaccgctaccagcggtggtttgtttgccggatcaagagctaccaactctttttccgaaggtaactggcttcagcagagcgcagataccaaatactgttcttctagtgtagccgtagttaggccaccacttcaagaactctgtagcaccgcctacatacctcgctctgctaatcctgttaccagtggctgctgccagtggcgataagtcgtgtcttaccgggttggactcaagacgatagttaccggataaggcgcagcggtcgggctgaacggggggttcgtgcacacagcccagcttggagcgaacgacctacaccgaactgagatacctacagcgtgagctatgagaaagcgccacgcttcccgaagggagaaaggcggacaggtatccggtaagcggcagggtcggaacaggagagcgcacgagggagcttccagggggaaacgcctggtatctttatagtcctgtcgggtttcgccacctctgacttgagcgtcgatttttgtgatgctcgtcaggggggcggagcctatggaaaaacgccagcaacgcggcctttttacggttcctggccttttgctggccttttgctcacatgttctttcctgcgttatcccctgattctgtggataaccgtattaccgcctttgagtgagctgataccgctcgccgcagccgaacgaccgagcgcagcgagtcagtgagcgaggaagcggaagagcgcccaatacgcaaaccgcctctccccgcgcgttggccgattcattaatgcagctggcacgacaggtttcccgactggaaagcgggcagtgagcgcaacgcaattaatacgcgtaccgctagccaggaagagtttgtagaaacgcaaaaaggccatccgtcaggatggccttctgcttagtttgatgcctggcagtttatggcgggcgtcctgcccgccaccctccgggccgttgcttcacaacgttcaaatccgctcccggcggatttgtcctactcaggagagcgttcaccgacaaacaacagataaaacgaaagg

SEQ ID NO: 13 - DNA, 6805 bp, synthetic construct
  misc_feature 1..6805: note = PHP89179
  source 1..6805: mol_type = other DNA
cccagtcttccgactgagcctttcgttttatttgatgcctggcagttccctactctcgcgttcatggagctccaaataatgattttattttgactgatagtgacctgttcgttgcaacaaattgataagcaatgcttttttataatgccaactttgtatagaaaagttgggccgagctcggtacggccagaatggcccggaccgggttaccgaattcttaccctagctccctgcggctgttacgcggtcccccatcaatcttctgttcttgcggttgtagcctgtgtaacagtgctagagtatgtatgataaataggttttaagtctgcttacatgacattttttattgtggaagagacatataaaaattagagagagtggttctcatgcaacggcggacggcccggtgctaaaagagcttcaagacaaaataatgaaacaggaagagagtagatttatctaagagccaactttattatatgaatgtgtttattgttggctttagatgatatggtaaggagttagagctaataatagataggctctattattattattattaattaaactcgctctaaggaggaaagtgggaggaagggacgaggacgaagactactggaagcatcgtgcatggatgatggatgtggtgtctcttaatgtaggtggccggaggatgtacgtgttaattgcgcgataagcactcagatccaaccgcaaactacctccacactgacacactgatagagagaaagagagacctccgacgactgccgccgcagatgagccacgtacgtatacgacgtctgccggccggctcaggctgccgccatcaccctgctcgaaagtcgcgttaggcggcgccagctacataggagtatctagtctagccagttagtatactactactgcgctgatgatgaattaactctgcatagatactgtacttgcctccctccaacacccaaccacctcctgctcggctcttaataacttggacacggatcgatgccatccaaggaagaacacgacgacgacgacggaacatccaccatgcaagcttgcatccatacgccgatacgcgtgcatccatccatccaccattatttccattttccaccgatcacacgtacacaggcctatttaaggagcgacatcccactgcaactctcctcaccactcatcaccagctagctctagcaaagcacttgccatctaccgaccgccgcattccaaacagcccgacgagctagcagagcggcaggcacctccctcctcaaggaacccatggcggccaatgcgggcggcggtggagcgggaggaggcagcggcagcggcagcgtggctgcgccggcggtgtgccgccccagcggctcgcggtggacgccgacgccggagcagatcaggatgctgaaggagctctactacggctgcggcatccggtcgcccagctcggagcagatccagcgcatcaccgccatgctgcggcagcacggcaagatcgagggcaagaacgtcttctactggttccagaaccacaaggcccgcgagcgccagaagcgccgcctcaccagcctcgacgtcaacgtgcccgccgccggcgcggccgacgccaccaccagccaactcggcgtcctctcgctgtcgtcgccgccgccttcaggcgcggcgcctccctcgcccaccctcggcttctacgccgccggcaatggcggcggatcggctgtgctgctggacacgagttccgactggggcagcagcggcgctgctatggccaccgagacatgcttcctgcaggactacatgggcgtgacggacacgggcagctcgtcgcagtggccacgcttctcgtcgtcggacacgataatggcggcggccgcggcgcgggcggcgacgacgcgggcgcccgagacgctccctctcttcccgacctgcggcgacgacggcggcagcggtagcagcagctacttgccgttctggggtgccgcgtccacaactgccggcgccacttcttccgttgcgatccaacagcaacaccagctgcaggagcagtacagcttttacagcaacagcaacagcacccagctggccggcaccggcaaccaagacgtatcggcaacagcagcagcagccgccgccctggagctgagcctcagctcatggtgctccccttaccctgctgcagggagtatgtgagagcaacgcgagctgccactgctcttcactgatgtctctggaatggaaggaggaggaagtgagaacagatcattcgacaaagcagcattagtccgttgatcggtggaagaccactcgtcagtgttgagttgaatgtttgatcaataaaatacggcaatgctgtaagggttgttttttatgccattgataatacactgtactgttcagttgttgaactctatttcttagccatgccaagtgcttttcttattttgaataacattacagcaaaaagttgaaagacaaaaaaaaaaacccccgaacagagtgctttgggtcccaagcttctttagactgtgttcggcgttccccctaaatttctccccctatatctcactcacttgtcacatcagcgttctctttccccctatatctccacgctctacagcagttccacctatatcaaacctctataccccaccacaacaatattatatactttcatcttcaactaactcatgtaccttccaatttttttctactaataattatttacgtgcacagaaacttagcaaggagagagagagcgggaatttaaatgctcggcgttaggcttttagtccgctaggtggctagaccgaggttaggacgctagttcactaggggcctagtggtgttttaagacgtcacggtcacctgaagaaactatgtgctgtagtatagccgctgcccgctggctagctagctagttgagtcatttagcggcgatgattgagtaataatgtgtcacgcatcaccatgcatgggtggcagtgtcagtgtgagcaatgacctgaatgaacaattgaaatgaaaagaaaaaagtattgttccaaattaaacgttttaaccttttaataggtttatacaataattgatatatgttttctgtatatgtctaatttgttatcatccatttagatatagacaaaaaaaatctaagaactaaaacaaatgctaatttgaaatgaagggagtatatattgggataatgtcgatgagatccctcgtaatatcaccgacatcacacgtgtccagttaatgtatcagtgatacgtgtattcacatttgttgcgcgtaggcgtacccaacaattttgatcgactatcagaaagtcaacggaagcgagtcgacctcgagggggggccccggccgaagcttcggccggggcccatcgataacgagtatcggtccccattgacacatctactcctaacgctaacaacattcttcacttctagtgtatggcatcgacaattggtactttaatcttgggtcttcacttttacaactaaacaacccaaatataaatattatttgagtgggtttggtgttcatcagaacattcccatctttggtaatgctacctagcataaaagtgagctatcacgttgggcagcccattccatgcaatttttaccttcctcaaaaaaaatctttgatatatttatggtataataatttaaacttcacattgatcataattttttcagcaaataagttccataatttggtgtttgcaatatcgaaattgttactcatagggtccagttgatttaatgacattagtgttgttaagttcacatgcttcaaagaattctacatgtctacaatgctgcatttgtctgtaaaatttgggttcttgtaaaaaatacatgtgttgaatatttaccaaaaaaatataatgcgatatgactttgtgtgagcatgtttggacacagttacaagtttacttctaaacttatattatgttttgcttcgtgcaagtacaagtgatttgaatatccaaggccaaagcatgtgtccatcactatatcaaatcaacataccatatatgtatatactcaacaaaaagcacaaataatcacatctatgttataaacacacccccacacaaccaaacattaacattcaataggttgtgctaggacatcattgggatgatgaagtaatattgtattatctatgtattgaccaagcatgagtttaaaattacgatttgatgttttcagttatttatatgatgaacatagttcagaaatatatcgagataaatctcaatcaatatattgattatttctaggaaacacatgccggtatgagggcaccattgtcgagtacatcttaagtgagttaacggatcctctagagtcgacctgcaggcatgcccgcggatatcgatgggccccggccgaagcttcaagtttgtacaaaaaagttgaacgagaaacgtaaaatgatataaatatcaatatattaaattagattttgcataaaaaacagactacataatactgtaaaacacaacatatgcagtcactatgaaccaactacttagatggtattagtgacctgtagaattcgagctctagagctgcagggcggccgcgatatcccctatagtgagtcgtattacatggtcatagctgtttcctggcagctctggcccgtgtctcaaaatctctgatgttacattgcacaagataaaaatatatcatcatgaacaataaaactgtctgcttacataaacagtaatacaaggggtgttatgagccatattcaacgggaaacgtcgaggccgcgattaaattccaacatggatgctgatttatatgggtataaatgggctcgcgataatgtcgggcaatcaggtgcgacaatctatcgcttgtatgggaagcccgatgcgccagagttgtttctgaaacatggcaaaggtagcgttgccaatgatgttacagatgagatggtcagactaaactggctgacggaatttatgcctcttccgaccatcaagcattttatccgtactcctgatgatgcatggttactcaccactgcgatccccggaaaaacagcattccaggtattagaagaatatcctgattcaggtgaaaatattgttgatgcgctggcagtgttcctgcgccggttgcattcgattcctgtttgtaattgtccttttaacagcgatcgcgtatttcgtctcgctcaggcgcaatcacgaatgaataacggtttggttgatgcgagtgattttgatgacgagcgtaatggctggcctgttgaacaagtctggaaagaaatgcataaacttttgccattctcaccggattcagtcgtcactcatggtgatttctcacttgataaccttatttttgacgaggggaaattaataggttgtattgatgttggacgagtcggaatcgcagaccgataccaggatcttgccatcctatggaactgcctcggtgagttttctccttcattacagaaacggctttttcaaaaatatggtattgataatcctgatatgaataaattgcagtttcatttgatgctcgatgagtttttctaatcagaattggttaattggttgtaacactggcagagcattacgctgacttgacgggacggcgcaagctcatgaccaaaatcccttaacgtgagttacgcgtcgttccactgagcgtcagaccccgtagaaaagatcaaaggatcttcttgagatcctttttttctgcgcgtaatctgctgcttgcaaacaaaaaaaccaccgctaccagcggtggtttgtttgccggatcaagagctaccaactctttttccgaaggtaactggcttcagcagagcgcagataccaaatactgttcttctagtgtagccgtagttaggccaccacttcaagaactctgtagcaccgcctacatacctcgctctgctaatcctgttaccagtggctgctgccagtggcgataagtcgtgtcttaccgggttggactcaagacgatagttaccggataaggcgcagcggtcgggctgaacggggggttcgtgcacacagcccagcttggagcgaacgacctacaccgaactgagatacctacagcgtgagctatgagaaagcgccacgcttcccgaagggagaaaggcggacaggtatccggtaagcggcagggtcggaacaggagagcgcacgagggagcttccagggggaaacgcctggtatctttatagtcctgtcgggtttcgccacctctgacttgagcgtcgatttttgtgatgctcgtcaggggggcggagcctatggaaaaacgccagcaacgcggcctttttacggttcctggccttttgctggccttttgctcacatgttctttcctgcgttatcccctgattctgtggataaccgtattaccgcctttgagtgagctgataccgctcgccgcagccgaacgaccgagcgcagcgagtcagtgagcgaggaagcggaagagcgcccaatacgcaaaccgcctctccccgcgcgttggccgattcattaatgcagctggcacgacaggtttcccgactggaaagcgggcagtgagcgcaacgcaattaatacgcgtaccgctagccaggaagagtttgtagaaacgcaaaaaggccatccgtcaggatggccttctgcttagtttgatgcctggcagtttatggcgggcgtcctgcccgccaccctccgggccgttgcttcacaacgttcaaatccgctcccggcggatttgtcctactcaggagagcgttcaccgacaaacaacagataaaacgaaagg

SEQ ID NO: 14 - DNA, 26676 bp, synthetic construct
  misc_feature 1..26676: note = PHP90842
  source 1..26676: mol_type = other DNA
gtttacccgccaatatatcctgtcaaacactgatagtttaaactgaaggcgggaaacgacaatctgatcatgagcctagttagttaggggcagctaacgtcccctagctaactagttgctattaacctttagcctagtttagtgcggtcgcgctagtgaactagtctaatgggtgcctagcttagattagatccccgttcggcttagactaggttagtcggatagggctagtctagtggcttagcttggaactgttaagctaggctgttagtgcgggacttctaggctaacctattgacccctaacgcctagaacctaagaaacgctaaggacacctagctaactttggcgacgtccagaggtccgattccggctaactaactagcttaagcttgatatcgaattcctgcagccccggaccgggttacccggaccgaagcttgcatgcctgcagtgcagcgtgacccggtcgtgcccctctctagagataatgagcattgcatgtctaagttataaaaaattaccacatattttttttgtcacacttgtttgaagtgcagtttatctatctttatacatatatttaaactttactctacgaataatataatctatagtactacaataatatcagtgttttagagaatcatataaatgaacagttagacatggtctaaaggacaattgagtattttgacaacaggactctacagttttatctttttagtgtgcatgtgttctcctttttttttgcaaatagcttcacctatataatacttcatccattttattagtacatccatttagggtttagggttaatggtttttatagactaatttttttagtacatctattttattctattttagcctctaaattaagaaaactaaaactctattttagtttttttatttaataatttagatataaaatagaataaaataaagtgactaaaaattaaacaaataccctttaagaaattaaaaaaactaaggaaacatttttcttgtttcgagtagataatgccagcctgttaaacgccgtcgacgagtctaacggacaccaaccagcgaaccagcagcgtcgcgtcgggccaagcgaagcagacggcacggcatctctgtcgctgcctctggacccctctcgagagttccgctccaccgttggacttgctccgctgtcggcatccagaaattgcgtggcggagcggcagacgtgagccggcacggcaggcggcctcctcctcctctcacggcaccggcagctacgggggattcctttcccaccgctccttcgctttcccttcctcgcccgccgtaataaatagacaccccctccacaccctctttccccaacctcgtgttgttcggagcgcacacacacacaaccagatctcccccaaatccacccgtcggcacctccgcttcaaggtacgccgctcgtcctcccccccccccctctctaccttctctagatcggcgttccggtccatgcatggttagggcccggtagttctacttctgttcatgtttgtgttagatccgtgtttgtgttagatccgtgctgctagcgttcgtacacggatgcgacctgtacgtcagacacgttctgattgctaacttgccagtgtttctctttggggaatcctgggatggctctagccgttccgcagacgggatcgatttcatgattttttttgtttcgttgcatagggtttggtttgcccttttcctttatttcaatatatgccgtgcacttgtttgtcgggtcatcttttcatgcttttttttgtcttggttgtgatgatgtggtctggttgggcggtcgttctagatcggagtagaattctgtttcaaactacctggtggatttattaattttggatctgtatgtgtgtgccatacatattcatagttacgaattgaagatgatggatggaaatatcgatctaggataggtatacatgttgatgcgggttttactgatgcatatacagagatgctttttgttcgcttggttgtgatgatgtggtgtggttgggcggtcgttcattcgttctagatcggagtagaatactgtttcaaactacctggtgtatttattaattttggaactgtatgtgtgtgtcatacatcttcatagttacgagtttaagatggatggaaatatcgatctaggataggtatacatgttgatgtgggttttactgatgcatatacatgatggcatatgcagcatctattcatatgctctaaccttgagtacctatctattataataaacaagtatgttttataattattttgatcttgatatacttggatgatggcatatgcagcagctatatgtggatttttttagccctgccttcatacgctatttatttgcttggtactgtttcttttgtcgatgctcaccctgttgtttggtgttacttctgcaggtcgactttaacttagcctaggatccaacaatgccccagttcgacatcctctgcaagaccccccccaaggtgctcgtgaggcagttcgtggagaggttcgagaggccctccggcgagaagatcgccctctgcgccgccgagctcacctacctctgctggatgatcacccacaacggcaccgccattaagagggccaccttcatgtcatacaacaccatcatctccaactccctctccttcgacatcgtgaacaagtccctccagttcaaatacaagacccagaaggccaccatcctcgaggcctccctcaagaagctcatccccgcctgggagttcaccatcatcccctactacggccagaagcaccagtccgacatcaccgacatcgtgtcatccctccagcttcagttcgagtcctccgaggaggctgacaagggcaactcccactccaagaagatgctgaaggccctcctctccgagggcgagtccatctgggagatcaccgagaagatcctcaactccttcgagtacacctccaggttcactaagaccaagaccctctaccagttcctcttcctcgccaccttcatcaactgcggcaggttctcagacatcaagaacgtggaccccaagtccttcaagctcgtgcagaacaagtacctaggtttgtttctgcttctacctttgatatatatataataattatcattaattagtagtaatataatatttcaaatatttttttcaaaataaaagaatgtagtatatagcaattgcttttctgtagtttataagtgtgtatattttaatttataacttttctaatatatgaccaaaacatggtgatgcctaggtgtcatcatccagtgcctcgtgaccgagaccaagacctccgtgtccaggcacatctacttcttctccgctcgcggcaggatcgaccccctcgtgtacctcgacgagttcctcaggaactcagagcccgtgctcaagagggtgaacaggaccggcaactcctcctccaacaagcaggagtaccagctcctcaaggacaacctcgtgaggtcctacaacaaggccctcaagaagaacgccccctactccatcttcgccatcaagaacggccccaagtcccacatcggtaggcacctcatgacctccttcctctcaatgaagggcctcaccgagctcaccaacgtggtgggcaactggtccgacaagagggcctccgccgtggccaggaccacctacacccaccagatcaccgccatccccgaccactacttcgccctcgtgtcaaggtactacgcctacgaccccatctccaaggagatgatcgccctcaaggacgagactaaccccatcgaggagtggcagcacatcgagcagctcaagggctccgccgagggctccatcaggtaccccgcctggaacggcatcatctcccaggaggtgctcgactacctctcctcctacatcaacaggaggatctgagttaacctagacttgtccatcttctggattggccaacttaattaatgtatgaaataaaaggatgcacacatagtgacatgctaatcactataatgtgggcatcaaagttgtgtgttatgtgtaattactagttatctgaataaaagagaaagagatcatccatatttcttatcctaaatgaatgtcacgtgtctttataattctttgatgaaccagatgcatttcattaaccaaatccatatacatataaatattaatcatatataattaatatcaattgggttagcaaaacaaatctagtctaggtgtgttttgcgaatcctgtgaaaccaatctggatatccctgaaatttgaataaggttatgttgtgagtttatgaagttgtggtctagtgttgtattttgtttttcttaaggataatgcatctgtgtgctttgcttatctaaaatctaaataaagtgggtttctgcattgtgactttgcacaaacttcttttgttaaaatgaataagaaatcacatcaagaaaacagaacaagaccacaacgagaagacttgaaactctctgaaggtatataaacaaacagaacctagtaaattagagtcagcttattcaaaacttttagaccatcatcaagatcattataaacttggagtcaatgttgcggaaaccaatctgctatccccggaatttcaaataaagagactagagaattactttgaacacacttcttttattaaatcggatcacaaaaatccatcaaagacacaacagctacaaacacaaagagaagacttaaaacactgaagcagtaaacaaacagagagaaataaagtagaatcagcttattcaaagtgtgtaaactatcatcaaaagatacttaaaatctccataataacttagcctagcgaagttcctattccgaagttcctattctctagaaagtataggaacttcagatccaccgggatccccgatcatgcaaaaactcattaactcagtgcaaaactatgcctggggcagcaaaacggcgttgactgaactttatggtatggaaaatccgtccagccagccgatggccgagctgtggatgggcgcacatccgaaaagcagttcacgagtgcagaatgccgccggagatatcgtttcactgcgtgatgtgattgagagtgataaatcgactctgctcggagaggccgttgccaaacgctttggcgaactgcctttcctgttcaaagtattatgcgcagcacagccactctccattcaggttcatccaaacaaacacaattctgaaatcggttttgccaaagaaaatgccgcaggtatcccgatggatgccgccgagcgtaactataaagatcctaaccacaagccggagctggtttttgcgctgacgcctttccttgcgatgaacgcgtttcgtgaattttccgagattgtctccctactccagccggtcgcaggtgcacatccggcgattgctcactttttacaacagcctgatgccgaacgtttaagcgaactgttcgccagcctgttgaatatgcagggtgaagaaaaatcccgcgcgctggcgattttaaaatcggccctcgatagccagcagggtgaaccgtggcaaacgattcgtttaatttctgaattttacccggaagacagcggtctgttctccccgctattgctgaatgtggtgaaattgaaccctggcgaagcgatgttcctgttcgctgaaacaccgcacgcttacctgcaaggcgtggcgctggaagtgatggcaaactccgataacgtgctgcgtgcgggtctgacgcctaaatacattgatattccggaactggttgccaatgtgaaattcgaagccaaaccggctaaccagttgttgacccagccggtgaaacaaggtgcagaactggacttcccgattccagtggatgattttgccttctcgctgcatgaccttagtgataaagaaaccaccattagccagcagagtgccgccattttgttctgcgtcgaaggcgatgcaacgttgtggaaaggttctcagcagttacagcttaaaccgggtgaatcagcgtttattgccgccaacgaatcaccggtgactgtcaaaggccacggccgtttagcgcgtgtttacaacaagctgtaagagcttactgaaaaaattaacatctcttgctaagctgggggtggaacctagacttgtccatcttctggattggccaacttaattaatgtatgaaataaaaggatgcacacatagtgacatgctaatcactataatgtgggcatcaaagttgtgtgttatgtgtaattactagttatctgaataaaagagaaagagatcatccatatttcttatcctaaatgaatgtcacgtgtctttataattctttgatgaaccagatgcatttcattaaccaaatccatatacatataaatattaatcatatataattaatatcaattgggttagcaaaacaaatctagtctaggtgtgttttgcgaatgcgaccttcttatgtgcttctagtctccaaatgtggttgatagttattttgctctaagatcaacagtaatgaagtataaatcatcgttgtggtgtgctactcggttaattgagcattaacacacacaaacatgacgaggatggtataatctccaaaaatgtgtactttgttaggtgggaccctatagccttgattaatgtgctatgttaggcatgcctggaaacgtgtgacgcatatgttttgtgaacctgttgatattatatgtgcttttatattaccatattttattaaaatactaatatttattactagtaagatataacattctatctagcttaaaaactaaccataaatattccataataactagatttaccaaactaatatactaaatatacataataaatacaaaattaacaagacaataatcaatatttatgagcttaatatatttagacattatggttggtcgacgataatcatgctaacttttcgtaattgcttgattgaaatatgcttagaataatgcctctttgttctacatggcaaatagggaccattatggtgtaacaccctgggaaccacaaacaccccgaaatgctactaaactacacaactaaccttcatatataaaatttcgacagcatctcctttgaaaatttgcatagacgtggaagcaacagagtataaacagatatcatgataagaaaacatactagacattaataatctgctagaaatgggaagaatcctaacttgctcgagtcgatcgctatcaactttgtatagaaaagttgggccgaattcgagctcggtacggccagaatggcccggaccgaagcttgcatgcctgcagcccatccctcagccgcctttcactatcttttttgcccgagtcattgtcatgtgaaccttggcatgtataatcggtgaattgcgtcgattttcctcttataggtgggccaatgaatccgtgtgatcgcgtctgattggctagagatatgtttcttccttgttggatgtattttcatacataatcatatgcatacaaatatttcattacactttatagaaatggtcagtaataaaccctatcactatgtctggtgtttcattttatttgcttttaaacgaaaattgacttcctgattcaatatttaaggatcgtcaacggtgtgcagttactaaattctggtttgtaggaactatagtaaactattcaagtcttcacttattgtgcactcacctctcgccacatcaccacagatgttattcacgtcttaaatttgaactacacatcatattgacacaatattttttttaaataagcgattaaaacctagcctctatgtcaacaatggtgtacataaccagcgaagtttagggagtaaaaaacatcgccttacacaaagttcgctttaaaaaataaagagtaaattttactttggaccacccttcaaccaatgtttcactttagaacgagtaattttattattgtcactttggaccaccctcaaatcttttttccatctacatccaatttatcatgtcaaagaaatggtctacatacagctaaggagatttatcgacgaatagtagctagcatactcgaggtcattcatatgcttgagaagagagtcgggatagtccaaaataaaacaaaggtaagattacctggtcaaaagtgaaaacatcagttaaaaggtggtataaagtaaaatatcggtaataaaaggtggcccaaagtgaaatttactcttttctactattataaaaattgaggatgtttttgtcggtactttgatacgtcatttttgtatgaattggtttttaagtttattcgcttttggaaatgcatatctgtatttgagtcgggttttaagttcgtttgcttttgtaaatacagagggatttgtataagaaatatctttaaaaaaacccatatgctaatttgacataatttttgagaaaaatatatattcaggcgaattctcacaatgaacaataataagattaaaatagctttcccccgttgcagcgcatgggtattttttctagtaaaaataaaagataaacttagactcaaaacatttacaaaaacaacccctaaagttcctaaagcccaaagtgctatccacgatccatagcaagcccagcccaacccaacccaacccaacccaccccagtccagccaactggacaatagtctccacacccccccactatcaccgtgagttgtccgcacgcaccgcacgtctcgcagccaaaaaaaaaaaaagaaagaaaaaaaagaaaaagaaaaaacagcaggtgggtccgggtcgtgggggccggaaacgcgaggaggatcgcgagccagcgacgaggccggccctccctccgcttccaaagaaacgccccccatcgccactatatacatacccccccctctcctcccatccccccaaccctaccaccaccaccaccaccacctccacctcctcccccctcgctgccggacgacgagctcctcccccctccccctccgccgccgccgcgccggtaaccaccccgcccctctcctctttctttctccgttttttttttccgtcacggtctcgatctttggccttggtagtttgggtgggcgagaggcggcttcgtgcgcgcccagatcggtgcgcgggaggggcgggatctcgcggctggggctctcgccggcgtggatcaggcccggatctcgcggggaatggggctctcggatgtagatctgcgatccgccgttgttgggggagatgatggggggtttaaaatttccgccatgctaaacaagatcaggaagaggggaaaagggcactatggtttatatttttatatatttctgctgcttcgtcaggcttagatgtgctagatctttctttcttctttttgtgggtagaatttgaatccctcagcattgttcatcggtagtttttcttttcatgatttgtgacaaatgcagcctcgtgcggagcttttttgtaggtagaaggatccgcccatggcggccaatgcgggcggcggtggagcgggaggaggcagcggcagcggcagcgtggctgcgccggcggtgtgccgccccagcggctcgcggtggacgccgacgccggagcagatcaggatgctgaaggagctctactacggctgcggcatccggtcgcccagctcggagcagatccagcgcatcaccgccatgctgcggcagcacggcaagatcgagggcaagaacgtcttctactggttccagaaccacaaggcccgcgagcgccagaagcgccgcctcaccagcctcgacgtcaacgtgcccgccgccggcgcggccgacgccaccaccagccaactcggcgtcctctcgctgtcgtcgccgccgccttcaggcgcggcgcctccctcgcccaccctcggcttctacgccgccggcaatggcggcggatcggctgtgctgctggacacgagttccgactggggcagcagcggcgctgctatggccaccgagacatgcttcctgcaggactacatgggcgtgacggacacgggcagctcgtcgcagtggccacgcttctcgtcgtcggacacgataatggcggcggccgcggcgcgggcggcgacgacgcgggcgcccgagacgctccctctcttcccgacctgcggcgacgacggcggcagcggtagcagcagctacttgccgttctggggtgccgcgtccacaactgccggcgccacttcttccgttgcgatccaacagcaacaccagctgcaggagcagtacagcttttacagcaacagcaacagcacccagctggccggcaccggcaaccaagacgtatcggcaacagcagcagcagccgccgccctggagctgagcctcagctcatggtgctccccttaccctgctgcagggagtatgtgagagcaacgcgagctgccactgctcttcactgatgtctctggaatggaaggaggaggaagtgagaacagatcattcgacaaagcagcattagtccgttgatcggtggaagaccactcgtcagtgttgagttgaatgtttgatcaataaaatacggcaatgctgtaagggttgttttttatgccattgataatacactgtactgttcagttgttgaactctatttcttagccatgccaagtgcttttcttattttgaataacattacagcaaaaagttgaaagacaaaaaaaaaaacccccgaacagagtgctttgggtcccaagcttctttagactgtgttcggcgttccccctaaatttctccccctatatctcactcacttgtcacatcagcgttctctttccccctatatctccacgctctacagcagttccacctatatcaaacctctataccccaccacaacaatattatatactttcatcttcaactaactcatgtaccttccaatttttttctactaataattatttacgtgcacagaaacttagcaaggagagagagagcgggaatttaaatgctcggcgttaggcttttagtccgctaggtggctagaccgaggttaggacgctagttcactaggggcctagtggtgttttaagacgtcacggtcaccacgcgtggaccgaagcttgcatgcctgcagtgcagcgtgacccggtcgtgcccctctctagagataatgagcattgcatgtctaagttataaaaaattaccacatattttttttgtcacacttgtttgaagtgcagtttatctatctttatacatatatttaaactttactctacgaataatataatctatagtactacaataatatcagtgttttagagaatcatataaatgaacagttagacatggtctaaaggacaattgagtattttgacaacaggactctacagttttatctttttagtgtgcatgtgttctcctttttttttgcaaatagcttcacctatataatacttcatccattttattagtacatccatttagggtttagggttaatggtttttatagactaatttttttagtacatctattttattctattttagcctctaaattaagaaaactaaaactctattttagtttttttatttaataatttagatataaaatagaataaaataaagtgactaaaaattaaacaaataccctttaagaaattaaaaaaactaaggaaacatttttcttgtttcgagtagataatgccagcctgttaaacgccgtcgacgagtctaacggacaccaaccagcgaaccagcagcgtcgcgtcgggccaagcgaagcagacggcacggcatctctgtcgctgcctctggacccctctcgagagttccgctccaccgttggacttgctccgctgtcggcatccagaaattgcgtggcggagcggcagacgtgagccggcacggcaggcggcctcctcctcctctcacggcaccggcagctacgggggattcctttcccaccgctccttcgctttcccttcctcgcccgccgtaataaatagacaccccctccacaccctctttccccaacctcgtgttgttcggagcgcacacacacacaaccagatctcccccaaatccacccgtcggcacctccgcttcaaggtacgccgctcgtcctcccccccccccctctctaccttctctagatcggcgttccggtccatgcatggttagggcccggtagttctacttctgttcatgtttgtgttagatccgtgtttgtgttagatccgtgctgctagcgttcgtacacggatgcgacctgtacgtcagacacgttctgattgctaacttgccagtgtttctctttggggaatcctgggatggctctagccgttccgcagacgggatcgatttcatgattttttttgtttcgttgcatagggtttggtttgcccttttcctttatttcaatatatgccgtgcacttgtttgtcgggtcatcttttcatgcttttttttgtcttggttgtgatgatgtggtctggttgggcggtcgttctagatcggagtagaattctgtttcaaactacctggtggatttattaattttggatctgtatgtgtgtgccatacatattcatagttacgaattgaagatgatggatggaaatatcgatctaggataggtatacatgttgatgcgggttttactgatgcatatacagagatgctttttgttcgcttggttgtgatgatgtggtgtggttgggcggtcgttcattcgttctagatcggagtagaatactgtttcaaactacctggtgtatttattaattttggaactgtatgtgtgtgtcatacatcttcatagttacgagtttaagatggatggaaatatcgatctaggataggtatacatgttgatgtgggttttactgatgcatatacatgatggcatatgcagcatctattcatatgctctaaccttgagtacctatctattataataaacaagtatgttttataattattttgatcttgatatacttggatgatggcatatgcagcagctatatgtggatttttttagcactgccttcatacgctatttatttgcttggtactgtttcttttgtcgatgctcaccctgttgtttggtgttacttctgcaggtcgactttaacttagcctaggatccatggccactgtgaacaactggctcgctttctccctctccccgcaggagctgccgccctcccagacgacggactccacactcatctcggccgccaccgccgaccatgtctccggcgatgtctgcttcaacatcccccaagattggagcatgaggggatcagagctttcggcgctcgtcgcggagccgaagctggaggacttcctcggcggcatctccttctccgagcagcatcacaaggccaactgcaacatgatacccagcactagcagcacagtttgctacgcgagctcaggtgctagcaccggctaccatcaccagctgtaccaccagcccaccagctcagcgctccacttcgcggactccgtaatggtggcttcctcggccggtgtccacgacggcggtgccatgctcagcgcggccgccgctaacggtgtcgctggcgctgccagtgccaacggcggcggcatcgggctgtccatgattaagaactggctgcggagccaaccggcgcccatgcagccgagggtggcggcggctgagggcgcgcaggggctctctttgtccatgaacatggcggggacgacccaaggcgctgctggcatgccacttctcgctggagagcgcgcacgggcgcccgagagtgtatcgacgtcagcacagggtggagccgtcgtcgtcacggcgccgaaggaggatagcggtggcagcggtgttgccggcgctctagtagccgtgagcacggacacgggtggcagcggcggcgcgtcggctgacaacacggcaaggaagacggtggacacgttcgggcagcgcacgtcgatttaccgtggcgtgacaaggcatagatggactgggagatatgaggcacatctttgggataacagttgcagaagggaagggcaaactcgtaagggtcgtcaagtctatttaggtggctatgataaagaggagaaagctgctagggcttatgatcttgctgctctgaagtactggggtgccacaacaacaacaaattttccagtgagtaactacgaaaaggagctcgaggacatgaagcacatgacaaggcaggagtttgtagcgtctctgagaaggaagagcagtggtttctccagaggtgcatccatttacaggggagtgactaggcatcaccaacatggaagatggcaagcacggattggacgagttgcagggaacaaggatctttacttgggcaccttcagcacccaggaggaggcagcggaggcgtacgacatcgcggcgatcaagttccgcggcctcaacgccgtcaccaacttcgacatgagccgctacgacgtgaagagcatcctggacagcagcgccctccccatcggcagcgccgccaagcgcctcaaggaggccgaggccgcagcgtccgcgcagcaccaccacgccggcgtggtgagctacgacgtcggccgcatcgcctcgcagctcggcgacggcggagccctggcggcggcgtacggcgcgcactaccacggcgccgcctggccgaccatcgcgttccagccgggcgccgccagcacaggcctgtaccacccgtacgcgcagcagccaatgcgcggcggcgggtggtgcaagcaggagcaggaccacgcggtgatcgcggccgcgcacagcctgcaggacctccaccacctgaacctgggcgcggccggcgcgcacgactttttctcggcagggcagcaggccgccgccgctgcgatgcacggcctgggtagcatcgacagtgcgtcgctcgagcacagcaccggctccaactccgtcgtctacaacggcggggtcggcgacagcaacggcgccagcgccgtcggcggcagtggcggtggctacatgatgccgatgagcgctgccggagcaaccactacatcggcaatggtgagccacgagcaggtgcatgcacgggcctacgacgaagccaagcaggctgctcagatggggtacgagagctacctggtgaacgcggagaacaatggtggcggaaggatgtctgcatgggggactgtcgtgtctgcagccgcggcggcagcagcaagcagcaacgacaacatggccgccgacgtcgggcatggcggcgcgcagctcttcagtgtctggaacgacacttaagcgtacctagtggtacctgacatcttatagtctgcaacctctcgtgtctgaattcctatctttatcaagtgttattgcttccacgactataggacagctttcgtcgaaagcttttgctcatgtgatctcgaaggattcatctagtctgatttttcgtgacttgtatcggttttattggattcatccaacatatatcaataaaaaatgagttgtgtttcctttcttcctagttcagttaaaattatttccctcctgcgcttgtgctgtaattgtctgtgtacctgttgtttgtgactgtgttagttcccttggatatgatttcgtatttgatatgtacatggagatagcttagcttcattattggagtatgaagttagtatgacatagtcactctcctggaaaattgacactgcaaaccatatttttattctgaaccacaaatcctagtcagtccgctggcatatgccgtccgtttgctgaatccagaacgtgggtttggagatgtacggctgagatgcctctatgcgaaggggatttcgtggtgaaacgagatgggagtagagcaacgcccgtggaagatgcttcaaacttccacacttttgagcaacgatcggcagtagtaaggtagacgatttcaagatcaaagcatatgaagataaacaacatcaacaacaaaatttgttggggttctatagagagaaacagagctacatacatacactgttttgtatctaccatctgagatgatgaaaagatgaaaaactaaagaatgccccggcgccaacgccaggacacgccgcgcgcgcgtcacccgagccatctcttgacccagccggcgctgtatatttacacacgttgcagcatcgatcaccacctgttcgatcgcgtcgccgtcaccggcgcgccgcgacttattgaactagtctagggcgcggctaacaacctagcttagattgccttgtctaaacccttaggctaacgcgccactctagaaggccgatctcccccgaacgcgccagatcttgaagaaactatgtgctgtagtatagccgctgcccgctggctagctagctagttgagtcatttagcggcgatgattgagtaataatgtgtcacgcatcaccatgcatgggtggcagtgtcagtgtgagcaatgacctgaatgaacaattgaaatgaaaagaaaaaagtattgttccaaattaaacgttttaaccttttaataggtttatacaataattgatatatgttttctgtatatgtctaatttgttatcatccatttagatatagacaaaaaaaatctaagaactaaaacaaatgctaatttgaaatgaagggagtatatattgggataatgtcgatgagatccctcgtaatatcaccgacatcacacgtgtccagttaatgtatcagtgatacgtgtattcacatttgttgcgcgtaggcgtacccaacaattttgatcgactatcagaaagtcaacggaagcgagtcgacctcgagggggggccccggccgaagcttcggccggggcccatcgataacgagtatcggtccccattgacacatctactcctaacgctaacaacattcttcacttctagtgtatggcatcgacaattggtactttaatcttgggtcttcacttttacaactaaacaacccaaatataaatattatttgagtgggtttggtgttcatcagaacattcccatctttggtaatgctacctagcataaaagtgagctatcacgttgggcagcccattccatgcaatttttaccttcctcaaaaaaaatctttgatatatttatggtataataatttaaacttcacattgatcataattttttcagcaaataagttccataatttggtgtttgcaatatcgaaattgttactcatagggtccagttgatttaatgacattagtgttgttaagttcacatgcttcaaagaattctacatgtctacaatgctgcatttgtctgtaaaatttgggttcttgtaaaaaatacatgtgttgaatatttaccaaaaaaatataatgcgatatgactttgtgtgagcatgtttggacacagttacaagtttacttctaaacttatattatgttttgcttcgtgcaagtacaagtgatttgaatatccaaggccaaagcatgtgtccatcactatatcaaatcaacataccatatatgtatatactcaacaaaaagcacaaataatcacatctatgttataaacacacccccacacaaccaaacattaacattcaataggttgtgctaggacatcattgggatgatgaagtaatattgtattatctatgtattgaccaagcatgagtttaaaattacgatttgatgttttcagttatttatatgatgaacatagttcagaaatatatcgagataaatctcaatcaatatattgattatttctaggaaacacatgccggtatgagggcaccattgtcgagtacatcttaagtgagttaacggatcctctagagtcgacctgcaggcatgcccgcggatatcgatgggccccggccgaagcttcaagtttgtacaaaaaagcaggctccggccagaatggcccggaccgggttaccgaattcgagctcggtaccctggttcacaaactcaatacaacacacagtggagtagggtattacgctccggcggcccgaaccactctaaatccttgtgtcctcgtgtgctcttccaccattaatgactgtaattgcagggacacgaagagttgtagcgcttttgccaacaagatccgctatatgctagtagagtggaacctgcacagcaacaagcatccaataatctgagaataagaattatgtgtggtgatggttctcatctctgcaactcgccattttcgcgagagaaccaaatccaagttggtgaagatcatgatttgggctcatgggctggcatagtagctattacctttgcaattgtggttcgaatctatccgatattctccttttcagggagagctaatgcttatgcttattgggtattttggtttgacactgcttcacgcccaaaaaaaggcaactatgtctgagttggatatggcccaaaaaaaggcagctatgtctgagttggatatggaagtcttctttcgtttagggtgaagtaagaccaagctcatgagcttattatcttaggtcggaacaaattagttgataggcatggcacatttatcaaattataatgattttaacagaaaagcaacacctctttttcagcagcaccagctttgcaagctgcaattgacactccaagcatagtatttgctccaaactcagcctgcatttcgcacaatatcatatctatttccatttggataaaatatattttccagaaatatgggaacagaatcaagatacagaaaaaagttgtggtagtagtggtaagtggaaacacaagtacagtgaaaagatagcattatttctgaacagtcaaattaaccgaaataagtagtatcacatactgcccctaaattgactacacccaatgtaaagaattgcttgagcatattgagccatcagttgtttgtttgtgtaacggatttgacaatgcagagttcaggagcaaaaaaccgcaaaggagagaaagagggaaaggatctcctagtatcccaccttgtggcgcgccctgtcaagtgcatgatggcctggtcgatctgcgtctgctgctgcggttccatcccaacgagtgcctccgacaccttgtcgttgatcacccgcaccgcgtaggcgacccccctggcgaggaacttccgcctctcggaggccccggccgcgtcggcggcggcgccctcgagcgcgcccacgctagccgtagatgctcggtgcacggccttgttggtgtgcaactcgacctcaacggccggtgcgctacgcccgtcaaggatctggcgcgcccgcaccctcgtgatcacggtgggcgcctcccgcctcatgtggccgacgatgaaaagcgccgggttaggggccttggcgcgcaccgccgtattcagggcctcctcgctcttgcgcgagagcaggtgcttccccaggtactcctgcactgacaaggctgccacagcggtggaatttgtcctcacgacttcgccacgtcgtcctcacctccctggcttcccacgactccgccgtatcgaggtgctcggtgggtcgtcttaatccgaagtccgaactaggaagacgagacagagaggtctgaggaatgggcctcgtttgatgttgagctgaattatttttccagcataagcccaggtcttggtccatgaacaaaattactagaaacccagcccagtactacgatctaaaagagggactgccactggatagctctctctagcattctccacgctccaatacagcggcgtcgtgtctatccgggtctatccgcgaacacgtgagaactctccagaaactgctttctcctccacttcatctctctcgctttccctctataaaaagaccccttctaggaattgagggagacagcaagcaccaagcagcgatccgaagctcaatcaattcactcaaacctcttccccaaatcttcgattagatcttcgttgacaagaagactagaaccgaacctgacatgtccaacctgctcacggttcaccagaaccttccggctcttccagtggacgcgacgtccgatgaagtcaggaagaacctcatggacatgttccgcgacaggcaagcgttcagcgagcacacctggaagatgctgctctccgtctgccgctcctgggctgcatggtgcaagctgaacaacaggaagtggttccccgctgagcccgaggacgtgagggattaccttctgtacctgcaagcgcgaggtttgtttctgcttctacctttgatatatatataataattatcattaattagtagtaatataatatttcaaatatttttttcaaaataaaagaatgtagtatatagcaattgcttttctgtagtttataagtgtgtatattttaatttataacttttctaatatatgaccaaaacatggtgatgcctaggtctggcagtgaagaccatccagcaacaccttggacaactgaacatgcttcacaggcgctccggcctcccgcgccccagcgactcgaacgccgtgagcctcgtcatgcgccgcatcaggaaggaaaacgtcgatgccggcgaaagggcaaagcaggccctcgcgttcgagaggaccgatttcgaccaggtccgcagcctgatggagaacagcgacaggtgccaggacattaggaacctggcgttcctcggaattgcatacaacacgctcctcaggatcgcggaaattgcccgcattcgcgtgaaggacattagccgcaccgacggcggcaggatgcttatccacattggcaggaccaagacgctcgtttccaccgcaggcgtcgaaaaggccctcagcctcggagtgaccaagctcgtcgaacgctggatctccgtgtccggcgtcgcggacgacccaaacaactacctcttctgccgcgtccgcaagaacggggtggctgcccctagcgccaccagccaactcagcacgagggccttggaaggtattttcgaggccacccaccgcctgatctacggcgcgaaggatgacagcggtcaacgctacctcgcatggtccgggcactccgcccgcgttggagctgctagggacatggcccgcgccggtgtttccatccccgaaatcatgcaggcgggtggatggacgaacgtgaacattgtcatgaactacattcgcaaccttgacagcgagacgggcgcaatggttcgcctcctggaagatggtgactgaggtaccggctccacgtagtcgttatcgacgatcggcgacactactggagttggagcaacgtctagttccagcaataatataatgcaatattactgtagtagtagtagtatactataggacccctcctagctagcatgcggacatgctcttgtgatcttgtctcgggtccagacttcaataaagccatcttggcattatatgtactatacaaaaaagattatcactgctttctctcgatcgcaaatcatcctgtttttttttttggcaaaaagttcagcgtttctttctctctctctgactaccaaactgttgacagaaagaaaaaggtcaaaggagtttgcgaacgtacagtacagacataaaaaaacaaacacaagcagaaatatcaaatactgtgtttggttgttgtggcacgttgggcgtggtggaactgcggcacagttcttcgtgtagttttgcacaacttctgcctaaagttcgcactgatttcttgcactagatattcggggacaccacagctacctgcgcgcgtataaggtaaacaggccctaataacaaccgtctcaatattgtgtgatgtgtttgaggtcagatttgatcaatcaagaacatcttaacctataagatataggtaaataacaagccatctctttaacagtgaacatgtgtctctcaaacatattaaataatattggtgcggttagtgtgaagaaagtactgttagctgatttgttgtgaaagaaaaatattactgaatgactaacatctcttccaaactaaatgtttgcgtgtgaaataatggatattgtcggttccaaactaaatgtttgcgtgtgaaataatggatattgtcggatagagcacaaggtgctcaccttctgcacccaatataatttcactcaagaacgagcaggatatcgatcgacgatctcaaatgagcaacacgagctcagcataatatcgtgagccgtgatccgtcgccccgctaacttaagtataacttcgtatagcatacattatacgaagttattcggtccgggatctcccgggcacccagctttcttgtacaaagtggccgttaacggatcggccagaatggcccggaccgggttaccctgcccttaaggccaattgttcaagattcattcaacaattgaaacatctcccatgattaaatcagtataaggttgctatggtcttgcttgacaaagtttttttttgagggaatttcaactaaatttttgagtgaaactatcaaatactgattttaaaaaatttttataaaaggaagcgcagagataaaaggccatctatgctacaaaagtacccaaaaatgtaatcctaaagtatgaattgcattttttttttgtttggacgaaaggaaaggagtattaccacaagaatgatatcatcttcatatttagatcttttttgggtaaagcttgagattctctaaatatagagaaatcagaagaaaaaaaaaccgtgttttggtggttttgatttctagcctccacaataactttgacggcgtcgacaagtctaacggacaccaagcagcgaaccaccagcgccgagccaagcgaagcagacggccgagacgttgacaccttcggcgcggcatctctcgagagttccgctccggcgctccacctccaccgctggcggtttcttattccgttccgttccgcctcctgctctgctcctctccacaccacacggcacgaaaccgttacggcaccggcagcacccagcacgggagaggggattcctttcccaccgttccttccctttccgccccgccgctataaatagccagccccatccccagcttttttccccaatctcatctcctctctcctgttgttcggagcacacgcacaatccgatcgatccccaaatccccttcgtctctcctcgcgagcctcgtggatcccagcttcaaggtacggcgatcgatcatcccccctccttctctctaccttcttttctctagactacatcggatggcgatccatggttagggcctgctagtttcccttcctgttttgtcgatggctgcgaggcacaatagatctgatggcgttatgacggctaacttgtcatgttgttgcgatttatagtccctttaggagatcagtttaatttctcggatggttcgagatcggtggtccatggttagtaccctaagatccgcgctgttagggttcgtagatggaggcgacctgttctgattgttaacttgtcagtacctgggaaatcctgggatggttctagctcgtccgcagatgagatcgatttcatgatcctctgtatcttgtttcgttgcctaggttccgtctaatctatccgtggtatgatgtagatgttttgatcgtgctaactacgtcttgtaaagttaattgtcaggtcataatttttagcatgcctttttttttgtttggttttgtctaattgggctgtcgttctagatcagagtagaagactgttccaaactacctgctggatttattgaacttggatctgtatgtgtgtcacatatcttcataaattcatgattaagatggattgaaatatcttttatctttttggtatggatagttctatatgttggtgtggctttgttagatgtatacatgcttagatacatgaagcaacgtgctgctactgtttagtaattgctgttcatttgtctaataaacagataaggatatgtatttatgttgctgttggttttgctggtactttgttggatacaaatgcttcaatacagaaaacagcatgctgctacgatttaccatttatctaatcttatcatatgtctaatctaataaacaaacatgcttttaaattatcttcatatgcttggatgatggcatacacagcggctatgtgtggttttttaaatacccagcatcatgggcatgcatgacactgctttaatatgctttttatttgcttgagactgtttcttttgtttatactgaccctttagttcggtgactcttccgcaggtcgactttaacttagcctagtgatcatggcctcctccgagaacgtcatcaccgagttcatgcgcttcaaggtgcgcatggagggcaccgtgaacggccacgagttcgagatcgagggcgagggcgagggccgcccctacgagggccacaacaccgtgaagctgaaggtgacgaagggcggccccctgcccttcgcctgggacatcctgtccccccagttccagtacggctccaaggtgtacgtgaagcaccccgccgacatccccgactacaagaagctgtccttccccgagggcttcaagtgggagcgcgtgatgaacttcgaggacggcggcgtggcgaccgtgacccaggactcctccctgcaggacggctgcttcatctacaaggtgaagttcatcggcgtgaacttcccctccgacggccccgtgatgcagaagaagaccatgggctgggaggcctccaccgagcgcctgtacccccgcgacggcgtgctgaagggcgagacccacaaggccctgaagctgaaggacggcggccactacctggtggagttcaagtccatctacatggccaagaagcccgtgcagctgcccggctactactacgtggacgccaagctggacatcacctcccacaacgaggactacaccatcgtggagcagtacgagcgcaccgagggccgccaccacctgttcctgtagtctggtaccgtttttctcagacagttttctaaaaaaagggcgtttctggggaagttcgagatggttcgtaaggtgttactggctcctgtgaaccaatacatgatactgccatgataagggttataattagtcaagcagagtaagaagaaacaacagtagcagtgactccgattcctgaagatgagtcatatttgtcttgtgctcctgctgtatgaaatggatcgcatgtgtatattcgtcgccgcgccgcactggtgtaacctgttgcctcagagtttgcttttagctggttctgttttaaaaataagtactgttttttggttggctgcaagccattctgaacttcagtttaccaattgtttttatgttgtggttgaatattttaattttttatttaatgtttggttctttttttatatatatttgcaaaaatgatacaagtggtcaagttttcatatagtatgggctctatttcctagagctctacctctaggaacgaattttgtggaggttttcttttggctagttaggcaaagtccccatatcttgcaggctaaatcaagaagaagctctgtcaaacagttttttttactgaaaagtgattaaagagtagtttctcctagatcacttcagagtttatcctagagaatcatgggaatcaaattcagttagaggatcatttcttacaaagaatcaactttcgtagagaatctaaagcagaaagagctttgacaaacttacccttagagcaattccaacattctcgcgtgagtttcttcgcgccgttgttttgcggtgacttcatctggacgtcccgcgacatagagacgcttgtatttatcatgagagcttgtgtggtcatacacaatataattgttaaagatgaaagagatgtggaccttaatgagcgattcgactttgatggtgaaaatgtgcaaccttctcatggtatttctactcgcacactagctgaatttattgaagctcataaaaagatccgagacaaagaaatacattttcaattgaaagaagacctaatcaagcacttatggtgtacacccgggcaactttattatacaaagttgatagatcctacaggccagaatggcctctggattcagcggcctagaaggccgaagtacttggtcttcctaatatcggaccgaggaccgattaaactttaattcggtccgtcaatattcaccgaagcgactaattaactagctgtcccacggcctaactagcacttaatcccctagcctaacctaagagcgctaatctaggctagtggtcacttagggctttaaggctagcgtatacgaagttcctattccgaagttcctattcttcaaaaagtataggaacttctgtacacctgagcctaactaactaggacgtcccgaggtccgattccgggctaattaacacctagctcgccactcgactaattagggactaagcctagcgcttagccgttaaaacctagcacaccctaagcacccttagttaggttcccctcttaattaagccctagtgagcccctaagttaaggggacgctaagagccccctaacctagtattcggctagaggcgaactaggctaaacacctaagcgcacctctttaagctagatcgctagggggctaggctagagcttcgctagattagtctaagggcagctaactaactaggggcgcgccaataccgaattcattccgattaatcgtggcctcttgctcttcaggatgaagagctatgtttaaacgtgcaagcgctactagacaattcagtacattaaaaacgtccgcaatgtgttattaagttgtctaagcgtcaatttgtttacaccacaatatatcctgcca

SEQ ID NO: 15 - DNA, 17152 bp, synthetic construct
  misc_feature 1..17152: note = PHP92365
  source 1..17152: mol_type = other DNA
gtttacccgccaatatatcctgtcaaacactgatagtttaaactgaaggcgggaaacgacaatctgatcatgagcggagaattaagggagtcacgttatgacccccgccgatgacgcgggacaagccgttttacgtttggaactgacagaaccgcaacgttgaaggagccactcagcaagctggtacgattgtaatacgactcactatagggcgaattgagcgctgtttaaacgctcttcaactggaagagcggttacgctgtttaaacgctcttcaactggaagagcggttactaccggttcactagctagctgctaatcgagctagttaccctatgaggtgacatgaagcgctcacggttactatgacggttagcttcacgactgttggtggcagtagcgtacgacttagctatagttccggacttacccttaagcgatttaaatctgcggttaccgaattcgagctcggtacctagtacccttgtacttttggtttcacctgcatagagaaaacccacaagaatatgacagtctgatttgtcagtctcattctcaagcaacatttctctatccgttactttcatggtgaataacacaatccatcatcaatactttgtgttactcagaaactgaaagttattccgagtcttgcatatctttggacctactcgtttttctaccattattgctgattgttaagctctcgctacttgaatcggcattgttggagtgggaaggttcaaaaaattggagttatgactagttgtctctttctatgtacgatggagaaaatgaataaacaactgagaaaatggctcttgtttagttgatgatgctcttaagctttccactggttgccatatatgatttgggcatttcactttgatcttaatgggccttgtaaagcccaagactcatgattatctttagttgatgctcttaattaggtgtgggcaaataattcaaactgtatgtacccgaccaaaaccaaagcaaaaataatcgaaccaaaccgaaaatttaaaaataaccgaatgaaaactaaatcctataactgaaagaactgaaaccgaatcaaaatatttaatgtaaccaaaaatatccgaaatataattatattgtcaaaaatattaataatttctagattaaataattaaaaatacttaaaaatttatataaaatagtaaaaatactcgaaaataaccacaaatattcaaaaacaaccgaaatatcccaaaatattcaaagcaaaataaccgaatggataccaaattttaaaaccgaaaaaactggaacaaaaccaaaatcgaaccaaaatttcaaaaatcgaataaatactaaactttagaacaaaaaaaaacgataaccgaatgtatacgaaccaaagccgaattagataaccgaacgtccaggactactcttaatctttccgccacttatgatttgggctattactttgtttataatgagccttttcaagctcaagttcatgattgtccgtgagatgagaaactgacttgttggattcgaaaccctagctagtattggttaatacttaatacataaatgacctgcattgacatcatcatccaagaaaataaaaattgtatgcttgagatatttagttttcctagctaggttttctttattttagtaccgaatctttaggtgtgccacgttaatttagacccattttttcatacttaccaactgagtctagtttaatcatgactataatcgtataaaatgattcagtcgacgtcattgcgaacgtatataaaatcatccaaattgacgtcattccaaagaggtaagcatgcttatctaagagtccgagcatactaaacaagacgacattttatttgcactccaaatcaaattttgtattgcctaaagaaaaacaatcaaactcaagtttcttaaaattaatttcattcaaactaatcactttcaatatctcacatattattcatgccatttctatttgtctaaacatgatttaaaaaaaaaagtaaaatacaaagattactatgcaaaaactctataaaaaaaaattcaaatttcttatttatttgtgacatcaaattttcaaaataatttttttaattatcggttgatccggtcagtcgataaaaacataaactttcagcgaccgttaaaactttcctactaccgatttagagaaaatcttagcttgaaacgtaattgtaacctgccttcatgcaagtcgcaagatatgtcatcctaagttgtatatgttttctcaaaagatgtatttacttgagaaaatacgtttcaacgttgatggacaaccaattaagaatcaagcacctttcgtaatcaatttaggcttatcgtctaaggtatactgatttacgacagttgactagacttataaggaacaaaataatagaatagtttctaaacacttcacctaatcatagagactaagatggtaattcgtaaacgacaaagcctagtgacactgtccattgtaaaattccacatcatattagtattaaacatatacatgtagtttcctgaacacatgtagtatcaaacacacttcgtggcttcttcctcgaaacctgcggccgcgctatagttccggacttacccttaagataacttcgtatagcatacattatacgaagttatgggcccacgcgtgaagagcggttaccagagctggtcacctttgtccaccaagatggaactgtcttcggccagaatggccatctggattcagcaggcctagaaggccatttatcgctatcaactttgtatagaaaagttgggccagaatggcccggaccgggttaccgaattcttaccctagctccctgcggctgttacgcggtcccccatcaatcttctgttcttgcggttgtagcctgtgtaacagtgctagagtatgtatgataaataggttttaagtctgcttacatgacattttttattgtggaagagacatataaaaattagagagagtggttctcatgcaacggcggacggcccggtgctaaaagagcttcaagacaaaataatgaaacaggaagagagtagatttatctaagagccaactttattatatgaatgtgtttattgttggctttagatgatatggtaaggagttagagctaataatagataggctctattattattattattaattaaactcgctctaaggaggaaagtgggaggaagggacgaggacgaagactactggaagcatcgtgcatggatgatggatgtggtgtctcttaatgtaggtggccggaggatgtacgtgttaattgcgcgataagcactcagatccaaccgcaaactacctccacactgacacactgatagagagaaagagagacctccgacgactgccgccgcagatgagccacgtacgtatacgacgtctgccggccggctcaggctgccgccatcaccctgctcgaaagtcgcgttaggcggcgccagctacataggagtatctagtctagccagttagtatactactactgcgctgatgatgaattaactctgcatagatactgtacttgcctccctccaacacccaaccacctcctgctcggctcttaataacttggacacggatcgatgccatccaaggaagaacacgacgacgacgacggaacatccaccatgcaagcttgcatccatacgccgatacgcgtgcatccatccatccaccattatttccattttccaccgatcacacgtacacaggcctatttaaggagcgacatcccactgcaactctcctcaccactcatcaccagctagctctagcaaagcacttgccatctaccgaccgccgcattccaaacagcccgacgagctagcagagcggcaggcacctccctcctcaaggaacccatggcggccaatgcgggcggcggtggagcgggaggaggcagcggcagcggcagcgtggctgcgccggcggtgtgccgccccagcggctcgcggtggacgccgacgccggagcagatcaggatgctgaaggagctctactacggctgcggcatccggtcgcccagctcggagcagatccagcgcatcaccgccatgctgcggcagcacggcaagatcgagggcaagaacgtcttctactggttccagaaccacaaggcccgcgagcgccagaagcgccgcctcaccagcctcgacgtcaacgtgcccgccgccggcgcggccgacgccaccaccagccaactcggcgtcctctcgctgtcgtcgccgccgccttcaggcgcggcgcctccctcgcccaccctcggcttctacgccgccggcaatggcggcggatcggctgtgctgctggacacgagttccgactggggcagcagcggcgctgctatggccaccgagacatgcttcctgcaggactacatgggcgtgacggacacgggcagctcgtcgcagtggccacgcttctcgtcgtcggacacgataatggcggcggccgcggcgcgggcggcgacgacgcgggcgcccgagacgctccctctcttcccgacctgcggcgacgacggcggcagcggtagcagcagctacttgccgttctggggtgccgcgtccacaactgccggcgccacttcttccgttgcgatccaacagcaacaccagctgcaggagcagtacagcttttacagcaacagcaacagcacccagctggccggcaccggcaaccaagacgtatcggcaacagcagcagcagccgccgccctggagctgagcctcagctcatggtgctccccttaccctgctgcagggagtatgtgagagcaacgcgagctgccactgctcttcactgatgtctctggaatggaaggaggaggaagtgagaacagatcattcgacaaagcagcattagtccgttgatcggtggaagaccactcgtcagtgttgagttgaatgtttgatcaataaaatacggcaatgctgtaagggttgttttttatgccattgataatacactgtactgttcagttgttgaactctatttcttagccatgccaagtgcttttcttattttgaataacattacagcaaaaagttgaaagacaaaaaaaaaaacccccgaacagagtgctttgggtcccaagcttctttagactgtgttcggcgttccccctaaatttctccccctatatctcactcacttgtcacatcagcgttctctttccccctatatctccacgctctacagcagttccacctatatcaaacctctataccccaccacaacaatattatatactttcatcttcaactaactcatgtaccttccaatttttttctactaataattatttacgtgcacagaaacttagcaaggagagagagagcggggtcacccggtccgggcctagaaggccacccggggctcggcgttaggcttttagtccgctaggtggctagaccgaggttaggacgctagttcactaggggcctagtggtgttttaaggatatccccacccagctttcttgtacaaagtggccgttaacggatcggccagaatggcccggaccgggttacccggaccgaagcttgcatgcctgcagtgcagcgtgacccggtcgtgcccctctctagagataatgagcattgcatgtctaagttataaaaaattaccacatattttttttgtcacacttgtttgaagtgcagtttatctatctttatacatatatttaaactttactctacgaataatataatctatagtactacaataatatcagtgttttagagaatcatataaatgaacagttagacatggtctaaaggacaattgagtattttgacaacaggactctacagttttatctttttagtgtgcatgtgttctcctttttttttgcaaatagcttcacctatataatacttcatccattttattagtacatccatttagggtttagggttaatggtttttatagactaatttttttagtacatctattttattctattttagcctctaaattaagaaaactaaaactctattttagtttttttatttaataatttagatataaaatagaataaaataaagtgactaaaaattaaacaaataccctttaagaaattaaaaaaactaaggaaacatttttcttgtttcgagtagataatgccagcctgttaaacgccgtcgacgagtctaacggacaccaaccagcgaaccagcagcgtcgcgtcgggccaagcgaagcagacggcacggcatctctgtcgctgcctctggacccctctcgagagttccgctccaccgttggacttgctccgctgtcggcatccagaaattgcgtggcggagcggcagacgtgagccggcacggcaggcggcctcctcctcctctcacggcaccggcagctacgggggattcctttcccaccgctccttcgctttcccttcctcgcccgccgtaataaatagacaccccctccacaccctctttccccaacctcgtgttgttcggagcgcacacacacacaaccagatctcccccaaatccacccgtcggcacctccgcttcaaggtacgccgctcgtcctcccccccccccctctctaccttctctagatcggcgttccggtccatgcatggttagggcccggtagttctacttctgttcatgtttgtgttagatccgtgtttgtgttagatccgtgctgctagcgttcgtacacggatgcgacctgtacgtcagacacgttctgattgctaacttgccagtgtttctctttggggaatcctgggatggctctagccgttccgcagacgggatcgatttcatgattttttttgtttcgttgcatagggtttggtttgcccttttcctttatttcaatatatgccgtgcacttgtttgtcgggtcatcttttcatgcttttttttgtcttggttgtgatgatgtggtctggttgggcggtcgttctagatcggagtagaattctgtttcaaactacctggtggatttattaattttggatctgtatgtgtgtgccatacatattcatagttacgaattgaagatgatggatggaaatatcgatctaggataggtatacatgttgatgcgggttttactgatgcatatacagagatgctttttgttcgcttggttgtgatgatgtggtgtggttgggcggtcgttcattcgttctagatcggagtagaatactgtttcaaactacctggtgtatttattaattttggaactgtatgtgtgtgtcatacatcttcatagttacgagtttaagatggatggaaatatcgatctaggataggtatacatgttgatgtgggttttactgatgcatatacatgatggcatatgcagcatctattcatatgctctaaccttgagtacctatctattataataaacaagtatgttttataattattttgatcttgatatacttggatgatggcatatgcagcagctatatgtggatttttttagccctgccttcatacgctatttatttgcttggtactgtttcttttgtcgatgctcaccctgttgtttggtgttacttctgcaggtcgactttaacttagcctaggatccgcccatggactccagcagcttcctccctgccgccggcgcggagaatggctcggcggcgggcggcgccaacaatggcggcgctgctcagcagcatgcggcgccggcgatccgcgagcaggaccggctgatgccgatcgcgaacgtgatccgcatcatgcggcgcgtgctgccggcgcacgccaagattagcgacgacgccaaggagacgatccaggagtgcgtgtcggagtacatcagcttcatcacgggggaggccaacgagcggtgccagcgggagcagcgcaagaccatcaccgccgaggacgtgctgtgggccatgagccgcctcggcttcgacgactacgtcgagccgctcggcgcctacctccaccgctaccgcgagttcgagggcgacgcgcgcggcgtcgggctcgtccctggggccgccccatcgcgcggcggcgaccaccacccgcactccatgtcgccagcggcgatgctcaagtcccgcgggccagtctccggagccgccatgctaccgcaccaccaccaccaccacgacatgcagatgcacgccgccatgtacgggggaacggccgtgcccccgccggccgggcctcctcaccacggcgggttcctcatgccacacccacagggtagtagccactacctgccttacgcgtacgagcccacgtacggcggtgagcacgcgatggctgcatactatggaggcgccgcgtacgcgcccggcaacggcgggagcggcgacggcagtggcagtggcggcggtggcgggagcgcgtcgcacacaccgcagggcagcggcggcttggagcacccgcacccgttcgcgtacaagtagttatgtacaggtaccagctgctgctgttctagggttcacaagtctgcctatttgtcttccccaatggagctatggttgtctggtctggtccttggtcgtgtcccgtttcattgtgtactatttacctgtaatgtgtatccttaagtctggtttgatggtgtctgaaacgttttgctgtggtagagcagcatggaagaactataatgaataagtgatccctaatcattgtgtccaaattttgcttctgctatacccttttgtgctgtttcttatgttttgcttaaaaatttgatctgacaaacaaatttgtctaaattatgctcttgttctgactgtgtactgtacacatttgtattgctaccggtttggcacatagttttctctttgattgcagatcaaacccttctgattgcagattgcttggctatggctgatgtgctcactgttcttctttagcttgtatattgctgatggtggcttggctacggctgaaaaagttgctgctgcgccgacttggcaactgttgctccagtaatgctttgtcctctcttcctagccgccgacttggcacttggcagctgttgctcctgtaatgcgttgttatctcttatctcttgagatgtactatgattttgaggctgtttgacttgtgccagattgccagtgctgatgctatattatctcaggtttttatgctagtatatgttttactgtgtgctgcctgtgtcgagttacgtaatctattgaaccgctatgcgtgttgatgccctgttgttgcttgccagattgatgcccctgttgcttgcagcttgcaagctgtagtgaaatcctaaaattccaaaccaaatctattctgaacttttgaagatctgtgatgtccggaagaaaagattcaaacagataaacgggactctccagaatctataaaataaatgatcgacaaacgctttgctttggtaggcttcaagcttggcgcgccggtcacccggtccgggcctagaaggccacccggggcacttaggagcgaagactaacggttagctagggctgatacctaaaccttagtcactagcagcgtctactagcccccaactttattatacaaagttgatagataaatcagatatctggttcctaaggacccggcggaccgattaaactgattcggtccgacgcgttacctaataacttcgtatagcatacattatacgaagttattagctaactaactagtaagcttaagccatgggtcgacggatccgttaactagcgtggcatttggcaccgccgcacactatgcgagctaggagtgctagtttacagatgaaactatgaaaccaagaaaacacaattgtccgtagctagcgcgtggcgtcgtgtcaagcttcacacagtatcttcgttcttcactataaatcgcgcctgttgttcgtgagacccaccaccgtggataacagtcccctaataataagcgatcaacagcactgctgatggctgaacaccgaggcgccgccgcgcgtaaccatccgccggagcagcccgtcgtgccggcgaacgacgccttccccgaccgcgcccagcagctctgcctcgacgccgggcgcgcgctcgcgatgtgcggcgtgctcgtcgccgtccctcccgcattttacgcgtcgacgtcgcggacgacaccgcacttgccttcgtcggcttcgtcctctggatcatcggtgcgtggctgtgcctcctggcgctcacgcccttggctccacgggcggtgagggcgggcggggccgccgccagcaccttgctgatcaggtgcctgtccctttcatgaactactagcgcccgcgcccgcggccgccgggcacaagagaacacatcgatgttcgctgcgtacgtcagcaataaggcactctttgtcagtagtcgagtgcatatgttgggtgtttgccctgggagatttcaagtgttgtggccattatcccgcaggataaaaaatcggcggcttttggattgatacggaaaataacgatgtttcatgctcgtgttgtgtgtgtgacatcttgtcagccaagtttttaaccgttgctactccccctctgtgggctcagtgtgtggaccggaatacgtcgtacataggccgtagcctaagcccaatatgccgtttttcaggttggcctgtgtgacgacaagcgggtctcaaaagcccatcacgcaactggcctgcaattattggaggagagcgcgtcgagttggttccagaggctgcgtggtggggccggactctgcgacgacctctcgttcgcgtccgatttggttgccgtgagccgtgacgtaacgcctccttccgttcctccctatataagttccacccccgggtccggtttccccaagccccagtgacccccgatcccgatcgcgaaatctccgcacccgccggcaagggaccgaagcaagcctctctcccgaccgtcgcatcaaggtacgcgtccgctcgatctgtcctcttccttctcgatttgacttgctgtggtgcccgatcacgggatcagaatcgcaccagtgtagatttcgcatgttctaagatgtgttagtttccaggctaatccagttctcttgacgcccgatccgatcgagctccgtgtttatttcagcctaatcgtagtattcccctaaaatttcctcattagggggttcgcaagattgttggtcgacaggttcacttatgctcgatcgcttacttttagtcgattcatgctgcgtactattgttgccccccgtggttttatcttttctcgtgtgaaatccagtagatatagtagatatcgtagcattaggttttaattcaatcgattgattattgtatcatcaaaattgagaagttcgaatcatgcctatcatgctgcctcaaccgaaatcctgtatattgaagtttcaattcaattgattgatcattcattagattcaaccaaaatctagaaggttagatgacgcatgtcatgctgcctgcgtagtttacctttgatctgtttatgattaccttatcagtaggatatttgtgattttgggaagtagcactaactgattcatgctgacatgatgttccctttcagattatactgttgagtcctatctaattgatgctttgtatgctatatgaatacgtcatggtaaattagcagttaattagcatattagcaattgggcgtacctcatcaggattgctcttgtagatgtgtgtggtgatgtttcttgttcaattcatgttctgctttaaaagtatgtgttctctgtttgttaattaagattcatggttataatgatttggacctaattaatcagggttgcccttttagatgcgtggttacttgttgagttcatttttttcctgctatagttgtatgcgtttgttcattcatggttagatttgatttgtttcttctctattccatgccttccatatacttcaattgtagcttaacatgagatttctgtatatgcaggtcgaccgccggggatccacacgacaccatggcccagtccaagcacggcctgaccaaggagatgaccatgaagtaccgcatggagggctgcgtggacggccacaagttcgtgatcaccggcgagggcatcggctaccccttcaagggcaagcaggccatcaacctgtgcgtggtggagggcggccccttgcccttcgccgaggacatcttgtccgccgccttcatgtacggcaaccgcgtgttcaccgagtacccccaggacatcgtcgactacttcaagaactcctgccccgccggctacacctgggaccgctccttcctgttcgaggacggcgccgtgtgcatctgcaacgccgacatcaccgtgagcgtggaggagaactgcatgtaccacgagtccaagttctacggcgtgaacttccccgccgacggccccgtgatgaagaagatgaccgacaactgggagccctcctgcgagaagatcatccccgtgcccaagcagggcatcttgaagggcgacgtgagcatgtacctgctgctgaaggacggtggccgcttgcgctgccagttcgacaccgtgtacaaggccaagtccgtgccccgcaagatgcccgactggcacttcatccagcacaagctgacccgcgaggaccgcagcgacgccaagaaccagaagtggcacctgaccgagcacgccatcgcctccggctccgccttgccctccggactcagatctcgatagagtcaacctagacttgtccatcttctggattggccaacttaattaatgtatgaaataaaaggatgcacacatagtgacatgctaatcactataatgtgggcatcaaagttgtgtgttatgtgtaattactagttatctgaataaaagagaaagagatcatccatatttcttatcctaaatgaatgtcacgtgtctttataattctttgatgaaccagatgcatttcattaaccaaatccatatacatataaatattaatcatatataattaatatcaattgggttagcaaaacaaatctagtctaggtgtgttttgcgaattgcggcgcccttactttaacgcctctaaccaacacccctttatctttataaggaacaataaacagaatttgccccactgttctaaatcacctaataatatccccagctaaaaacaataaaggtttcctagaattaagacaagcatgactgttcctccaggagggtttggaacattgttgcagtcttgcagatacgggcgaagggtgagaaacagagcggagggctggaggtgacctcggtagtcgacgccggagttgagcttgacaacgacggggcggcccctgatggacttgaggaagtccgatggcgtcttcaccgtcccgccggcgcccgaggcgggcctgtcgctgccgccgccgccgctgctcatcttgcgcgctgtgcccccggcggtgtccctgtgttgcggatcgcgggtgggccaggtggatgcgagggcgacccgtttggactccggccggagccgccggatccctggtcggtgtcagtgccgtttactctgggccccacgtgtcagtaccgtctgtagatgacaacaacccgtcgtccacagtcatgtccaaaatatcctttcttcttttttttcgattcggatatctatcttccttttttttttccaaaaatcttcttgacgcaccagcgcgcacgtttgtggtaaacgccgacacgtcggtcccacgtcgatagaccccacccaccagtgagtagcgtgtacgtattcgggggtgacggacgtgtcgccgtcgtcttgctagtcccattcccatctgagccacacatctctgaacaaaaaaaaggagggaggcctccacgcacatccccctccgtgccacccgccccaaaccctcgcgccgcctccgagacagccgccgcaaccatggccaccgccgccgccgcgtctaccgcgctcactggcgccactaccgctgcgcccaaggcgaggcgccgggcgcacctcctggccacccgccgcgccctcgccgcgcccatcaggtgctcagcggcgtcacccgccatgccgatggctcccccggccaccccgctccggccgtggggccccaccgagccccgcaagggtgctgacatcctcgtcgagtccctcgagcgctgcggcgtccgcgacgtcttcgcctaccccggcggcgcgtccatggagatccaccaggcactcacccgctcccccgtcatcgccaaccacctcttccgccacgagcaaggggaggcctttgccgcctccggctacgcgcgctcctcgggccgcgtcggcgtctgcatcgccacctccggccccggcgccaccaacctagtctccgcgctcgccgacgcgctgctcgattccgtccccatggtcgccatcacgggacaggtggcgcgacgcatgattggcaccgacgccttccaggagacgcccatcgtcgaggtcacccgctccatcaccaagcacaactacctggtcctcgacgtcgacgacatcccccgcgtcgtgcaggaggctttcttcctcgcctcctctggtcgaccagggccggtgcttgtcgacatccccaaggacatccagcagcagatggcggtgcctgtctgggacaagcccatgagtctgcctgggtacattgcgcgccttcccaagccccctgcgactgagttgcttgagcaggtgctgcgtcttgttggtgaatcgcggcgccctgttctttatgtgggcggtggctgcgcagcatctggtgaggagttgcgacgctttgtggagctgactggaatcccggtcacaactactcttatgggcctcggcaacttccccagcgacgacccactgtctctgcgcatgctaggtatgcatgggacggtgtatgcaaattatgcagtggataaggccgatctgttgcttgcacttggtgtgcggtttgatgatcgcgtgacagggaagattgaggcttttgcaagcagggctaagattgtgcacgttgatattgatccggctgagattggcaagaacaagcagccacatgtgtccatctgtgcagatgttaagcttgctttgcagggcatgaatgctcttcttgaaggaagcacatcaaagaagagctttgactttggctcatggaacgatgagttggatcagcagaagagggaattcccccttgggtataaaacatctaatgaggagatccagccacaatatgctattcaggttcttgatgagctgacgaaaggcgaggccatcatcggcacaggtgttgggcagcaccagatgtgggcggcacagtactacacttacaagcggccaaggcagtggttgtcttcagctggtcttggggctatgggatttggtttgccggctgctgctggtgcttctgtggcaaacccaggtgtcactgttgttgacatcgatggagatggtagctttctcatgaacgttcaggagctagctatgatccgaattgagaacctcccagtgaaggtctttgtgctaaacaaccagcacctggggatggtggtgcagttggaggacaggttctataaggccaacagagcgcacacatacttgggaaacccagagaatgaaagtgagatatatccagatttcgtgacgatcgccaaagggttcaacattccagcggtccgtgtgacaaagaagaacgaagtccgcgcagcgataaagaagatgctcgagactccagggccgtacctcttggatataatcgtcccacaccaggagcatgtgttgcctatgatccctagtggtggggctttcaaggatatgatcctggatggtgatggcaggactgtgtactgactagctagtcagttaacagatctgccagatcctcggtgtacaaataacccgtcttatcctatgagacgggccggcgtcagtgtgttctggaggaatttttatgtcagagcctttttctttgtgtgcttgatgtagatgccaagggaagcttattggctgttgaagcttgatgcaaaataaattatggaactctgttttttgtttatctaataataactagcaaatatgcttccattgcattgaaactaacagccttttgtgtttccaagttttattttgtgacaatgtcatctatttcaattagttgtggaatcggaaacttgcaggactaacttggaaactccaatccctcagcatcctggactttttcctggtgtaatccatgtagatattattttaatcatcattttagttctggaggtttttccatctccggttttgctcccctttcttcaaaaaaaaaaaaaaaatgccgtaggcgccgcaacgcccacctgttgttcaaactcatgggcacgagtggctcgaagattttatacaacaattgctgtagtttcaccgttgctggtgaagaagcatttttttaaaaaaatatagtggtattcattttaattagtttagttgtgcagcgagcaaaatttggacatgctctgctcggaatctgatcgacctagacacagattagcagcagtagctttgtcatctgttccaagagttgcgatctgatagaagaaaaaaaaaccttcccttcaatgtaaaaccgaaactaacaagaaagaagcacagtgccgtttaggcaagtatggagtacgtattaagcatgtagaaggccatgcatgaaccactaacaagaaagaagcgcagtgccattcaggcaagcataagcatgtagattggcatgcatgaacaactaacagtagatcgtctctggtctgattagaagttttttgggaagccaagaaatcatgtacaactggttccatctcaaattccgtggcaaaaagaggcctaagcaacatacctcgagtagatcacattcaagcttggtcacccggtccgtcaatattctgattccgatgacttcgtaggttcctagctcaagccgctcgtgtccaagcgtcacttacgattagctaatgattacggcatctaggaccgactagtggcgcgccgactagctagctaaggtaccgagctcgaattcattccgattaatcgtggcctcttgctcttcaggatgaagagctatgtttaaacgtgcaagcgctactagacaattcagtacattaaaaacgtccgcaatgtgttattaagttgtctaagcgtcaatttgtttacaccacaatatatcctgcca

SEQ ID NO: 16 - DNA, 10070 bp, synthetic construct
  misc_feature 1..10070: note = PHP92765
  source 1..10070: mol_type = other DNA
gtttacccgccaatatatcctgtcaaacactgcggccgcacttgaccgcggatggagccggagctgtggtgaggccatcgacgggaggtgggggagaacacagtctcagtgttctttgtgagtccgcaaggtttttagcttttctgtattaattaaggttgctgttggctgtagaatacggtcgtggaagagctgtatcggtagctactacgtaagctattatatactggaagtctggagctcgtcgatctccggtcgtcttcctccatttctcctcgtcttgctttgactgctgctaccatttgcttctgttttctgatgaagcatgccatgtcggccaccagtgtttgtgtggtttttgcagggaatggctttcaagtgctgtgattgaatggccctcgtcgtcctcggctgagctcacatggacgcgtcatgtgagtgagatatatgatcatatgatgagtggggttcgggtgagtgcgtacttgaagtaggatcccgctttcactcattcattcattggcctttaaaccgggaaattttcgcgaggagatggagggaagcaagcagggtgacgagtgcagagtgccgcgagcgctttgtcaaaaggcaccgccgtaggcaaaaaaatcaatggccctgactgactcgatggtagtactactgtagagactagagagggttgctccccatatcttcgtgtgacttttactccagcattgcatttccgtcattgagacgttaattaatagcagctttcgggacagatgactgtggccatgtttcgtcacggccgcttcgtgccagctgggggtactatagtactgtgattttgttagtaaaaactttcattaggccaccattgacgaccgggccttcgcttttgctgcgctaattaaccatttcccggcgaccgaagggaacatgaacatgccccgacacatgagggcatgaggactagtgttctccctgtcgttcgttgacttgactagtgatagtttaaacgctcttcaactggaagagcggttactaccggttcactagctagctgctaatcgagctagttaccctatgaggtgacatgaagcgctcacggttactatgacggttagcttcacgactgttggtggcagtagcgtacgacttagctatagttccggacttacctagctaataacttcgtatagcatacattatacgaagttatggttaccgcggccgcgaattccggaccgggttaccgaattcttaccctagctccctgcggctgttacgcggtcccccatcaatcttctgttcttgcggttgtagcctgtgtaacagtgctagagtatgtatgataaataggttttaagtctgcttacatgacattttttattgtggaagagacatataaaaattagagagagtggttctcatgcaacggcggacggcccggtgctaaaagagcttcaagacaaaataatgaaacaggaagagagtagatttatctaagagccaactttattatatgaatgtgtttattgttggctttagatgatatggtaaggagttagagctaataatagataggctctattattattattattaattaaactcgctctaaggaggaaagtgggaggaagggacgaggacgaagactactggaagcatcgtgcatggatgatggatgtggtgtctcttaatgtaggtggccggaggatgtacgtgttaattgcgcgataagcactcagatccaaccgcaaactacctccacactgacacactgatagagagaaagagagacctccgacgactgccgccgcagatgagccacgtacgtatacgacgtctgccggccggctcaggctgccgccatcaccctgctcgaaagtcgcgttaggcggcgccagctacataggagtatctagtctagccagttagtatactactactgcgctgatgatgaattaactctgcatagatactgtacttgcctccctccaacacccaaccacctcctgctcggctcttaataacttggacacggatcgatgccatccaaggaagaacacgacgacgacgacggaacatccaccatgcaagcttgcatccatacgccgatacgcgtgcatccatccatccaccattatttccattttccaccgatcacacgtacacaggcctatttaaggagcgacatcccactgcaactctcctcaccactcatcaccagctagctctagcaaagcacttgccatctaccgaccgccgcattccaaacagcccgacgagctagcagagcggcaggcacctccctcctcaaggaacccatggcggccaatgcgggcggcggtggagcgggaggaggcagcggcagcggcagcgtggctgcgccggcggtgtgccgccccagcggctcgcggtggacgccgacgccggagcagatcaggatgctgaaggagctctactacggctgcggcatccggtcgcccagctcggagcagatccagcgcatcaccgccatgctgcggcagcacggcaagatcgagggcaagaacgtcttctactggttccagaaccacaaggcccgcgagcgccagaagcgccgcctcaccagcctcgacgtcaacgtgcccgccgccggcgcggccgacgccaccaccagccaactcggcgtcctctcgctgtcgtcgccgccgccttcaggcgcggcgcctccctcgcccaccctcggcttctacgccgccggcaatggcggcggatcggctgtgctgctggacacgagttccgactggggcagcagcggcgctgctatggccaccgagacatgcttcctgcaggactacatgggcgtgacggacacgggcagctcgtcgcagtggccacgcttctcgtcgtcggacacgataatggcggcggccgcggcgcgggcggcgacgacgcgggcgcccgagacgctccctctcttcccgacctgcggcgacgacggcggcagcggtagcagcagctacttgccgttctggggtgccgcgtccacaactgccggcgccacttcttccgttgcgatccaacagcaacaccagctgcaggagcagtacagcttttacagcaacagcaacagcacccagctggccggcaccggcaaccaagacgtatcggcaacagcagcagcagccgccgccctggagctgagcctcagctcatggtgctccccttaccctgctgcagggagtatgtgagagcaacgcgagctgccactgctcttcactgatgtctctggaatggaaggaggaggaagtgagaacagatcattcgacaaagcagcattagtccgttgatcggtggaagaccactcgtcagtgttgagttgaatgtttgatcaataaaatacggcaatgctgtaagggttgttttttatgccattgataatacactgtactgttcagttgttgaactctatttcttagccatgccaagtgcttttcttattttgaataacattacagcaaaaagttgaaagacaaaaaaaaaaacccccgaacagagtgctttgggtcccaagcttctttagactgtgttcggcgttccccctaaatttctccccctatatctcactcacttgtcacatcagcgttctctttccccctatatctccacgctctacagcagttccacctatatcaaacctctataccccaccacaacaatattatatactttcatcttcaactaactcatgtaccttccaatttttttctactaataattatttacgtgcacagaaacttagcaaggagagagagagcggggtcacccggtccgggcctagaaggccacccggggctcggcgttaggcttttagtccgctaggtggctagaccgaggttaggacgctagttcactaggggcctagtggtgttttaaggatgttaacaccaaggagaggattcgatgacgagtttgaggacgccattgctaggatgattaaccctaggctctggttccatgtagaaatcagaggcgcgatggaaataggtggaacgtcggtctccgctccagagatcacgacggcttcgtgtttgatatttctggtggcacaaaaacaaggcgcgagttacatatatatagatgagtatcgccagctttagttctattctaggaaaggataagttttacatggttacaattgatctatttctattaactgcctatagaacttagccggcaatatctcaaccatatttggaatacaacacatatatgttaacaatcagtctagcagctaggttgctgtgtggattcgtgaagcggcaaattcttggatggctgcaggtgcccgacatctttcgagcctccttgcaaattgctagtttttttcttgtttttcctctttgacttggtccgagtgtgctatgcagttgctgtgagagtgcaccttctgcttagtcgcatgatacaaggaactgttgattctaaaaaaaactttattttaatgtaaaggagagagaatttaatatcagttttttttcgatatagactttcatgtgattttgcatcgcccgatacatcagtgtgtttgtttggctttagtccatagcggcttctataacgttttgcctcgatagattacagctagctgcagcagttttaaaagccgtctttaatcggaagccaacatctcgacatatagagcgttcgataggatgcttacttattctagtctattaaatttcccaccgctgctaattaatgctaatgaattaactctctctgcctatccctcgacatgcactaatgtaggagtatatcccaacgcccaaccacctcctaataacttcgacggatggcagctaccgtccttggaagatggtgacggaatgtccagcattccaccgactgccagaaactgcacgcacatctgtcatcagcaatcgctagcctatttaatgagcaacattccattgcaatctcctcaggccacttacctgcagtcaccactcccaagccagtacccacagtcctacgagcagtcgcacgcaagtgtcaagagatctggatccgtcccccagatttgctaggacaccgccgtacccacaccccggatcagttaatatcgtagacataatggccctccctgccatctccacaaccaagcactcccatcatcatgcatgcagcaggctgtgctgtggacctgatcgagtttcaattgatccaagcaagcaagagggatgggagtccttggttgtggaaattgcagagagagaccagtcgttgatcggtcggagatctccccgaatcgatctcgatcggccggaattttgggggccggccgggaggtggatgatggggggtgattaccatctaggcggcgccgtgttggatgatgtaccaacatatcactataggctactttgggaacctcagatccccttcgggattggaggaaattgagatggaaatgaactaatttcttctctaacccccttcaatcacgaaggggattcgagtttccaaactagccctatatatatcagagctagggagggatattgctgcaacatgcatcacgaggtacagatatataattagggttctgctgcaatgttttgactatagatcgttagtgatctgctgtaattaataataatggtgatctcgaagcaattctaaacatcatagtagcaggcccaggtaccgttaacagatctactaactatctatactgtaataatgttgtatagccgccggatagctagctagtttagtcattcagcggcgatgggtaataataaagtgtcatccatccatcaccatgcgtggcaacgtgagcaatgacctgattgaacaaattgaaatgaaaagaagaaatatgttatatgtcaacgagatttcctcataatgccactgacgacgtgtgtccaagaaatgtatcagtgatacgtatattcacaatttttttatgacttatactcacaatttgtttttttactacttatactcacaatttgttgtgcgtaccataacaatttcgatcgaatatatatcagaaagttgacgaaagtaagctcactcaaaaagttaaatgggctgcggaagctgcgtcaggcccaagttttggctattctatccggtatccacgattttgatggctgagggacatatgttcgcttaagcttgagctcggtaccctggttcacaaactcaatacaacacacagtggagtagggtattacgctccggcggcccgaaccactctaaatccttgtgtcctcgtgtgctcttccaccattaatgactgtaattgcagggacacgaagagttgtagcgcttttgccaacaagatccgctatatgctagtagagtggaacctgcacagcaacaagcatccaataatctgagaataagaattatgtgtggtgatggttctcatctctgcaactcgccattttcgcgagagaaccaaatccaagttggtgaagatcatgatttgggctcatgggctggcatagtagctattacctttgcaattgtggttcgaatctatccgatattctccttttcagggagagctaatgcttatgcttattgggtattttggtttgacactgcttcacgcccaaaaaaaggcaactatgtctgagttggatatggcccaaaaaaaggcagctatgtctgagttggatatggaagtcttctttcgtttagggtgaagtaagaccaagctcatgagcttattatcttaggtcggaacaaattagttgataggcatggcacatttatcaaattataatgattttaacagaaaagcaacacctctttttcagcagcaccagctttgcaagctgcaattgacactccaagcatagtatttgctccaaactcagcctgcatttcgcacaatatcatatctatttccatttggataaaatatattttccagaaatatgggaacagaatcaagatacagaaaaaagttgtggtagtagtggtaagtggaaacacaagtacagtgaaaagatagcattatttctgaacagtcaaattaaccgaaataagtagtatcacatactgcccctaaattgactacacccaatgtaaagaattgcttgagcatattgagccatcagttgtttgtttgtgtaacggatttgacaatgcagagttcaggagcaaaaaaccgcaaaggagagaaagagggaaaggatctcctagtatcccaccttgtggcgcgccctgtcaagtgcatgatggcctggtcgatctgcgtctgctgctgcggttccatcccaacgagtgcctccgacaccttgtcgttgatcacccgcaccgcgtaggcgacccccctggcgaggaacttccgcctctcggaggccccggccgcgtcggcggcggcgccctcgagcgcgcccacgctagccgtagatgctcggtgcacggccttgttggtgtgcaactcgacctcaacggccggtgcgctacgcccgtcaaggatctggcgcgcccgcaccctcgtgatcacggtgggcgcctcccgcctcatgtggccgacgatgaaaagcgccgggttaggggccttggcgcgcaccgccgtattcagggcctcctcgctcttgcgcgagagcaggtgcttccccaggtactcctgcactgacaaggctgccacagcggtggaatttgtcctcacgacttcgccacgtcgtcctcacctccctggcttcccacgactccgccgtatcgaggtgctcggtgggtcgtcttaatccgaagtccgaactaggaagacgagacagagaggtctgaggaatgggcctcgtttgatgttgagctgaattatttttccagcataagcccaggtcttggtccatgaacaaaattactagaaacccagcccagtactacgatctaaaagagggactgccactggatagctctctctagcattctccacgctccaatacagcggcgtcgtgtctatccgggtctatccgcgaacacgtgagaactctccagaaactgctttctcctccacttcatctctctcgctttccctctataaaaagaccccttctaggaattgagggagacagcaagcaccaagcagcgatccgaagctcaatcaattcactcaaacctcttccccaaatcttcgattagatcttcgttgacaagaagactagaaccgaacctgacatgtccaacctgctcacggttcaccagaaccttccggctcttccagtggacgcgacgtccgatgaagtcaggaagaacctcatggacatgttccgcgacaggcaagcgttcagcgagcacacctggaagatgctgctctccgtctgccgctcctgggctgcatggtgcaagctgaacaacaggaagtggttccccgctgagcccgaggacgtgagggattaccttctgtacctgcaagcgcgaggtttgtttctgcttctacctttgatatatatataataattatcattaattagtagtaatataatatttcaaatatttttttcaaaataaaagaatgtagtatatagcaattgcttttctgtagtttataagtgtgtatattttaatttataacttttctaatatatgaccaaaacatggtgatgcctaggtctggcagtgaagaccatccagcaacaccttggacaactgaacatgcttcacaggcgctccggcctcccgcgccccagcgactcgaacgccgtgagcctcgtcatgcgccgcatcaggaaggaaaacgtcgatgccggcgaaagggcaaagcaggccctcgcgttcgagaggaccgatttcgaccaggtccgcagcctgatggagaacagcgacaggtgccaggacattaggaacctggcgttcctcggaattgcatacaacacgctcctcaggatcgcggaaattgcccgcattcgcgtgaaggacattagccgcaccgacggcggcaggatgcttatccacattggcaggaccaagacgctcgtttccaccgcaggcgtcgaaaaggccctcagcctcggagtgaccaagctcgtcgaacgctggatctccgtgtccggcgtcgcggacgacccaaacaactacctcttctgccgcgtccgcaagaacggggtggctgcccctagcgccaccagccaactcagcacgagggccttggaaggtattttcgaggccacccaccgcctgatctacggcgcgaaggatgacagcggtcaacgctacctcgcatggtccgggcactccgcccgcgttggagctgctagggacatggcccgcgccggtgtttccatccccgaaatcatgcaggcgggtggatggacgaacgtgaacattgtcatgaactacattcgcaaccttgacagcgagacgggcgcaatggttcgcctcctggaagatggtgactgaggtacccaacctagacttgtccatcttctggattggccaacttaattaatgtatgaaataaaaggatgcacacatagtgacatgctaatcactataatgtgggcatcaaagttgtgtgttatgtgtaattactagttatctgaataaaagagaaagagatcatccatatttcttatcctaaatgaatgtcacgtgtctttataattctttgatgaaccagatgcatttcattaaccaaatccatatacatataaatattaatcatatataattaatatcaattgggttagcaaaacaaatctagtctaggtgtgttttgcgatccgatatcgatataacttcgtatagcatacattatacgaagttataaggcgcgccacttacgcttgattccgatgacttcgtaggttcctagctcaagccgctcgtgtccaagcgtcacttacgattagctaatgattacggcatctaggaccgactagctagctagctaagagctcggtaccgagctcgaattcattccgattaatcgtggcctcttgctcttcaggatgaagagctatgtttaaacgtgcaagcgctactagacaattcagtacattaaaaacgtccgcaatgtgttattaagttgtctaagcgtcaatttgtttacaccacaatatatcctgcca

SEQ ID NO: 17 - DNA, 15693 bp, synthetic construct
  misc_feature 1..15693: note = PHP92928
  source 1..15693: mol_type = other DNA
gtttacccgccaatatatcctgtcaaacactgatagtttaaactgaaggcgggaaacgacaatctgatcatgagcggagaattaagggagtcacgttatgacccccgccgatgacgcgggacaagccgttttacgtttggaactgacagaaccgcaacgttgaaggagccactcagcaagctggtacgattgtaatacgactcactatagggcgaattgagcgctgtttaaacgctcttcaactggaagagcggttacgctgtttaaacgctcttcaactggaagagcgtttactaccggttcactagctagctgctaatcgagctagttaccctatgaggtgacatgaagcgctcacggttactatgacggttagcttcacgactgttggtggcagtagcgtacgacttagctatagttccggacttaccacttaagggtcacctttgtccaccaagatggaactgtcttcggccagaatggccatctggattcagcaggcctagaaggccatttatcgctatcaactttgtatagaaaagttgggccgagctcggtacggccagaatggcccggaccgggttaccaagcggccgcatcgagcagctggcttgtggggaccagacaaaaaaggaatggtgcagaattgttaggcgcacctaccaaaagcatctttgcctttattgcaaagataaagcagattcctctagtacaagtggggaacaaaataacgtggaaaagagctgtcctgacagcccactcactaatgcgtatgacgaacgcagtgacgaccacaaaactcgagcaacgagatcatgagccaatcaaagaggagtgatgtagacctaaagcaataatggagccatgacgtaagggcttacgcccatacgaaataattaaaggctgatgtgacctgtcggtctctcagaacctttactttttatgtttggcgtgtatttttaaatttccacggcaatgacgatgtgaccgtcgacccactaaaacattgctttgtcaaaagctaaaaaagatgatgcccgacagccacttgtgtgaagcatgagaagccggtccctccactaagaaaattagtgaagcatcttccagtggtccctccactcacagctcaatcagtgagcaacaggacgaaggaaatgacgtaagccatgacgtctaatcccagggcccggtgaccaatcgaattcttaccctagctccctgcggctgttacgcggtcccccatcaatcttctgttcttgcggttgtagcctgtgtaacagtgctagagtatgtatgataaataggttttaagtctgcttacatgacattttttattgtggaagagacatataaaaattagagagagtggttctcatgcaacggcggacggcccggtgctaaaagagcttcaagacaaaataatgaaacaggaagagagtagatttatctaagagccaactttattatatgaatgtgtttattgttggctttagatgatatggtaaggagttagagctaataatagataggctctattattattattattaattaaactcgctctaaggaggaaagtgggaggaagggacgaggacgaagactactggaagcatcgtgcatggatgatggatgtggtgtctcttaatgtaggtggccggaggatgtacgtgttaattgcgcgataagcactcagatccaaccgcaaactacctccacactgacacactgatagagagaaagagagacctccgacgactgccgccgcagatgagccacgtacgtatacgacgtctgccggccggctcaggctgccgccatcaccctgctcgaaagtcgcgttaggcggcgccagctacataggagtatctagtctagccagttagtatactactactgcgctgatgatgaattaactctgcatagatactgtacttgcctccctccaacacccaaccacctcctgctcggctcttaataacttggacacggatcgatgccatccaaggaagaacacgacgacgacgacggaacatccaccatgcaagcttgcatccatacgccgatacgcgtgcatccatccatccaccattatttccattttccaccgatcacacgtacacaggcctatttaaggagcgacatcccactgcaactctcctcaccactcatcaccagctagctctagcaaagcacttgccatctaccgaccgccgcattccaaacagcccgacgagctagcagagcggcaggcacctccctcctcaaggaacccatggcggccaatgcgggcggcggtggagcgggaggaggcagcggcagcggcagcgtggctgcgccggcggtgtgccgccccagcggctcgcggtggacgccgacgccggagcagatcaggatgctgaaggagctctactacggctgcggcatccggtcgcccagctcggagcagatccagcgcatcaccgccatgctgcggcagcacggcaagatcgagggcaagaacgtcttctactggttccagaaccacaaggcccgcgagcgccagaagcgccgcctcaccagcctcgacgtcaacgtgcccgccgccggcgcggccgacgccaccaccagccaactcggcgtcctctcgctgtcgtcgccgccgccttcaggcgcggcgcctccctcgcccaccctcggcttctacgccgccggcaatggcggcggatcggctgtgctgctggacacgagttccgactggggcagcagcggcgctgctatggccaccgagacatgcttcctgcaggactacatgggcgtgacggacacgggcagctcgtcgcagtggccacgcttctcgtcgtcggacacgataatggcggcggccgcggcgcgggcggcgacgacgcgggcgcccgagacgctccctctcttcccgacctgcggcgacgacggcggcagcggtagcagcagctacttgccgttctggggtgccgcgtccacaactgccggcgccacttcttccgttgcgatccaacagcaacaccagctgcaggagcagtacagcttttacagcaacagcaacagcacccagctggccggcaccggcaaccaagacgtatcggcaacagcagcagcagccgccgccctggagctgagcctcagctcatggtgctccccttaccctgctgcagggagtatgtgagagcaacgcgagctgccactgctcttcactgatgtctctggaatggaaggaggaggaagtgagaacagatcattcgacaaagcagcattagtccgttgatcggtggaagaccactcgtcagtgttgagttgaatgtttgatcaataaaatacggcaatgctgtaagggttgttttttatgccattgataatacactgtactgttcagttgttgaactctatttcttagccatgccaagtgcttttcttattttgaataacattacagcaaaaagttgaaagacaaaaaaaaaaacccccgaacagagtgctttgggtcccaagcttctttagactgtgttcggcgttccccctaaatttctccccctatatctcactcacttgtcacatcagcgttctctttccccctatatctccacgctctacagcagttccacctatatcaaacctctataccccaccacaacaatattatatactttcatcttcaactaactcatgtaccttccaatttttttctactaataattatttacgtgcacagaaacttagcaaggagagagagagcgggaatttaaatgctcggcgttaggcttttagtccgctaggtggctagaccgaggttaggacgctagttcactaggggcctagtggtgttttaagacgtcacggtcacccggtccgggcctagaaggccagcttcaagtttgtacaaaaaagcaggctccggccagaatggcccggaccgaagcttgcatgcctgcagtgcagcgtgacccggtcgtgcccctctctagagataatgagcattgcatgtctaagttataaaaaattaccacatattttttttgtcacacttgtttgaagtgcagtttatctatctttatacatatatttaaactttactctacgaataatataatctatagtactacaataatatcagtgttttagagaatcatataaatgaacagttagacatggtctaaaggacaattgagtattttgacaacaggactctacagttttatctttttagtgtgcatgtgttctcctttttttttgcaaatagcttcacctatataatacttcatccattttattagtacatccatttagggtttagggttaatggtttttatagactaatttttttagtacatctattttattctattttagcctctaaattaagaaaactaaaactctattttagtttttttatttaataatttagatataaaatagaataaaataaagtgactaaaaattaaacaaataccctttaagaaattaaaaaaactaaggaaacatttttcttgtttcgagtagataatgccagcctgttaaacgccgtcgacgagtctaacggacaccaaccagcgaaccagcagcgtcgcgtcgggccaagcgaagcagacggcacggcatctctgtcgctgcctctggacccctctcgagagttccgctccaccgttggacttgctccgctgtcggcatccagaaattgcgtggcggagcggcagacgtgagccggcacggcaggcggcctcctcctcctctcacggcaccggcagctacgggggattcctttcccaccgctccttcgctttcccttcctcgcccgccgtaataaatagacaccccctccacaccctctttccccaacctcgtgttgttcggagcgcacacacacacaaccagatctcccccaaatccacccgtcggcacctccgcttcaaggtacgccgctcgtcctcccccccccccctctctaccttctctagatcggcgttccggtccatgcatggttagggcccggtagttctacttctgttcatgtttgtgttagatccgtgtttgtgttagatccgtgctgctagcgttcgtacacggatgcgacctgtacgtcagacacgttctgattgctaacttgccagtgtttctctttggggaatcctgggatggctctagccgttccgcagacgggatcgatttcatgattttttttgtttcgttgcatagggtttggtttgcccttttcctttatttcaatatatgccgtgcacttgtttgtcgggtcatcttttcatgcttttttttgtcttggttgtgatgatgtggtctggttgggcggtcgttctagatcggagtagaattctgtttcaaactacctggtggatttattaattttggatctgtatgtgtgtgccatacatattcatagttacgaattgaagatgatggatggaaatatcgatctaggataggtatacatgttgatgcgggttttactgatgcatatacagagatgctttttgttcgcttggttgtgatgatgtggtgtggttgggcggtcgttcattcgttctagatcggagtagaatactgtttcaaactacctggtgtatttattaattttggaactgtatgtgtgtgtcatacatcttcatagttacgagtttaagatggatggaaatatcgatctaggataggtatacatgttgatgtgggttttactgatgcatatacatgatggcatatgcagcatctattcatatgctctaaccttgagtacctatctattataataaacaagtatgttttataattattttgatcttgatatacttggatgatggcatatgcagcagctatatgtggatttttttagccctgccttcatacgctatttatttgcttggtactgtttcttttgtcgatgctcaccctgttgtttggtgttacttctgcaggtcgactttaacttagcctaggatccgcccatggactccagcagcttcctccctgccgccggcgcggagaatggctcggcggcgggcggcgccaacaatggcggcgctgctcagcagcatgcggcgccggcgatccgcgagcaggaccggctgatgccgatcgcgaacgtgatccgcatcatgcggcgcgtgctgccggcgcacgccaagattagcgacgacgccaaggagacgatccaggagtgcgtgtcggagtacatcagcttcatcacgggggaggccaacgagcggtgccagcgggagcagcgcaagaccatcaccgccgaggacgtgctgtgggccatgagccgcctcggcttcgacgactacgtcgagccgctcggcgcctacctccaccgctaccgcgagttcgagggcgacgcgcgcggcgtcgggctcgtccctggggccgccccatcgcgcggcggcgaccaccacccgcactccatgtcgccagcggcgatgctcaagtcccgcgggccagtctccggagccgccatgctaccgcaccaccaccaccaccacgacatgcagatgcacgccgccatgtacgggggaacggccgtgcccccgccggccgggcctcctcaccacggcgggttcctcatgccacacccacagggtagtagccactacctgccttacgcgtacgagcccacgtacggcggtgagcacgcgatggctgcatactatggaggcgccgcgtacgcgcccggcaacggcgggagcggcgacggcagtggcagtggcggcggtggcgggagcgcgtcgcacacaccgcagggcagcggcggcttggagcacccgcacccgttcgcgtacaagtagttatgtacaggtacctgacatcttatagtctgcaacctctcgtgtctgaattcctatctttatcaagtgttattgcttccacgactataggacagctttcgtcgaaagcttttgctcatgtgatctcgaaggattcatctagtctgatttttcgtgacttgtatcggttttattggattcatccaacatatatcaataaaaaatgagttgtgtttcctttcttcctagttcagttaaaattatttccctcctgcgcttgtgctgtaattgtctgtgtacctgttgtttgtgactgtgttagttcccttggatatgatttcgtatttgatatgtacatggagatagcttagcttcattattggagtatgaagttagtatgacatagtcactctcctggaaaattgacactgcaaaccatatttttattctgaaccacaaatcctagtcagtccgctggcatatgccgtccgtttgctgaatccagaacgtgggtttggagatgtacggctgagatgcctctatgcgaaggggatttcgtggtgaaacgagatgggagtagagcaacgcccgtggaagatgcttcaaacttccacacttttgagcaacgatcggcagtagtaaggtagacgatttcaagatcaaagcatatgaagataaacaacatcaacaacaaaatttgttggggttctatagagagaaacagagctacatacatacactgttttgtatctaccatctgagatgatgaaaagatgaaaaactaaagaatgccccggcgccaacgccaggacacgccgcgcgcgcgtcacccgagccatctcttgacccagccggcgctgtatatttacacacgttgcagcatcgatcaccacctgttcgatcgcgtcgccgtcaccggtaccgagctcgaattccgggcgacttattgaactagtctagggcgcggctaacaacctagcttagattgccttgtctaaacccttaggctaacgcgccacccgaacagctgcccttaaggccaattgttcaagattcattcaacaattgaaacatctcccatgattaaatcagtataaggttgctatggtcttgcttgacaaagtttttttttgagggaatttcaactaaatttttgagtgaaactatcaaatactgattttaaaaaatttttataaaaggaagcgcagagataaaaggccatctatgctacaaaagtacccaaaaatgtaatcctaaagtatgaattgcattttttttttgtttggacgaaaggaaaggagtattaccacaagaatgatatcatcttcatatttagatcttttttgggtaaagcttgagattctctaaatatagagaaatcagaagaaaaaaaaaccgtgttttggtggttttgatttctagcctccacaataactttgacggcgtcgacaagtctaacggacaccaagcagcgaaccaccagcgccgagccaagcgaagcagacggccgagacgttgacaccttcggcgcggcatctctcgagagttccgctccggcgctccacctccaccgctggcggtttcttattccgttccgttccgcctcctgctctgctcctctccacaccacacggcacgaaaccgttacggcaccggcagcacccagcacgggagaggggattcctttcccaccgttccttccctttccgccccgccgctataaatagccagccccatccccagcttttttccccaatctcatctcctctctcctgttgttcggagcacacgcacaatccgatcgatccccaaatccccttcgtctctcctcgcgagcctcgtggatcccagcttcaaggtacggcgatcgatcatcccccctccttctctctaccttcttttctctagactacatcggatggcgatccatggttagggcctgctagtttcccttcctgttttgtcgatggctgcgaggcacaatagatctgatggcgttatgacggctaacttgtcatgttgttgcgatttatagtccctttaggagatcagtttaatttctcggatggttcgagatcggtggtccatggttagtaccctaagatccgcgctgttagggttcgtagatggaggcgacctgttctgattgttaacttgtcagtacctgggaaatcctgggatggttctagctcgtccgcagatgagatcgatttcatgatcctctgtatcttgtttcgttgcctaggttccgtctaatctatccgtggtatgatgtagatgttttgatcgtgctaactacgtcttgtaaagttaattgtcaggtcataatttttagcatgcctttttttttgtttggttttgtctaattgggctgtcgttctagatcagagtagaagactgttccaaactacctgctggatttattgaacttggatctgtatgtgtgtcacatatcttcataaattcatgattaagatggattgaaatatcttttatctttttggtatggatagttctatatgttggtgtggctttgttagatgtatacatgcttagatacatgaagcaacgtgctgctactgtttagtaattgctgttcatttgtctaataaacagataaggatatgtatttatgttgctgttggttttgctggtactttgttggatacaaatgcttcaatacagaaaacagcatgctgctacgatttaccatttatctaatcttatcatatgtctaatctaataaacaaacatgcttttaaattatcttcatatgcttggatgatggcatacacagcggctatgtgtggttttttaaatacccagcatcatgggcatgcatgacactgctttaatatgctttttatttgcttgagactgtttcttttgtttatactgaccctttagttcggtgactcttctgcaggtcgactttaacttagcctaggatccatggcccagtccaagcacggcctgaccaaggagatgaccatgaagtaccgcatggagggctgcgtggacggccacaagttcgtgatcaccggcgagggcatcggctaccccttcaagggcaagcaggccatcaacctgtgcgtggtggagggcggccccttgcccttcgccgaggacatcttgtccgccgccttcatgtacggcaaccgcgtgttcaccgagtacccccaggacatcgtcgactacttcaagaactcctgccccgccggctacacctgggaccgctccttcctgttcgaggacggcgccgtgtgcatctgcaacgccgacatcaccgtgagcgtggaggagaactgcatgtaccacgagtccaagttctacggcgtgaacttccccgccgacggccccgtgatgaagaagatgaccgacaactgggagccctcctgcgagaagatcatccccgtgcccaagcagggcatcttgaagggcgacgtgagcatgtacctgctgctgaaggacggtggccgcttgcgctgccagttcgacaccgtgtacaaggccaagtccgtgccccgcaagatgcccgactggcacttcatccagcacaagctgacccgcgaggaccgcagcgacgccaagaaccagaagtggcacctgaccgagcacgccatcgcctccggctccgccttgccctccggactcagatctcgatagggtaccaatggccagttaacagatccagctgctgctgttctagggttcacaagtctgcctatttgtcttccccaatggagctatggttgtctggtctggtccttggtcgtgtcccgtttcattgtgtactatttacctgtaatgtgtatccttaagtctggtttgatggtgtctgaaacgttttgctgtggtagagcagcatggaagaactataatgaataagtgatccctaatcattgtgtccaaattttgcttctgctatacccttttgtgctgtttcttatgttttgcttaaaaatttgatctgacaaacaaatttgtctaaattatgctcttgttctgactgtgtactgtacacatttgtattgctaccggtttggcacatagttttctctttgattgcagatcaaacccttctgattgcagattgcttggctatggctgatgtgctcactgttcttctttagcttgtatattgctgatggtggcttggctacggctgaaaaagttgctgctgcgccgacttggcaactgttgctccagtaatgctttgtcctctcttcctagccgccgacttggcacttggcagctgttgctcctgtaatgcgttgttatctcttatctcttgagatgtactatgattttgaggctgtttgacttgtgccagattgccagtgctgatgctatattatctcaggtttttatgctagtatatgttttactgtgtgctgcctgtgtcgagttacgtaatctattgaaccgctatgcgtgttgatgccctgttgttgcttgccagattgatgcccctgttgcttgcagcttgcaagctgtagtgaaatcctaaaattcgaaaccaaatctattctgaacttttgaagatctgtgatgtccggaagaaaagattcaaacagataaacgggactctccagaatctataaaataaatgatcgacaaacgctttgctttggtaggcttcctagttagttagcggaccgaagcttcggtccgggcctagaaggccagcttcggccgcccctcggtaccctgggatctgcccttactttaacgcctctaaccaacacccctttatctttataaggaacaataaacagaatttgccccactgttctaaatcacctaataatatccccagctaaaaacaataaaggtttcctagaattaagacaagcatgactgttcctccaggagggtttggaacattgttgcagtcttgcagatacgggcgaagggtgagaaacagagcggagggctggaggtgacctcggtagtcgacgccggagttgagcttgacaacgacggggcggcccctgatggacttgaggaagtccgatggcgtcttcaccgtcccgccggcgcccgaggcgggcctgtcgctgccgccgccgccgctgctcatcttgcgcgctgtgcccccggcggtgtccctgtgttgcggatcgcgggtgggccaggtggatgcgagggcgacccgtttggactccggccggagccgccggatccctggtcggtgtcagtgccgtttactctgggccccacgtgtcagtaccgtctgtagatgacaacaacccgtcgtccacagtcatgtccaaaatatcctttcttcttttttttcgattcggatatctatcttccttttttttttccaaaaatcttcttgacgcaccagcgcgcacgtttgtggtaaacgccgacacgtcggtcccacgtcgatagaccccacccaccagtgagtagcgtgtacgtattcgggggtgacggacgtgtcgccgtcgtcttgctagtcccattcccatctgagccacacatctctgaacaaaaaaaaggagggaggcctccacgcacatccccctccgtgccacccgccccaaaccctcgcgccgcctccgagacagccgccgcaaccatggccaccgccgccgccgcgtctaccgcgctcactggcgccactaccgctgcgcccaaggcgaggcgccgggcgcacctcctggccacccgccgcgccctcgccgcgcccatcaggtgctcagcggcgtcacccgccatgccgatggctcccccggccaccccgctccggccgtggggccccaccgagccccgcaagggtgctgacatcctcgtcgagtccctcgagcgctgcggcgtccgcgacgtcttcgcctaccccggcggcgcgtccatggagatccaccaggcactcacccgctcccccgtcatcgccaaccacctcttccgccacgagcaaggggaggcctttgccgcctccggctacgcgcgctcctcgggccgcgtcggcgtctgcatcgccacctccggccccggcgccaccaacctagtctccgcgctcgccgacgcgctgctcgattccgtccccatggtcgccatcacgggacaggtggcgcgacgcatgattggcaccgacgccttccaggagacgcccatcgtcgaggtcacccgctccatcaccaagcacaactacctggtcctcgacgtcgacgacatcccccgcgtcgtgcaggaggctttcttcctcgcctcctctggtcgaccagggccggtgcttgtcgacatccccaaggacatccagcagcagatggcggtgcctgtctgggacaagcccatgagtctgcctgggtacattgcgcgccttcccaagccccctgcgactgagttgcttgagcaggtgctgcgtcttgttggtgaatcgcggcgccctgttctttatgtgggcggtggctgcgcagcatctggtgaggagttgcgacgctttgtggagctgactggaatcccggtcacaactactcttatgggcctcggcaacttccccagcgacgacccactgtctctgcgcatgctaggtatgcatgggacggtgtatgcaaattatgcagtggataaggccgatctgttgcttgcacttggtgtgcggtttgatgatcgcgtgacagggaagattgaggcttttgcaagcagggctaagattgtgcacgttgatattgatccggctgagattggcaagaacaagcagccacatgtgtccatctgtgcagatgttaagcttgctttgcagggcatgaatgctcttcttgaaggaagcacatcaaagaagagctttgactttggctcatggaacgatgagttggatcagcagaagagggaattcccccttgggtataaaacatctaatgaggagatccagccacaatatgctattcaggttcttgatgagctgacgaaaggcgaggccatcatcggcacaggtgttgggcagcaccagatgtgggcggcacagtactacacttacaagcggccaaggcagtggttgtcttcagctggtcttggggctatgggatttggtttgccggctgctgctggtgcttctgtggcaaacccaggtgtcactgttgttgacatcgatggagatggtagctttctcatgaacgttcaggagctagctatgatccgaattgagaacctcccagtgaaggtctttgtgctaaacaaccagcacctggggatggtggtgcagttggaggacaggttctataaggccaacagagcgcacacatacttgggaaacccagagaatgaaagtgagatatatccagatttcgtgacgatcgccaaagggttcaacattccagcggtccgtgtgacaaagaagaacgaagtccgcgcagcgataaagaagatgctcgagactccagggccgtacctcttggatataatcgtcccacaccaggagcatgtgttgcctatgatccctagtggtggggctttcaaggatatgatcctggatggtgatggcaggactgtgtactgatgactagctagtcagttaacagatctgccagatcctcggtgtacaaataacccgtcttatcctatgagacgggccggcgtcagtgtgttctggaggaatttttatgtcagagcctttttctttgtgtgcttgatgtagatgccaagggaagcttattggctgttgaagcttgatgcaaaataaattatggaactctgttttttgtttatctaataataactagcaaatatgcttccattgcattgaaactaacagccttttgtgtttccaagttttattttgtgacaatgtcatctatttcaattagttgtggaatcggaaacttgcaggactaacttggaaactccaatccctcagcatcctggactttttcctggtgtaatccatgtagatattattttaatcatcattttagttctggaggtttttccatctccggttttgctcccctttcttcaaaaaaaaaaaaaaaatgccgtaggcgccgcaacgcccacctgttgttcaaactcatgggcacgagtggctcgaagattttatacaacaattgctgtagtttcaccgttgctggtgaagaagcatttttttaaaaaaatatagtggtattcattttaattagtttagttgtgcagcgagcaaaatttggacatgctctgctcggaatctgatcgacctagacacagattagcagcagtagctttgtcatctgttccaagagttgcgatctgatagaagaaaaaaaaaccttcccttcaatgtaaaaccgaaactaacaagaaagaagcacagtgccgtttaggcaagtatggagtacgtattaagcatgtagaaggccatgcatgaaccactaacaagaaagaagcgcagtgccattcaggcaagcataagcatgtagattggcatgcatgaacaactaacagtagatcgtctctggtctgattagaagttttttgggaagccaagaaatcatgtacaactggttccatctcaaattccgtggcaaaaagaggcctaagcaacataaagcttcggtccgggcctagaaggccgaagtacttggtcttcctagtcgagtagatcacattcaagcttggtcacccggtccgtcaatattctgattccgatgacttcgtaggttcctagctcaagccgctcgtgtccaagcgtcacttacgattagctaatgattacggcatctaggaccgactagtggcgcgccgactagctagctaaggtaccgagctcgaattcattccgattaatcgtggcctcttgctcttcaggatgaagagctatgtttaaacgtgcaagcgctactagacaattcagtacattaaaaacgtccgcaatgtgttattaagttgtctaagcgtcaatttgtttacaccacaatatatcctgcca

SEQ ID NO: 18 - DNA, 14932 bp, synthetic construct
  misc_feature 1..14932: note = PHP93271
  source 1..14932: mol_type = other DNA
gtttacccgccaatatatcctgtcaaacactgatagttttaaactgaaggcgggaaacgacaatctgatcatgagcggagaattaagggagtcacgttatgacccccgccgatgacgcgggacaagccgttttacgtttggaactgacagaaccgcaacgttgaaggagccactcagcaagctggtacgattgtaatacgactcactatagggcgaattgagcgctgtttaaacgctcttcaactggaagagcggttacgctgtttaaacgctcttcaactggaagagcggttactaccggttcactagctagctgctaatcgagctagttaccctatgaggtgacatgaagcgctcacggttactatgacggttagcttcacgactgttggtggcagtagcgtacgacttagctatagttccggacttacccttaagcgatttaaatcctgaggcaattcttaccctagctccctgcggctgttacgcggtcccccatcaatcttctgttcttgcggttgtagcctgtgtaacagtgctagagtatgtatgataaataggttttaagtctgcttacatgacattttttattgtggaagagacatataaaaattagagagagtggttctcatgcaacggcggacggcccggtgctaaaagagcttcaagacaaaataatgaaacaggaagagagtagatttatctaagagccaactttattatatgaatgtgtttattgttggctttagatgatatggtaaggagttagagctaataatagataggctctattattattattattaattaaactcgctctaaggaggaaagtgggaggaagggacgaggacgaagactactggaagcatcgtgcatggatgatggatgtggtgtctcttaatgtaggtggccggaggatgtacgtgttaattgcgcgataagcactcagatccaaccgcaaactacctccacactgacacactgatagagagaaagagagacctccgacgactgccgccgcagatgagccacgtacgtatacgacgtctgccggccggctcaggctgccgccatcaccctgctcgaaagtcgcgttaggcggcgccagctacataggagtatctagtctagccagttagtatactactactgcgctgatgatgaattaactctgcatagatactgtacttgcctccctccaacacccaaccacctcctgctcggctcttaataacttggacacggatcgatgccatccaaggaagaacacgacgacgacgacggaacatccaccatgcaagcttgcatccatacgccgatacgcgtgcatccatccatccaccattatttccattttccaccgatcacacgtacacaggcctatttaaggagcgacatcccactgcaactctcctcaccactcatcaccagctagctctagcaaagcacttgccatctaccgaccgccgcattccaaacagcccgacgagctagcagagcggcaggcacctccctcctcaaggaacccatggcggccaatgcgggcggcggtggagcgggaggaggcagcggcagcggcagcgtggctgcgccggcggtgtgccgccccagcggctcgcggtggacgccgacgccggagcagatcaggatgctgaaggagctctactacggctgcggcatccggtcgcccagctcggagcagatccagcgcatcaccgccatgctgcggcagcacggcaagatcgagggcaagaacgtcttctactggttccagaaccacaaggcccgcgagcgccagaagcgccgcctcaccagcctcgacgtcaacgtgcccgccgccggcgcggccgacgccaccaccagccaactcggcgtcctctcgctgtcgtcgccgccgccttcaggcgcggcgcctccctcgcccaccctcggcttctacgccgccggcaatggcggcggatcggctgtgctgctggacacgagttccgactggggcagcagcggcgctgctatggccaccgagacatgcttcctgcaggactacatgggcgtgacggacacgggcagctcgtcgcagtggccacgcttctcgtcgtcggacacgataatggcggcggccgcggcgcgggcggcgacgacgcgggcgcccgagacgctccctctcttcccgacctgcggcgacgacggcggcagcggtagcagcagctacttgccgttctggggtgccgcgtccacaactgccggcgccacttcttccgttgcgatccaacagcaacaccagctgcaggagcagtacagcttttacagcaacagcaacagcacccagctggccggcaccggcaaccaagacgtatcggcaacagcagcagcagccgccgccctggagctgagcctcagctcatggtgctccccttaccctgctgcagggagtatgtgagagcaacgcgagctgccactgctcttcactgatgtctctggaatggaaggaggaggaagtgagaacagatcattcgacaaagcagcattagtccgttgatcggtggaagaccactcgtcagtgttgagttgaatgtttgatcaataaaatacggcaatgctgtaagggttgttttttatgccattgataatacactgtactgttcagttgttgaactctatttcttagccatgccaagtgcttttcttattttgaataacattacagcaaaaagttgaaagacaaaaaaaaaaacccccgaacagagtgctttgggtcccaagcttctttagactgtgttcggcgttccccctaaatttctccccctatatctcactcacttgtcacatcagcgttctctttccccctatatctccacgctctacagcagttccacctatatcaaacctctataccccaccacaacaatattatatactttcatcttcaactaactcatgtaccttccaatttttttctactaataattatttacgtgcacagaaacttagcaaggagagagagagcgggaatttaaatgctcggcgttaggcttttagtccgctaggtggctagaccgaggttaggacgctagttcactaggggcctagtggtgttttaagacgtcacggtcacccggtccgggcctagaaggccagcttcaagtttgtacaaaaaagcaggctccggccagaatggcccggaccgaagcttgcatgcctgcagtgcagcgtgacccggtcgtgcccctctctagagataatgagcattgcatgtctaagttataaaaaattaccacatattttttttgtcacacttgtttgaagtgcagtttatctatctttatacatatatttaaactttactctacgaataatataatctatagtactacaataatatcagtgttttagagaatcatataaatgaacagttagacatggtctaaaggacaattgagtattttgacaacaggactctacagttttatctttttagtgtgcatgtgttctcctttttttttgcaaatagcttcacctatataatacttcatccattttattagtacatccatttagggtttagggttaatggtttttatagactaatttttttagtacatctattttattctattttagcctctaaattaagaaaactaaaactctattttagtttttttatttaataatttagatataaaatagaataaaataaagtgactaaaaattaaacaaataccctttaagaaattaaaaaaactaaggaaacatttttcttgtttcgagtagataatgccagcctgttaaacgccgtcgacgagtctaacggacaccaaccagcgaaccagcagcgtcgcgtcgggccaagcgaagcagacggcacggcatctctgtcgctgcctctggacccctctcgagagttccgctccaccgttggacttgctccgctgtcggcatccagaaattgcgtggcggagcggcagacgtgagccggcacggcaggcggcctcctcctcctctcacggcaccggcagctacgggggattcctttcccaccgctccttcgctttcccttcctcgcccgccgtaataaatagacaccccctccacaccctctttccccaacctcgtgttgttcggagcgcacacacacacaaccagatctcccccaaatccacccgtcggcacctccgcttcaaggtacgccgctcgtcctcccccccccccctctctaccttctctagatcggcgttccggtccatgcatggttagggcccggtagttctacttctgttcatgtttgtgttagatccgtgtttgtgttagatccgtgctgctagcgttcgtacacggatgcgacctgtacgtcagacacgttctgattgctaacttgccagtgtttctctttggggaatcctgggatggctctagccgttccgcagacgggatcgatttcatgattttttttgtttcgttgcatagggtttggtttgcccttttcctttatttcaatatatgccgtgcacttgtttgtcgggtcatcttttcatgcttttttttgtcttggttgtgatgatgtggtctggttgggcggtcgttctagatcggagtagaattctgtttcaaactacctggtggatttattaattttggatctgtatgtgtgtgccatacatattcatagttacgaattgaagatgatggatggaaatatcgatctaggataggtatacatgttgatgcgggttttactgatgcatatacagagatgctttttgttcgcttggttgtgatgatgtggtgtggttgggcggtcgttcattcgttctagatcggagtagaatactgtttcaaactacctggtgtatttattaattttggaactgtatgtgtgtgtcatacatcttcatagttacgagtttaagatggatggaaatatcgatctaggataggtatacatgttgatgtgggttttactgatgcatatacatgatggcatatgcagcatctattcatatgctctaaccttgagtacctatctattataataaacaagtatgttttataattattttgatcttgatatacttggatgatggcatatgcagcagctatatgtggatttttttagccctgccttcatacgctatttatttgcttggtactgtttcttttgtcgatgctcaccctgttgtttggtgttacttctgcaggtcgactttaacttagcctaggatccatggcctcttcatctgcacccaggttccgtgtctattccaagtacctctttctaacatatcctgaatgtacccttgagccacagtacgccttggattcacttcgcactctcttgaacaaatatgagcccctctacatcgctgctgttagagagctccacgaagatggatcaccacatctgcacgttctcgtgcagaacaagcttcgtgcttccatcaccaatcccaatgccttaaacctccgtatggatacatctccattctccatattccatccaaatatacaagctgccaaagactgcaaccaagttcgtgattacatcacgaaggaggttgactccgatgtaaacacagctgagtggggaacattcgtggctgtttcaactccaggtcgtaaagaccgtgatgcggatatgaaacagatcattgaatctagttcctctcgcgaggaattcctcagcatggtttgcaatcgttttccgtttgaatggtctatccgtctcaaagacttcgagtacacggcacgccatctatttcctgacccagttgccacttacacacctgagtttccaaccgaatcactcatttgccatgagaccattgaaagctggaaaaatgaacatctctactctctgtccctcgagagctacatcctgtgcaccagcacccctgccgaccaggcccagtccgacctcgaatggatggacgactacagccgtagtcaccggggaggcataagtccatctacatctgcgggccaaccagaacaggaaagacttcctgggcaaggtctctaggcgtacctagtggtacctgacatcttatagtctgcaacctctcgtgtctgaattcctatctttatcaagtgttattgcttccacgactataggacagctttcgtcgaaaggttttgctcatgtgatctcgaaggattcatctagtctgatttttcgtgacttgtatcggttttattggattcatccaacatatatcaataaaaaatgagttgtgtttcctttcttcctagttcagttaaaattatttccctcctgcgcttgtgctgtaattgtctgtgtacctgttgtttgtgactgtgttagttcccttggatatgatttcgtatttgatatgtacatggagatagcttagcttcattattggagtatgaagttagtatgacatagtcactctcctggaaaattgacactgcaaaccatatttttattctgaaccacaaatcctagtcagtccgctggcatatgccgtccgtttgctgaatccagaacgtgggtttggagatgtacggctgagatgcctctatgcgaaggggatttcgtggtgaaacgagatgggagtagagcaacgcccgtggaagatgcttcaaacttccacacttttgagcaacgatcggcagtagtaaggtagacgatttcaagatcaaagcatatgaagataaacaacatcaacaacaaaatttgttggggttctatagagagaaacagagctacatacatacactgttttgtatctaccatctgagatgatgaaaagatgaaaaactaaagaatgccccggcgccaacgccaggacacgccgcgcgcgcgtcacccgagccatctcttgacccagccggcgctgtatatttacacacgttgcagcatcgatcaccacctgttcgatcgcgtcgccgtcaccaagcttggcgcgccggtcacccggtccgggcctagaaggccacccggggcgacttattgaactagtctagggcgcggctaacaacctagcttagattgccttgtctaaacccttaggctaacgcgccaccccccgaattcctgcccttaaggccaattgttcaagattcattcaacaattgaaacatctcccatgattaaatcagtataaggttgctatggtcttgcttgacaaagtttttttttgagggaatttcaactaaatttttgagtgaaactatcaaatactgattttaaaaaatttttataaaaggaagcgcagagataaaaggccatctatgctacaaaagtacccaaaaatgtaatcctaaagtatgaattgcattttttttttgtttggacgaaaggaaaggagtattaccacaagaatgatatcatcttcatatttagatcttttttgggtaaagcttgagattctctaaatatagagaaatcagaagaaaaaaaaaccgtgttttggtggttttgatttctagcctccacaataactttgacggcgtcgacaagtctaacggacaccaagcagcgaaccaccagcgccgagccaagcgaagcagacggccgagacgttgacaccttcggcgcggcatctctcgagagttccgctccggcgctccacctccaccgctggcggtttcttattccgttccgttccgcctcctgctctgctcctctccacaccacacggcacgaaaccgttacggcaccggcagcacccagcacgggagaggggattcctttcccaccgttccttccctttccgccccgccgctataaatagccagccccatccccagcttttttccccaatctcatctcctctctcctgttgttcggagcacacgcacaatccgatcgatccccaaatccccttcgtctctcctcgcgagcctcgtggatcccagcttcaaggtacggcgatcgatcatcccccctccttctctctaccttcttttctctagactacatcggatggcgatccatggttagggcctgctagtttcccttcctgttttgtcgatggctgcgaggcacaatagatctgatggcgttatgacggctaacttgtcatgttgttgcgatttatagtccctttaggagatcagtttaatttctcggatggttcgagatcggtggtccatggttagtaccctaagatccgcgctgttagggttcgtagatggaggcgacctgttctgattgttaacttgtcagtacctgggaaatcctgggatggttctagctcgtccgcagatgagatcgatttcatgatcctctgtatcttgtttcgttgcctaggttccgtctaatctatccgtggtatgatgtagatgttttgatcgtgctaactacgtcttgtaaagttaattgtcaggtcataatttttagcatgcctttttttttgtttggttttgtctaattgggctgtcgttctagatcagagtagaagactgttccaaactacctgctggatttattgaacttggatctgtatgtgtgtcacatatcttcataaattcatgattaagatggattgaaatatcttttatctttttggtatggatagttctatatgttggtgtggctttgttagatgtatacatgcttagatacatgaagcaacgtgctgctactgtttagtaattgctgttcatttgtctaataaacagataaggatatgtatttatgttgctgttggttttgctggtactttgttggatacaaatgcttcaatacagaaaacagcatgctgctacgatttaccatttatctaatcttatcatatgtctaatctaataaacaaacatgcttttaaattatcttcatatgcttggatgatggcatacacagcggctatgtgtggttttttaaatacccagcatcatgggcatgcatgacactgctttaatatgctttttatttgcttgagactgtttcttttgtttatactgaccctttagttcggtgactcttctgcaggtcgactttaacttagcctaggatccatggcccagtccaagcacggcctgaccaaggagatgaccatgaagtaccgcatggagggctgcgtggacggccacaagttcgtgatcaccggcgagggcatcggctaccccttcaagggcaagcaggccatcaacctgtgcgtggtggagggcggccccttgcccttcgccgaggacatcttgtccgccgccttcatgtacggcaaccgcgtgttcaccgagtacccccaggacatcgtcgactacttcaagaactcctgccccgccggctacacctgggaccgctccttcctgttcgaggacggcgccgtgtgcatctgcaacgccgacatcaccgtgagcgtggaggagaactgcatgtaccacgagtccaagttctacggcgtgaacttccccgccgacggccccgtgatgaagaagatgaccgacaactgggagccctcctgcgagaagatcatccccgtgcccaagcagggcatcttgaagggcgacgtgagcatgtacctgctgctgaaggacggtggccgcttgcgctgccagttcgacaccgtgtacaaggccaagtccgtgccccgcaagatgcccgactggcacttcatccagcacaagctgacccgcgaggaccgcagcgacgccaagaaccagaagtggcacctgaccgagcacgccatcgcctccggctccgccttgccctccggactcagatctcgatagggtaccaatggccagttaacagatccagctgctgctgttctagggttcacaagtctgcctatttgtcttccccaatggagctatggttgtctggtctggtccttggtcgtgtcccgtttcattgtgtactatttacctgtaatgtgtatccttaagtctggtttgatggtgtctgaaacgttttgctgtggtagagcagcatggaagaactataatgaataagtgatccctaatcattgtgtccaaattttgcttctgctatacccttttgtgctgtttcttatgttttgcttaaaaatttgatctgacaaacaaatttgtctaaattatgctcttgttctgactgtgtactgtacacatttgtattgctaccggtttggcacatagttttctctttgattgcagatcaaacccttctgattgcagattgcttggctatggctgatgtgctcactgttcttctttagcttgtatattgctgatggtggcttggctacggctgaaaaagttgctgctgcgccgacttggcaactgttgctccagtaatgctttgtcctctcttcctagccgccgacttggcacttggcagctgttgctcctgtaatgcgttgttatctcttatctcttgagatgtactatgattttgaggctgtttgacttgtgccagattgccagtgctgatgctatattatctcaggtttttatgctagtatatgttttactgtgtgctgcctgtgtcgagttacgtaatctattgaaccgctatgcgtgttgatgccctgttgttgcttgccagattgatgcccctgttgcttgcagcttgcaagctgtagtgaaatcctaaaattcgaaaccaaatctattctgaacttttgaagatctgtgatgtccggaagaaaagattcaaacagataaacgggactctccagaatctataaaataaatgatcgacaaacgctttgctttggtaggcttcctagttagttagcggaccgaagcttcggtccgggcctagaaggccagcttcggccgcccctcggtaccctgggatctgcccttactttaacgcctctaaccaacacccctttatctttataaggaacaataaacagaatttgccccactgttctaaatcacctaataatatccccagctaaaaacaataaaggtttcctagaattaagacaagcatgactgttcctccaggagggtttggaacattgttgcagtcttgcagatacgggcgaagggtgagaaacagagcggagggctggaggtgacctcggtagtcgacgccggagttgagcttgacaacgacggggcggcccctgatggacttgaggaagtccgatggcgtcttcaccgtcccgccggcgcccgaggcgggcctgtcgctgccgccgccgccgctgctcatcttgcgcgctgtgcccccggcggtgtccctgtgttgcggatcgcgggtgggccaggtggatgcgagggcgacccgtttggactccggccggagccgccggatccctggtcggtgtcagtgccgtttactctgggccccacgtgtcagtaccgtctgtagatgacaacaacccgtcgtccacagtcatgtccaaaatatcctttcttcttttttttcgattcggatatctatcttccttttttttttccaaaaatcttcttgacgcaccagcgcgcacgtttgtggtaaacgccgacacgtcggtcccacgtcgatagaccccacccaccagtgagtagcgtgtacgtattcgggggtgacggacgtgtcgccgtcgtcttgctagtcccattcccatctgagccacacatctctgaacaaaaaaaaggagggaggcctccacgcacatccccctccgtgccacccgccccaaaccctcgcgccgcctccgagacagccgccgcaaccatggccaccgccgccgccgcgtctaccgcgctcactggcgccactaccgctgcgcccaaggcgaggcgccgggcgcacctcctggccacccgccgcgccctcgccgcgcccatcaggtgctcagcggcgtcacccgccatgccgatggctcccccggccaccccgctccggccgtggggccccaccgagccccgcaagggtgctgacatcctcgtcgagtccctcgagcgctgcggcgtccgcgacgtcttcgcctaccccggcggcgcgtccatggagatccaccaggcactcacccgctcccccgtcatcgccaaccacctcttccgccacgagcaaggggaggcctttgccgcctccggctacgcgcgctcctcgggccgcgtcggcgtctgcatcgccacctccggccccggcgccaccaacctagtctccgcgctcgccgacgcgctgctcgattccgtccccatggtcgccatcacgggacaggtggcgcgacgcatgattggcaccgacgccttccaggagacgcccatcgtcgaggtcacccgctccatcaccaagcacaactacctggtcctcgacgtcgacgacatcccccgcgtcgtgcaggaggctttcttcctcgcctcctctggtcgaccagggccggtgcttgtcgacatccccaaggacatccagcagcagatggcggtgcctgtctgggacaagcccatgagtctgcctgggtacattgcgcgccttcccaagccccctgcgactgagttgcttgagcaggtgctgcgtcttgttggtgaatcgcggcgccctgttctttatgtgggcggtggctgcgcagcatctggtgaggagttgcgacgctttgtggagctgactggaatcccggtcacaactactcttatgggcctcggcaacttccccagcgacgacccactgtctctgcgcatgctaggtatgcatgggacggtgtatgcaaattatgcagtggataaggccgatctgttgcttgcacttggtgtgcggtttgatgatcgcgtgacagggaagattgaggcttttgcaagcagggctaagattgtgcacgttgatattgatccggctgagattggcaagaacaagcagccacatgtgtccatctgtgcagatgttaagcttgctttgcagggcatgaatgctcttcttgaaggaagcacatcaaagaagagctttgactttggctcatggaacgatgagttggatcagcagaagagggaattcccccttgggtataaaacatctaatgaggagatccagccacaatatgctattcaggttcttgatgagctgacgaaaggcgaggccatcatcggcacaggtgttgggcagcaccagatgtgggcggcacagtactacacttacaagcggccaaggcagtggttgtcttcagctggtcttggggctatgggatttggtttgccggctgctgctggtgcttctgtggcaaacccaggtgtcactgttgttgacatcgatggagatggtagctttctcatgaacgttcaggagctagctatgatccgaattgagaacctcccagtgaaggtctttgtgctaaacaaccagcacctggggatggtggtgcagttggaggacaggttctataaggccaacagagcgcacacatacttgggaaacccagagaatgaaagtgagatatatccagatttcgtgacgatcgccaaagggttcaacattccagcggtccgtgtgacaaagaagaacgaagtccgcgcagcgataaagaagatgctcgagactccagggccgtacctcttggatataatcgtcccacaccaggagcatgtgttgcctatgatccctagtggtggggctttcaaggatatgatcctggatggtgatggcaggactgtgtactgactagctagtcagttaacagatctgccagatcctcggtgtacaaataacccgtcttatcctatgagacgggccggcgtcagtgtgttctggaggaatttttatgtcagagcctttttctttgtgtgcttgatgtagatgccaagggaagcttattggctgttgaagcttgatgcaaaataaattatggaactctgttttttgtttatctaataataactagcaaatatgcttccattgcattgaaactaacagccttttgtgtttccaagttttattttgtgacaatgtcatctatttcaattagttgtggaatcggaaacttgcaggactaacttggaaactccaatccctcagcatcctggactttttcctggtgtaatccatgtagatattattttaatcatcattttagttctggaggtttttccatctccggttttgctcccctttcttcaaaaaaaaaaaaaaaatgccgtaggcgccgcaacgcccacctgttgttcaaactcatgggcacgagtggctcgaagattttatacaacaattgctgtagtttcaccgttgctggtgaagaagcatttttttaaaaaaatatagtggtattcattttaattagtttagttgtgcagcgagcaaaatttggacatgctctgctcggaatctgatcgacctagacacagattagcagcagtagctttgtcatctgttccaagagttgcgatctgatagaagaaaaaaaaaccttcccttcaatgtaaaaccgaaactaacaagaaagaagcacagtgccgtttaggcaagtatggagtacgtattaagcatgtagaaggccatgcatgaaccactaacaagaaagaagcgcagtgccattcaggcaagcataagcatgtagattggcatgcatgaacaactaacagtagatcgtctctggtctgattagaagttttttgggaagccaagaaatcatgtacaactggttccatctcaaattccgtggcaaaaagaggcctaagcaacataaagcttcggtccgggcctagaaggccgaagtacttggtcttcctagtcgagtagatcacattcaagcttggtcacccggtccgtcaatattctgattccgatgacttcgtaggttcctagctcaagccgctcgtgtccaagcgtcacttacgattagctaatgattacggcatctaggaccgactagtggcgcgccgactagctagctaaggtaccgagctcgaattcattccgattaatcgtggcctcttgctcttcaggatgaagagctatgtttaaacgtgcaagcgctactagacaattcagtacattaaaaacgtccgcaatgtgttattaagttgtctaagcgtcaatttgtttacaccacaatatatcctgcca

SEQ ID NO: 19 - DNA, 20419 bp, synthetic construct
  misc_feature 1..20419: note = PHP93559
  source 1..20419: mol_type = other DNA
gtttacccgccaatatatcctgtcaaacactgcggccgcacttgaccgcggatggagccggagctgtggtgaggccatcgacgggaggtgggggagaacacagtctcagtgttctttgtgagtccgcaaggtttttagcttttctgtattaattaaggttgctgttggctgtagaatacggtcgtggaagagctgtatcggtagctactacgtaagctattatatactggaagtctggagctcgtcgatctccggtcgtcttcctccatttctcctcgtcttgctttgactgctgctaccatttgcttctgttttctgatgaagcatgccatgtcggccaccagtgtttgtgtggtttttgcagggaatggctttcaagtgctgtgattgaatggccctcgtcgtcctcggctgagctcacatggacgcgtcatgtgagtgagatatatgatcatatgatgagtggggttcgggtgagtgcgtacttgaagtaggatcccgctttcactcattcattcattggcctttaaaccgggaaattttcgcgaggagatggagggaagcaagcagggtgacgagtgcagagtgccgcgagcgctttgtcaaaaggcaccgccgtaggcaaaaaaatcaatggccctgactgactcgatggtagtactactgtagagactagagagggttgctccccatatcttcgtgtgacttttactccagcattgcatttccgtcattgagacgttaattaatagcagctttcgggacagatgactgtggccatgtttcgtcacggccgcttcgtgccagctgggggtactatagtactgtgattttgttagtaaaaactttcattaggccaccattgacgaccgggccttcgcttttgctgcgctaattaaccatttcccggcgaccgaagggaacatgaacatgccccgacacatgagggcatgaggactagtgttctccctgtcgttcgttgacttgactagtgatagtttaaacgctcttcaactggaagagcggttactaccggttcactagctagctgctaatcgagctagttaccctatgaggtgacatgaagcgctcacggttactatgacggttagcttcacgactgttggtggcagtagcgtacgacttagctatagttccggacttacctagctaataacttcgtatagcatacattatacgaagttatggttaccgaattcgagctcggtaccctggttcacaaactcaatacaacacacagtggagtagggtattacgctccggcggcccgaaccactctaaatccttgtgtcctcgtgtgctcttccaccattaatgactgtaattgcagggacacgaagagttgtagcgcttttgccaacaagatccgctatatgctagtagagtggaacctgcacagcaacaagcatccaataatctgagaataagaattatgtgtggtgatggttctcatctctgcaactcgccattttcgcgagagaaccaaatccaagttggtgaagatcatgatttgggctcatgggctggcatagtagctattacctttgcaattgtggttcgaatctatccgatattctccttttcagggagagctaatgcttatgcttattgggtattttggtttgacactgcttcacgcccaaaaaaaggcaactatgtctgagttggatatggcccaaaaaaaggcagctatgtctgagttggatatggaagtcttctttcgtttagggtgaagtaagaccaagctcatgagcttattatcttaggtcggaacaaattagttgataggcatggcacatttatcaaattataatgattttaacagaaaagcaacacctctttttcagcagcaccagctttgcaagctgcaattgacactccaagcatagtatttgctccaaactcagcctgcatttcgcacaatatcatatctatttccatttggataaaatatattttccagaaatatgggaacagaatcaagatacagaaaaaagttgtggtagtagtggtaagtggaaacacaagtacagtgaaaagatagcattatttctgaacagtcaaattaaccgaaataagtagtatcacatactgcccctaaattgactacacccaatgtaaagaattgcttgagcatattgagccatcagttgtttgtttgtgtaacggatttgacaatgcagagttcaggagcaaaaaaccgcaaaggagagaaagagggaaaggatctcctagtatcccaccttgtggcgcgccctgtcaagtgcatgatggcctggtcgatctgcgtctgctgctgcggttccatcccaacgagtgcctccgacaccttgtcgttgatcacccgcaccgcgtaggcgacccccctggcgaggaacttccgcctctcggaggccccggccgcgtcggcggcggcgccctcgagcgcgcccacgctagccgtagatgctcggtgcacggccttgttggtgtgcaactcgacctcaacggccggtgcgctacgcccgtcaaggatctggcgcgcccgcaccctcgtgatcacggtgggcgcctcccgcctcatgtggccgacgatgaaaagcgccgggttaggggccttggcgcgcaccgccgtattcagggcctcctcgctcttgcgcgagagcaggtgcttccccaggtactcctgcactgacaaggctgccacagcggtggaatttgtcctcacgacttcgccacgtcgtcctcacctccctggcttcccacgactccgccgtatcgaggtgctcggtgggtcgtcttaatccgaagtccgaactaggaagacgagacagagaggtctgaggaatgggcctcgtttgatgttgagctgaattatttttccagcataagcccaggtcttggtccatgaacaaaattactagaaacccagcccagtactacgatctaaaagagggactgccactggatagctctctctagcattctccacgctccaatacagcggcgtcgtgtctatccgggtctatccgcgaacacgtgagaactctccagaaactgctttctcctccacttcatctctctcgctttccctctataaaaagaccccttctaggaattgagggagacagcaagcaccaagcagcgatccgaagctcaatcaattcactcaaacctcttccccaaatcttcgattagatcttcgttgacaagaagactagaaccgaacctgacatgtccaacctgctcacggttcaccagaaccttccggctcttccagtggacgcgacgtccgatgaagtcaggaagaacctcatggacatgttccgcgacaggcaagcgttcagcgagcacacctggaagatgctgctctccgtctgccgctcctgggctgcatggtgcaagctgaacaacaggaagtggttccccgctgagcccgaggacgtgagggattaccttctgtacctgcaagcgcgaggtttgtttctgcttctacctttgatatatatataataattatcattaattagtagtaatataatatttcaaatatttttttcaaaataaaagaatgtagtatatagcaattgcttttctgtagtttataagtgtgtatattttaatttataacttttctaatatatgaccaaaacatggtgatgcctaggtctggcagtgaagaccatccagcaacaccttggacaactgaacatgcttcacaggcgctccggcctcccgcgccccagcgactcgaacgccgtgagcctcgtcatgcgccgcatcaggaaggaaaacgtcgatgccggcgaaagggcaaagcaggccctcgcgttcgagaggaccgatttcgaccaggtccgcagcctgatggagaacagcgacaggtgccaggacattaggaacctggcgttcctcggaattgcatacaacacgctcctcaggatcgcggaaattgcccgcattcgcgtgaaggacattagccgcaccgacggcggcaggatgcttatccacattggcaggaccaagacgctcgtttccaccgcaggcgtcgaaaaggccctcagcctcggagtgaccaagctcgtcgaacgctggatctccgtgtccggcgtcgcggacgacccaaacaactacctcttctgccgcgtccgcaagaacggggtggctgcccctagcgccaccagccaactcagcacgagggccttggaaggtattttcgaggccacccaccgcctgatctacggcgcgaaggatgacagcggtcaacgctacctcgcatggtccgggcactccgcccgcgttggagctgctagggacatggcccgcgccggtgtttccatccccgaaatcatgcaggcgggtggatggacgaacgtgaacattgtcatgaactacattcgcaaccttgacagcgagacgggcgcaatggttcgcctcctggaagatggtgactgaggtacccaacctagacttgtccatcttctggattggccaacttaattaatgtatgaaataaaaggatgcacacatagtgacatgctaatcactataatgtgggcatcaaagttgtgtgttatgtgtaattactagttatctgaataaaagagaaagagatcatccatatttcttatcctaaatgaatgtcacgtgtctttataattctttgatgaaccagatgcatttcattaaccaaatccatatacatataaatattaatcatatataattaatatcaattgggttagcaaaacaaatctagtctaggtgtgttttgcgatccgatcgaggccggccacactgatagtttaaactgaaggcgggaaacgacaatctgatcatgagcggagaattaagggagtcacgttatgacccccgccgatgacgcgggacaagccgttttacgtttggaactgacagaaccgcaacgattgaaggagccactcagccgcgggtttctggagtttaatgagctaagcacatacgtcagaaaccattattgcgcgttcaaaagtcgcctaaggtcactatcagctagcaaatatttcttgtcaaaaatgctccactgacgttccataaattcccctcggtatccaattagagtctcatattcactctcccggcggatctcgactctagaggatcgctcaggaaggccgctgagatagagccatggcggccaatgcgggcggcggtggagcgggaggaggcagcggcagcggcagcgtggctgcgccggcggtgtgccgccccagcggctcgcggtggacgccgacgccggagcagatcaggatgctgaaggagctctactacggctgcggcatccggtcgcccagctcggagcagatccagcgcatcaccgccatgctgcggcagcacggcaagatcgagggcaagaacgtcttctactggttccagaaccacaaggcccgcgagcgccagaagcgccgcctcaccagcctcgacgtcaacgtgcccgccgccggcgcggccgacgccaccaccagccaactcggcgtcctctcgctgtcgtcgccgccgccttcaggcgcggcgcctccctcgcccaccctcggcttctacgccgccggcaatggcggcggatcggctgtgctgctggacacgagttccgactggggcagcagcggcgctgctatggccaccgagacatgcttcctgcaggactacatgggcgtgacggacacgggcagctcgtcgcagtggccacgcttctcgtcgtcggacacgataatggcggcggccgcggcgcgggcggcgacgacgcgggcgcccgagacgctccctctcttcccgacctgcggcgacgacggcggcagcggtagcagcagctacttgccgttctggggtgccgcgtccacaactgccggcgccacttcttccgttgcgatccaacagcaacaccagctgcaggagcagtacagcttttacagcaacagcaacagcacccagctggccggcaccggcaaccaagacgtatcggcaacagcagcagcagccgccgccctggagctgagcctcagctcatggtgctccccttaccctgctgcagggagtatgtgagagcaacgcgagctgccactgctcttcactgatgtctctggaatggaaggaggaggaagtgagaacagatcattcgacaaagcagcattagtccgttgatcggtggaagaccactcgtcagtgttgagttgaatgtttgatcaataaaatacggcaatgctgtaagggttgttttttatgccattgataatacactgtactgttcagttgttgaactctatttcttagccatgccaagtgcttttcttattttgaataacattacagcaaaaagttgaaagacaaaaaaaaaaacccccgaacagagtgctttgggtcccaagcttctttagactgtgttcggcgttccccctaaatttctccccctatatctcactcacttgtcacatcagcgttctctttccccctatatctccacgctctacagcagttccacctatatcaaacctctataccccaccacaacaatattatatactttcatcttcaactaactcatgtaccttccaatttttttctactaataattatttacgtgcacagaaacttagcaaggagagagagagcgggaatttaaatgctcggcgttaggcttttagtccgctaggtggctagaccgaggttaggacgctagttcactaggggcctagtggtgttttaagacgtcacggtcacccggtccgggcctagaaggccagcttcaagtttgtacaaaaaagcaggctccggccagaatggcccggaccgaagcttgcatgcctgcagtgcagcgtgacccggtcgtgcccctctctagagataatgagcattgcatgtctaagttataaaaaattaccacatattttttttgtcacacttgtttgaagtgcagtttatctatctttatacatatatttaaactttactctacgaataatataatctatagtactacaataatatcagtgttttagagaatcatataaatgaacagttagacatggtctaaaggacaattgagtattttgacaacaggactctacagttttatctttttagtgtgcatgtgttctcctttttttttgcaaatagcttcacctatataatacttcatccattttattagtacatccatttagggtttagggttaatggtttttatagactaatttttttagtacatctattttattctattttagcctctaaattaagaaaactaaaactctattttagtttttttatttaataatttagatataaaatagaataaaataaagtgactaaaaattaaacaaataccctttaagaaattaaaaaaactaaggaaacatttttcttgtttcgagtagataatgccagcctgttaaacgccgtcgacgagtctaacggacaccaaccagcgaaccagcagcgtcgcgtcgggccaagcgaagcagacggcacggcatctctgtcgctgcctctggacccctctcgagagttccgctccaccgttggacttgctccgctgtcggcatccagaaattgcgtggcggagcggcagacgtgagccggcacggcaggcggcctcctcctcctctcacggcaccggcagctacgggggattcctttcccaccgctccttcgctttcccttcctcgcccgccgtaataaatagacaccccctccacaccctctttccccaacctcgtgttgttcggagcgcacacacacacaaccagatctcccccaaatccacccgtcggcacctccgcttcaaggtacgccgctcgtcctcccccccccccctctctaccttctctagatcggcgttccggtccatgcatggttagggcccggtagttctacttctgttcatgtttgtgttagatccgtgtttgtgttagatccgtgctgctagcgttcgtacacggatgcgacctgtacgtcagacacgttctgattgctaacttgccagtgtttctctttggggaatcctgggatggctctagccgttccgcagacgggatcgatttcatgattttttttgtttcgttgcatagggtttggtttgcccttttcctttatttcaatatatgccgtgcacttgtttgtcgggtcatcttttcatgcttttttttgtcttggttgtgatgatgtggtctggttgggcggtcgttctagatcggagtagaattctgtttcaaactacctggtggatttattaattttggatctgtatgtgtgtgccatacatattcatagttacgaattgaagatgatggatggaaatatcgatctaggataggtatacatgttgatgcgggttttactgatgcatatacagagatgctttttgttcgcttggttgtgatgatgtggtgtggttgggcggtcgttcattcgttctagatcggagtagaatactgtttcaaactacctggtgtatttattaattttggaactgtatgtgtgtgtcatacatcttcatagttacgagtttaagatggatggaaatatcgatctaggataggtatacatgttgatgtgggttttactgatgcatatacatgatggcatatgcagcatctattcatatgctctaaccttgagtacctatctattataataaacaagtatgttttataattattttgatcttgatatacttggatgatggcatatgcagcagctatatgtggatttttttagcactgccttcatacgctatttatttgcttggtactgtttcttttgtcgatgctcaccctgttgtttggtgttacttctgcaggtcgactttaacttagcctaggatccatggccactgtgaacaactggctcgctttctccctctccccgcaggagctgccgccctcccagacgacggactccacactcatctcggccgccaccgccgaccatgtctccggcgatgtctgcttcaacatcccccaagattggagcatgaggggatcagagctttcggcgctcgtcgcggagccgaagctggaggacttcctcggcggcatctccttctccgagcagcatcacaaggccaactgcaacatgatacccagcactagcagcacagtttgctacgcgagctcaggtgctagcaccggctaccatcaccagctgtaccaccagcccaccagctcagcgctccacttcgcggactccgtaatggtggcttcctcggccggtgtccacgacggcggtgccatgctcagcgcggccgccgctaacggtgtcgctggcgctgccagtgccaacggcggcggcatcgggctgtccatgattaagaactggctgcggagccaaccggcgcccatgcagccgagggtggcggcggctgagggcgcgcaggggctctctttgtccatgaacatggcggggacgacccaaggcgctgctggcatgccacttctcgctggagagcgcgcacgggcgcccgagagtgtatcgacgtcagcacagggtggagccgtcgtcgtcacggcgccgaaggaggatagcggtggcagcggtgttgccggcgctctagtagccgtgagcacggacacgggtggcagcggcggcgcgtcggctgacaacacggcaaggaagacggtggacacgttcgggcagcgcacgtcgatttaccgtggcgtgacaaggcatagatggactgggagatatgaggcacatctttgggataacagttgcagaagggaagggcaaactcgtaagggtcgtcaagtctatttaggtggctatgataaagaggagaaagctgctagggcttatgatcttgctgctctgaagtactggggtgccacaacaacaacaaattttccagtgagtaactacgaaaaggagctcgaggacatgaagcacatgacaaggcaggagtttgtagcgtctctgagaaggaagagcagtggtttctccagaggtgcatccatttacaggggagtgactaggcatcaccaacatggaagatggcaagcacggattggacgagttgcagggaacaaggatctttacttgggcaccttcagcacccaggaggaggcagcggaggcgtacgacatcgcggcgatcaagttccgcggcctcaacgccgtcaccaacttcgacatgagccgctacgacgtgaagagcatcctggacagcagcgccctccccatcggcagcgccgccaagcgcctcaaggaggccgaggccgcagcgtccgcgcagcaccaccacgccggcgtggtgagctacgacgtcggccgcatcgcctcgcagctcggcgacggcggagccctggcggcggcgtacggcgcgcactaccacggcgccgcctggccgaccatcgcgttccagccgggcgccgccagcacaggcctgtaccacccgtacgcgcagcagccaatgcgcggcggcgggtggtgcaagcaggagcaggaccacgcggtgatcgcggccgcgcacagcctgcaggacctccaccacctgaacctgggcgcggccggcgcgcacgactttttctcggcagggcagcaggccgccgccgctgcgatgcacggcctgggtagcatcgacagtgcgtcgctcgagcacagcaccggctccaactccgtcgtctacaacggcggggtcggcgacagcaacggcgccagcgccgtcggcggcagtggcggtggctacatgatgccgatgagcgctgccggagcaaccactacatcggcaatggtgagccacgagcaggtgcatgcacgggcctacgacgaagccaagcaggctgctcagatggggtacgagagctacctggtgaacgcggagaacaatggtggcggaaggatgtctgcatgggggactgtcgtgtctgcagccgcggcggcagcagcaagcagcaacgacaacatggccgccgacgtcgggcatggcggcgcgcagctcttcagtgtctggaacgacacttaatattggtaccgtcatgggtcgtttaagctgccgatgtgcctgcgtcgtctggtgccctctctccatatggaggttgtcaaagtatctgctgttcgtgtcatgagtcgtgtcagtgttggtttaataatggaccggttgtgttgtgtgtgcgtactacccagaactatgacaaatcatgaataagtttgatgtttgaaattaaagcctgtgctcattatgttctgtctttcagttgtctcctaatatttgcctgcaggtactggctatctaccgtttcttacttaggaggtgtttgaatgcactaaaactaatagttagtggctaaaattagttaaaacatccaaacaccatagctaatagttgaactattagctatttttggaaaattagttaatagtgaggtagttatttgttagctagctaattcaactaacaatttttagccaactaacaattagtttcagtgcattcaaacacccccttaatgttaaggtggttctatctaccgtctcctaatatatggttgattgttcggtttgttgctatgctattgggttctgattgctgctagttcttgctgaatccagaagttctcgtagtatagctcagattcatattatttatttgagtgataagtgatccaggttattactatgttagctaggttttttttacaaggataaattatctgtgatcataattcttatgaaagctttatgtttcctggaggcagtggcatgcaatgcatgacagcaacttgatcacaccagctgaggtagatacggtaacaaggttcttaaatctgttcaccaaatcattggagaacacacatacacattcttgccagtcttggttagagaaatttcatgacaaaatgccaaagctgtcttgactcttcacttttggccatgagtcgtgacgcgacttattgaactagtctagggcgcggctaacaacctagcttagattgccttgtctaaacccttaggctaacgcgccactctagaaggccgatctcccgggataacttcgtatagcatacattatacgaagttatgaattccggaccgggttaccgaattcctgcccttaaggccaattgttcaagattcattcaacaattgaaacatctcccatgattaaatcagtataaggttgctatggtcttgcttgacaaagtttttttttgagggaatttcaactaaatttttgagtgaaactatcaaatactgattttaaaaaatttttataaaaggaagcgcagagataaaaggccatctatgctacaaaagtacccaaaaatgtaatcctaaagtatgaattgcattttttttttgtttggacgaaaggaaaggagtattaccacaagaatgatatcatcttcatatttagatcttttttgggtaaagcttgagattctctaaatatagagaaatcagaagaaaaaaaaaccgtgttttggtggttttgatttctagcctccacaataactttgacggcgtcgacaagtctaacggacaccaagcagcgaaccaccagcgccgagccaagcgaagcagacggccgagacgttgacaccttcggcgcggcatctctcgagagttccgctccggcgctccacctccaccgctggcggtttcttattccgttccgttccgcctcctgctctgctcctctccacaccacacggcacgaaaccgttacggcaccggcagcacccagcacgggagaggggattcctttcccaccgttccttccctttccgccccgccgctataaatagccagccccatccccagcttttttccccaatctcatctcctctctcctgttgttcggagcacacgcacaatccgatcgatccccaaatccccttcgtctctcctcgcgagcctcgtggatcccagcttcaaggtacggcgatcgatcatcccccctccttctctctaccttcttttctctagactacatcggatggcgatccatggttagggcctgctagtttcccttcctgttttgtcgatggctgcgaggcacaatagatctgatggcgttatgacggctaacttgtcatgttgttgcgatttatagtccctttaggagatcagtttaatttctcggatggttcgagatcggtggtccatggttagtaccctaagatccgcgctgttagggttcgtagatggaggcgacctgttctgattgttaacttgtcagtacctgggaaatcctgggatggttctagctcgtccgcagatgagatcgatttcatgatcctctgtatcttgtttcgttgcctaggttccgtctaatctatccgtggtatgatgtagatgttttgatcgtgctaactacgtcttgtaaagttaattgtcaggtcataatttttagcatgcctttttttttgtttggttttgtctaattgggctgtcgttctagatcagagtagaagactgttccaaactacctgctggatttattgaacttggatctgtatgtgtgtcacatatcttcataaattcatgattaagatggattgaaatatcttttatctttttggtatggatagttctatatgttggtgtggctttgttagatgtatacatgcttagatacatgaagcaacgtgctgctactgtttagtaattgctgttcatttgtctaataaacagataaggatatgtatttatgttgctgttggttttgctggtactttgttggatacaaatgcttcaatacagaaaacagcatgctgctacgatttaccatttatctaatcttatcatatgtctaatctaataaacaaacatgcttttaaattatcttcatatgcttggatgatggcatacacagcggctatgtgtggttttttaaatacccagcatcatgggcatgcatgacactgctttaatatgctttttatttgcttgagactgtttcttttgtttatactgaccctttagttcggtgactcttctgcaggtcgactttaacttagcctaggatccatggcccagtccaagcacggcctgaccaaggagatgaccatgaagtaccgcatggagggctgcgtggacggccacaagttcgtgatcaccggcgagggcatcggctaccccttcaagggcaagcaggccatcaacctgtgcgtggtggagggcggccccttgcccttcgccgaggacatcttgtccgccgccttcatgtacggcaaccgcgtgttcaccgagtacccccaggacatcgtcgactacttcaagaactcctgccccgccggctacacctgggaccgctccttcctgttcgaggacggcgccgtgtgcatctgcaacgccgacatcaccgtgagcgtggaggagaactgcatgtaccacgagtccaagttctacggcgtgaacttccccgccgacggccccgtgatgaagaagatgaccgacaactgggagccctcctgcgagaagatcatccccgtgcccaagcagggcatcttgaagggcgacgtgagcatgtacctgctgctgaaggacggtggccgcttgcgctgccagttcgacaccgtgtacaaggccaagtccgtgccccgcaagatgcccgactggcacttcatccagcacaagctgacccgcgaggaccgcagcgacgccaagaaccagaagtggcacctgaccgagcacgccatcgcctccggctccgccttgccctccggactcagatctcgatagggtaccaatggccagttaacagatccagctgctgctgttctagggttcacaagtctgcctatttgtcttccccaatggagctatggttgtctggtctggtccttggtcgtgtcccgtttcattgtgtactatttacctgtaatgtgtatccttaagtctggtttgatggtgtctgaaacgttttgctgtggtagagcagcatggaagaactataatgaataagtgatccctaatcattgtgtccaaattttgcttctgctatacccttttgtgctgtttcttatgttttgcttaaaaatttgatctgacaaacaaatttgtctaaattatgctcttgttctgactgtgtactgtacacatttgtattgctaccggtttggcacatagttttctctttgattgcagatcaaacccttctgattgcagattgcttggctatggctgatgtgctcactgttcttctttagcttgtatattgctgatggtggcttggctacggctgaaaaagttgctgctgcgccgacttggcaactgttgctccagtaatgctttgtcctctcttcctagccgccgacttggcacttggcagctgttgctcctgtaatgcgttgttatctcttatctcttgagatgtactatgattttgaggctgtttgacttgtgccagattgccagtgctgatgctatattatctcaggtttttatgctagtatatgttttactgtgtgctgcctgtgtcgagttacgtaatctattgaaccgctatgcgtgttgatgccctgttgttgcttgccagattgatgcccctgttgcttgcagcttgcaagctgtagtgaaatcctaaaattcgaaaccaaatctattctgaacttttgaagatctgtgatgtccggaagaaaagattcaaacagataaacgggactctccagaatctataaaataaatgatcgacaaacgctttgctttggtaggcttcctagttagttagcggaccgggactgcccttaaggccaattgttcaagattcattcaacaattgaaacatctcccatgattaaatcagtataaggttgctatggtcttgcttgacaaagtttttttttgagggaatttcaactaaatttttgagtgaaactatcaaatactgattttaaaaaatttttataaaaggaagcgcagagataaaaggccatctatgctacaaaagtacccaaaaatgtaatcctaaagtatgaattgcattttttttttgtttggacgaaaggaaaggagtattaccacaagaatgatatcatcttcatatttagatcttttttgggtaaagcttgagattctctaaatatagagaaatcagaagaaaaaaaaaccgtgttttggtggttttgatttctagcctccacaataactttgacggcgtcgacaagtctaacggacaccaagcagcgaaccaccagcgccgagccaagcgaagcagacggccgagacgttgacaccttcggcgcggcatctctcgagagttccgctccggcgctccacctccaccgctggcggtttcttattccgttccgttccgcctcctgctctgctcctctccacaccacacggcacgaaaccgttacggcaccggcagcacccagcacgggagaggggattcctttcccaccgttccttccctttccgccccgccgctataaatagccagccccatccccagcttttttccccaatctcatctcctctctcctgttgttcggagcacacgcacaatccgatcgatccccaaatccccttcgtctctcctcgcgagcctcgtggatcccagcttcaaggtacggcgatcgatcatcccccctccttctctctaccttcttttctctagactacatcggatggcgatccatggttagggcctgctagtttcccttcctgttttgtcgatggctgcgaggcacaatagatctgatggcgttatgacggctaacttgtcatgttgttgcgatttatagtccctttaggagatcagtttaatttctcggatggttcgagatcggtggtccatggttagtaccctaagatccgcgctgttagggttcgtagatggaggcgacctgttctgattgttaacttgtcagtacctgggaaatcctgggatggttctagctcgtccgcagatgagatcgatttcatgatcctctgtatcttgtttcgttgcctaggttccgtctaatctatccgtggtatgatgtagatgttttgatcgtgctaactacgtcttgtaaagttaattgtcaggtcataatttttagcatgcctttttttttgtttggttttgtctaattgggctgtcgttctagatcagagtagaagactgttccaaactacctgctggatttattgaacttggatctgtatgtgtgtcacatatcttcataaattcatgattaagatggattgaaatatcttttatctttttggtatggatagttctatatgttggtgtggctttgttagatgtatacatgcttagatacatgaagcaacgtgctgctactgtttagtaattgctgttcatttgtctaataaacagataaggatatgtatttatgttgctgttggttttgctggtactttgttggatacaaatgcttcaatacagaaaacagcatgctgctacgatttaccatttatctaatcttatcatatgtctaatctaataaacaaacatgcttttaaattatcttcatatgcttggatgatggcatacacagcggctatgtgtggttttttaaatacccagcatcatgggcatgcatgacactgctttaatatgctttttatttgcttgagactgtttcttttgtttatactgaccctttagttcggtgactcttctgcaggtcgactttaacttagcctaggatccatgcaaaaactcattaactcagtgcaaaactatgcctggggcagcaaaacggcgttgactgaactttatggtatggaaaatccgtccagccagccgatggccgagctgtggatgggcgcacatccgaaaagcagttcacgagtgcagaatgccgccggagatatcgtttcactgcgtgatgtgattgagagtgataaatcgactctgctcggagaggccgttgccaaacgctttggcgaactgcctttcctgttcaaagtattatgcgcagcacagccactctccattcaggttcatccaaacaaacacaattctgaaatcggttttgccaaagaaaatgccgcaggtatcccgatggatgccgccgagcgtaactataaagatcctaaccacaagccggagctggtttttgcgctgacgcctttccttgcgatgaacgcgtttcgtgaattttccgagattgtctccctactccagccggtcgcaggtgcacatccggcgattgctcactttttacaacagcctgatgccgaacgtttaagcgaactgttcgccagcctgttgaatatgcagggtgaagaaaaatcccgcgcgctggcgattttaaaatcggccctcgatagccagcagggtgaaccgtggcaaacgattcgtttaatttctgaattttacccggaagacagcggtctgttctccccgctattgctgaatgtggtgaaattgaaccctggcgaagcgatgttcctgttcgctgaaacaccgcacgcttacctgcaaggcgtggcgctggaagtgatggcaaactccgataacgtgctgcgtgcgggtctgacgcctaaatacattgatattccggaactggttgccaatgtgaaattcgaagccaaaccggctaaccagttgttgacccagccggtgaaacaaggtgcagaactggacttcccgattccagtggatgattttgccttctcgctgcatgaccttagtgataaagaaaccaccattagccagcagagtgccgccattttgttctgcgtcgaaggcgatgcaacgttgtggaaaggttctcagcagttacagcttaaaccgggtgaatcagcgtttattgccgccaacgaatcaccggtgactgtcaaaggccacggccgtttagcgcgcgtttacaacaagctgtaaatcactagcgaacgcgtaggtacccgggccgtgggtcgtttaagctgccgctgtacctgtgtcgtctggtgccttctggtgtacctgggaggttgtcgtctatcaagtatctgtggttggtgtcatgagtcagtgagtcccaatactgttcgtgtcctgtgtgcattatacccaaaactgttatgggcaaatcatgaataagcttgatgttcgaacttaaaagtctctgctcaatatggtattatggttgtttttgttcgtctcctaatatttgcctgggatcaaattttattggctggtgttcatttgacctccatgttcttgctaggctccattttttactctacagccataatatgtttgattgtttggtttgttctttgttgtacacctggttctgtcgagcttagttttcgacactggcttacagcttaacatgttgctattttattgggttctgattgctattttattgggttctgattgctagtttttgctaaatccaaaaaccatgttatttatttaagcgatccaggttattattatgatggtggctaagtttttttttttccaagggtaaattttctggattctccagtgtttctgtggccgaattgggcaactttattatacaaagttgatagatatcggaccgattaaactttaattcggtccggtggcgccgctagcgtatactgtacacctgagctgattccgatgacttcgtaggttcctagctcaagccgctcgtgtccaagcgtcacttacgattagctaatgattacggcatctaggaccgactagttcttatgtgcttctagtctccaaatgtggttgatagttattttgctctaagatcaacagtaatgaagtataaatcatcgttgtggtgtgctactcggttaattgagcattaacacacacaaacatgacgaggatggtataatctccaaaaatgtgtactttgttaggtgggaccctatagccttgattaatgtgctatgttaggcatgcctggaaacgtgtgacgcatatgttttgtgaacctgttgatattatatgtgcttttatattaccatattttattaaaatactaatatttattactagtaagatataacattctatctagcttaaaaactaaccataaatattccataataactagatttaccaaactaatatactaaatatacataataaatacaaaattaacaagacaataatcaatatttatgagcttaatatatttagacattatggttggtcgacgataatcatgctaacttttcgtaattgcttgattgaaatatgcttagaataatgcctctttgttctacatggcaaatagggaccattatggtgtaacaccctgggaaccacaaacaccccgaaatgctactaaactacacaactaaccttcatatataaaatttcgacagcatctcctttgaaaatttgcatagacgtggaagcaacagagtataaacagatctgcgtttaaacgtgcaagcgctactagacaattcagtacattaaaaacgtccgcaatgtgttattaagttgtctaagcgtcaatttgtttacaccacaatatatcctgcca

SEQ ID NO: 20 - DNA, 19810 bp, synthetic construct
  misc_feature 1..19810: note = PHP93613
  source 1..19810: mol_type = other DNA
gtttacccgccaatatatcctgtcaaacactgcggccgcacttgaccgcggatggagccggagctgtggtgaggccatcgacgggaggtgggggagaacacagtctcagtgttctttgtgagtccgcaaggtttttagcttttctgtattaattaaggttgctgttggctgtagaatacggtcgtggaagagctgtatcggtagctactacgtaagctattatatactggaagtctggagctcgtcgatctccggtcgtcttcctccatttctcctcgtcttgctttgactgctgctaccatttgcttctgttttctgatgaagcatgccatgtcggccaccagtgtttgtgtggtttttgcagggaatggctttcaagtgctgtgattgaatggccctcgtcgtcctcggctgagctcacatggacgcgtcatgtgagtgagatatatgatcatatgatgagtggggttcgggtgagtgcgtacttgaagtaggatcccgctttcactcattcattcattggcctttaaaccgggaaattttcgcgaggagatggagggaagcaagcagggtgacgagtgcagagtgccgcgagcgctttgtcaaaaggcaccgccgtaggcaaaaaaatcaatggccctgactgactcgatggtagtactactgtagagactagagagggttgctccccatatcttcgtgtgacttttactccagcattgcatttccgtcattgagacgttaattaatagcagctttcgggacagatgactgtggccatgtttcgtcacggccgcttcgtgccagctgggggtactatagtactgtgattttgttagtaaaaactttcattaggccaccattgacgaccgggccttcgcttttgctgcgctaattaaccatttcccggcgaccgaagggaacatgaacatgccccgacacatgagggcatgaggactagtgttctccctgtcgttcgttgacttgactagtgatagtttaaacgctcttcaactggaagagcggttactaccggttcactagctagctgctaatcgagctagttaccctatgaggtgacatgaagcgctcacggttactatgacggttagcttcacgactgttggtggcagtagcgtacgacttagctatagttccggacttacctagctaataacttcgtatagcatacattatacgaagttatggttaccgaattcgagctcggtaccctggttcacaaactcaatacaacacacagtggagtagggtattacgctccggcggcccgaaccactctaaatccttgtgtcctcgtgtgctcttccaccattaatgactgtaattgcagggacacgaagagttgtagcgcttttgccaacaagatccgctatatgctagtagagtggaacctgcacagcaacaagcatccaataatctgagaataagaattatgtgtggtgatggttctcatctctgcaactcgccattttcgcgagagaaccaaatccaagttggtgaagatcatgatttgggctcatgggctggcatagtagctattacctttgcaattgtggttcgaatctatccgatattctccttttcagggagagctaatgcttatgcttattgggtattttggtttgacactgcttcacgcccaaaaaaaggcaactatgtctgagttggatatggcccaaaaaaaggcagctatgtctgagttggatatggaagtcttctttcgtttagggtgaagtaagaccaagctcatgagcttattatcttaggtcggaacaaattagttgataggcatggcacatttatcaaattataatgattttaacagaaaagcaacacctctttttcagcagcaccagctttgcaagctgcaattgacactccaagcatagtatttgctccaaactcagcctgcatttcgcacaatatcatatctatttccatttggataaaatatattttccagaaatatgggaacagaatcaagatacagaaaaaagttgtggtagtagtggtaagtggaaacacaagtacagtgaaaagatagcattatttctgaacagtcaaattaaccgaaataagtagtatcacatactgcccctaaattgactacacccaatgtaaagaattgcttgagcatattgagccatcagttgtttgtttgtgtaacggatttgacaatgcagagttcaggagcaaaaaaccgcaaaggagagaaagagggaaaggatctcctagtatcccaccttgtggcgcgccctgtcaagtgcatgatggcctggtcgatctgcgtctgctgctgcggttccatcccaacgagtgcctccgacaccttgtcgttgatcacccgcaccgcgtaggcgacccccctggcgaggaacttccgcctctcggaggccccggccgcgtcggcggcggcgccctcgagcgcgcccacgctagccgtagatgctcggtgcacggccttgttggtgtgcaactcgacctcaacggccggtgcgctacgcccgtcaaggatctggcgcgcccgcaccctcgtgatcacggtgggcgcctcccgcctcatgtggccgacgatgaaaagcgccgggttaggggccttggcgcgcaccgccgtattcagggcctcctcgctcttgcgcgagagcaggtgcttccccaggtactcctgcactgacaaggctgccacagcggtggaatttgtcctcacgacttcgccacgtcgtcctcacctccctggcttcccacgactccgccgtatcgaggtgctcggtgggtcgtcttaatccgaagtccgaactaggaagacgagacagagaggtctgaggaatgggcctcgtttgatgttgagctgaattatttttccagcataagcccaggtcttggtccatgaacaaaattactagaaacccagcccagtactacgatctaaaagagggactgccactggatagctctctctagcattctccacgctccaatacagcggcgtcgtgtctatccgggtctatccgcgaacacgtgagaactctccagaaactgctttctcctccacttcatctctctcgctttccctctataaaaagaccccttctaggaattgagggagacagcaagcaccaagcagcgatccgaagctcaatcaattcactcaaacctcttccccaaatcttcgattagatcttcgttgacaagaagactagaaccgaacctgacatgtccaacctgctcacggttcaccagaaccttccggctcttccagtggacgcgacgtccgatgaagtcaggaagaacctcatggacatgttccgcgacaggcaagcgttcagcgagcacacctggaagatgctgctctccgtctgccgctcctgggctgcatggtgcaagctgaacaacaggaagtggttccccgctgagcccgaggacgtgagggattaccttctgtacctgcaagcgcgaggtttgtttctgcttctacctttgatatatatataataattatcattaattagtagtaatataatatttcaaatatttttttcaaaataaaagaatgtagtatatagcaattgcttttctgtagtttataagtgtgtatattttaatttataacttttctaatatatgaccaaaacatggtgatgcctaggtctggcagtgaagaccatccagcaacaccttggacaactgaacatgcttcacaggcgctccggcctcccgcgccccagcgactcgaacgccgtgagcctcgtcatgcgccgcatcaggaaggaaaacgtcgatgccggcgaaagggcaaagcaggccctcgcgttcgagaggaccgatttcgaccaggtccgcagcctgatggagaacagcgacaggtgccaggacattaggaacctggcgttcctcggaattgcatacaacacgctcctcaggatcgcggaaattgcccgcattcgcgtgaaggacattagccgcaccgacggcggcaggatgcttatccacattggcaggaccaagacgctcgtttccaccgcaggcgtcgaaaaggccctcagcctcggagtgaccaagctcgtcgaacgctggatctccgtgtccggcgtcgcggacgacccaaacaactacctcttctgccgcgtccgcaagaacggggtggctgcccctagcgccaccagccaactcagcacgagggccttggaaggtattttcgaggccacccaccgcctgatctacggcgcgaaggatgacagcggtcaacgctacctcgcatggtccgggcactccgcccgcgttggagctgctagggacatggcccgcgccggtgtttccatccccgaaatcatgcaggcgggtggatggacgaacgtgaacattgtcatgaactacattcgcaaccttgacagcgagacgggcgcaatggttcgcctcctggaagatggtgactgagctagacccagctttcttgtacaaagtggccgttaacggatgcagacttgtccatcttctggattggccaacttaattaatgtatgaaataaaaggatgcacacatagtgacatgctaatcactataatgtgggcatcaaagttgtgtgttatgtgtaattactagttatctgaataaaagagaaagagatcatccatatttcttatcctaaatgaatgtcacgtgtctttataattctttgatgaaccagatgcatttcattaaccaaatccatatacatataaatattaatcatatataattaatatcaattgggttagcaaaacaaatctagtctaggtgtgttttgcgaattgcggcaaggttgcgcccgccccagcttggtcagccgctccgggcttagaaggccgatctcgcgggcacccagctttcttctacaaagtggccgtttacggatcggctagaatgtcccgcaccggcttaccgatttgcacctcgctaccctgggttcgaccgaagctgaccgatgcttgcgcccgctcgcgaggccggccaagcttgatatcgaattcctgcagcccatccctcagccgcctttcactatcttttttgcccgagtcattgtcatgtgaaccttggcatgtataatcggtgaattgcgtcgattttcctcttataggtgggccaatgaatccgtgtgatcgcgtctgattggctagagatatgtttcttccttgttggatgtattttcatacataatcatatgcatacaaatatttcattacactttatagaaatggtcagtaataaaccctatcactatgtctggtgtttcattttatttgcttttaaacgaaaattgacttcctgattcaatatttaaggatcgtcaacggtgtgcagttactaaattctggtttgtaggaactatagtaaactattcaagtcttcacttattgtgcactcacctctcgccacatcaccacagatgttattcacgtcttaaatttgaactacacatcatattgacacaatattttttttaaataagcgattaaaacctagcctctatgtcaacaatggtgtacataaccagcgaagtttagggagtaaaaaacatcgccttacacaaagttcgctttaaaaaataaagagtaaattttactttggaccacccttcaaccaatgtttcactttagaacgagtaattttattattgtcactttggaccaccctcaaatcttttttccatctacatccaatttatcatgtcaaagaaatggtctacatacagctaaggagatttatcgacgaatagtagctagcatactcgaggtcattcatatgcttgagaagagagtcgggatagtccaaaataaaacaaaggtaagattacctggtcaaaagtgaaaacatcagttaaaaggtggtataaagtaaaatatcggtaataaaaggtggcccaaagtgaaatttactcttttctactattataaaaattgaggatgtttttgtcggtactttgatacgtcatttttgtatgaattggtttttaagtttattcgcttttggaaatgcatatctgtatttgagtcgggttttaagttcgtttgcttttgtaaatacagagggatttgtataagaaatatctttaaaaaaacccatatgctaatttgacataatttttgagaaaaatatatattcaggcgaattctcacaatgaacaataataagattaaaatagctttcccccgttgcagcgcatgggtattttttctagtaaaaataaaagataaacttagactcaaaacatttacaaaaacaacccctaaagttcctaaagcccaaagtgctatccacgatccatagcaagcccagcccaacccaacccaacccaacccaccccagtccagccaactggacaatagtctccacacccccccactatcaccgtgagttgtccgcacgcaccgcacgtctcgcagccaaaaaaaaaaaaagaaagaaaaaaaagaaaaagaaaaaacagcaggtgggtccgggtcgtgggggccggaaacgcgaggaggatcgcgagccagcgacgaggccggccctccctccgcttccaaagaaacgccccccatcgccactatatacatacccccccctctcctcccatccccccaaccctaccaccaccaccaccaccacctccacctcctcccccctcgctgccggacgacgagctcctcccccctccccctccgccgccgccgcgccggtaaccaccccgcccctctcctctttctttctccgttttttttttccgtcacggtctcgatctttggccttggtagtttgggtgggcgagaggcggcttcgtgcgcgcccagatcggtgcgcgggaggggcgggatctcgcggctggggctctcgccggcgtggatcaggcccggatctcgcggggaatggggctctcggatgtagatctgcgatccgccgttgttgggggagatgatggggggtttaaaatttccgccatgctaaacaagatcaggaagaggggaaaagggcactatggtttatatttttatatatttctgctgcttcgtcaggcttagatgtgctagatctttctttcttctttttgtgggtagaatttgaatccctcagcattgttcatcggtagtttttcttttcatgatttgtgacaaatgcagcctcgtgcggagcttttttgtaggtagaaggatccgcccatggcggccaatgcgggcggcggtggagcgggaggaggcagcggcagcggcagcgtggctgcgccggcggtgtgccgccccagcggctcgcggtggacgccgacgccggagcagatcaggatgctgaaggagctctactacggctgcggcatccggtcgcccagctcggagcagatccagcgcatcaccgccatgctgcggcagcacggcaagatcgagggcaagaacgtcttctactggttccagaaccacaaggcccgcgagcgccagaagcgccgcctcaccagcctcgacgtcaacgtgcccgccgccggcgcggccgacgccaccaccagccaactcggcgtcctctcgctgtcgtcgccgccgccttcaggcgcggcgcctccctcgcccaccctcggcttctacgccgccggcaatggcggcggatcggctgtgctgctggacacgagttccgactggggcagcagcggcgctgctatggccaccgagacatgcttcctgcaggactacatgggcgtgacggacacgggcagctcgtcgcagtggccacgcttctcgtcgtcggacacgataatggcggcggccgcggcgcgggcggcgacgacgcgggcgcccgagacgctccctctcttcccgacctgcggcgacgacggcggcagcggtagcagcagctacttgccgttctggggtgccgcgtccacaactgccggcgccacttcttccgttgcgatccaacagcaacaccagctgcaggagcagtacagcttttacagcaacagcaacagcacccagctggccggcaccggcaaccaagacgtatcggcaacagcagcagcagccgccgccctggagctgagcctcagctcatggtgctccccttaccctgctgcagggagtatgtgagagcaacgcgagctgccactgctcttcactgatgtctctggaatggaaggaggaggaagtgagaacagatcattcgacaaagcagcattagtccgttgatcggtggaagaccactcgtcagtgttgagttgaatgtttgatcaataaaatacggcaatgctgtaagggttgttttttatgccattgataatacactgtactgttcagttgttgaactctatttcttagccatgccaagtgcttttcttattttgaataacattacagcaaaaagttgaaagacaaaaaaaaaaacccccgaacagagtgctttgggtcccaagcttctttagactgtgttcggcgttccccctaaatttctccccctatatctcactcacttgtcacatcagcgttctctttccccctatatctccacgctctacagcagttccacctatatcaaacctctataccccaccacaacaatattatatactttcatcttcaactaactcatgtaccttccaatttttttctactaataattatttacgtgcacagaaacttagcaaggagagagagagcgggaatttaaatgctcggcgttaggcttttagtccgctaggtggctagaccgaggttaggacgctagttcactaggggcctagtggtgttttaagacgtcacggtcaccacgcgtggaccgaagcttgcatgcctgcagtgcagcgtgacccggtcgtgcccctctctagagataatgagcattgcatgtctaagttataaaaaattaccacatattttttttgtcacacttgtttgaagtgcagtttatctatctttatacatatatttaaactttactctacgaataatataatctatagtactacaataatatcagtgttttagagaatcatataaatgaacagttagacatggtctaaaggacaattgagtattttgacaacaggactctacagttttatctttttagtgtgcatgtgttctcctttttttttgcaaatagcttcacctatataatacttcatccattttattagtacatccatttagggtttagggttaatggtttttatagactaatttttttagtacatctattttattctattttagcctctaaattaagaaaactaaaactctattttagtttttttatttaataatttagatataaaatagaataaaataaagtgactaaaaattaaacaaataccctttaagaaattaaaaaaactaaggaaacatttttcttgtttcgagtagataatgccagcctgttaaacgccgtcgacgagtctaacggacaccaaccagcgaaccagcagcgtcgcgtcgggccaagcgaagcagacggcacggcatctctgtcgctgcctctggacccctctcgagagttccgctccaccgttggacttgctccgctgtcggcatccagaaattgcgtggcggagcggcagacgtgagccggcacggcaggcggcctcctcctcctctcacggcaccggcagctacgggggattcctttcccaccgctccttcgctttcccttcctcgcccgccgtaataaatagacaccccctccacaccctctttccccaacctcgtgttgttcggagcgcacacacacacaaccagatctcccccaaatccacccgtcggcacctccgcttcaaggtacgccgctcgtcctcccccccccccctctctaccttctctagatcggcgttccggtccatgcatggttagggcccggtagttctacttctgttcatgtttgtgttagatccgtgtttgtgttagatccgtgctgctagcgttcgtacacggatgcgacctgtacgtcagacacgttctgattgctaacttgccagtgtttctctttggggaatcctgggatggctctagccgttccgcagacgggatcgatttcatgattttttttgtttcgttgcatagggtttggtttgcccttttcctttatttcaatatatgccgtgcacttgtttgtcgggtcatcttttcatgcttttttttgtcttggttgtgatgatgtggtctggttgggcggtcgttctagatcggagtagaattctgtttcaaactacctggtggatttattaattttggatctgtatgtgtgtgccatacatattcatagttacgaattgaagatgatggatggaaatatcgatctaggataggtatacatgttgatgcgggttttactgatgcatatacagagatgctttttgttcgcttggttgtgatgatgtggtgtggttgggcggtcgttcattcgttctagatcggagtagaatactgtttcaaactacctggtgtatttattaattttggaactgtatgtgtgtgtcatacatcttcatagttacgagtttaagatggatggaaatatcgatctaggataggtatacatgttgatgtgggttttactgatgcatatacatgatggcatatgcagcatctattcatatgctctaaccttgagtacctatctattataataaacaagtatgttttataattattttgatcttgatatacttggatgatggcatatgcagcagctatatgtggatttttttagccctgccttcatacgctatttatttgcttggtactgtttcttttgtcgatgctcaccctgttgtttggtgttacttctgcaggtcgactttaacttagcctaggatccgcccatggactccagcagcttcctccctgccgccggcgcggagaatggctcggcggcgggcggcgccaacaatggcggcgctgctcagcagcatgcggcgccggcgatccgcgagcaggaccggctgatgccgatcgcgaacgtgatccgcatcatgcggcgcgtgctgccggcgcacgccaagattagcgacgacgccaaggagacgatccaggagtgcgtgtcggagtacatcagcttcatcacgggggaggccaacgagcggtgccagcgggagcagcgcaagaccatcaccgccgaggacgtgctgtgggccatgagccgcctcggcttcgacgactacgtcgagccgctcggcgcctacctccaccgctaccgcgagttcgagggcgacgcgcgcggcgtcgggctcgtccctggggccgccccatcgcgcggcggcgaccaccacccgcactccatgtcgccagcggcgatgctcaagtcccgcgggccagtctccggagccgccatgctaccgcaccaccaccaccaccacgacatgcagatgcacgccgccatgtacgggggaacggccgtgcccccgccggccgggcctcctcaccacggcgggttcctcatgccacacccacagggtagtagccactacctgccttacgcgtacgagcccacgtacggcggtgagcacgcgatggctgcatactatggaggcgccgcgtacgcgcccggcaacggcgggagcggcgacggcagtggcagtggcggcggtggcgggagcgcgtcgcacacaccgcagggcagcggcggcttggagcacccgcacccgttcgcgtacaagtagttatgtacaggtacctgacatcttatagtctgcaacctctcgtgtctgaattcctatctttatcaagtgttattgcttccacgactataggacagctttcgtcgaaagcttttgctcatgtgatctcgaaggattcatctagtctgatttttcgtgacttgtatcggttttattggattcatccaacatatatcaataaaaaatgagttgtgtttcctttcttcctagttcagttaaaattatttccctcctgcgcttgtgctgtaattgtctgtgtacctgttgtttgtgactgtgttagttcccttggatatgatttcgtatttgatatgtacatggagatagcttagcttcattattggagtatgaagttagtatgacatagtcactctcctggaaaattgacactgcaaaccatatttttattctgaaccacaaatcctagtcagtccgctggcatatgccgtccgtttgctgaatccagaacgtgggtttggagatgtacggctgagatgcctctatgcgaaggggatttcgtggtgaaacgagatgggagtagagcaacgcccgtggaagatgcttcaaacttccacacttttgagcaacgatcggcagtagtaaggtagacgatttcaagatcaaagcatatgaagataaacaacatcaacaacaaaatttgttggggttctatagagagaaacagagctacatacatacactgttttgtatctaccatctgagatgatgaaaagatgaaaaactaaagaatgccccggcgccaacgccaggacacgccgcgcgcgcgtcacccgagccatctcttgacccagccggcgctgtatatttacacacgttgcagcatcgatcaccacctgttcgatcgcgtcgccgtcaccggtaccgagctcgaattccggattaagacccgtcgtcaagtaggaattccagaaatcaacgcacggtaactaaatcctcgcgctaagctgggtcagtgcgcacgataacttcgtatagcatacattatacgaagttataacagcggaccgggttaccgaattcctgcccttaaggccaattgttcaagattcattcaacaattgaaacatctcccatgattaaatcagtataaggttgctatggtcttgcttgacaaagtttttttttgagggaatttcaactaaatttttgagtgaaactatcaaatactgattttaaaaaatttttataaaaggaagcgcagagataaaaggccatctatgctacaaaagtacccaaaaatgtaatcctaaagtatgaattgcattttttttttgtttggacgaaaggaaaggagtattaccacaagaatgatatcatcttcatatttagatcttttttgggtaaagcttgagattctctaaatatagagaaatcagaagaaaaaaaaaccgtgttttggtggttttgatttctagcctccacaataactttgacggcgtcgacaagtctaacggacaccaagcagcgaaccaccagcgccgagccaagcgaagcagacggccgagacgttgacaccttcggcgcggcatctctcgagagttccgctccggcgctccacctccaccgctggcggtttcttattccgttccgttccgcctcctgctctgctcctctccacaccacacggcacgaaaccgttacggcaccggcagcacccagcacgggagaggggattcctttcccaccgttccttccctttccgccccgccgctataaatagccagccccatccccagcttttttccccaatctcatctcctctctcctgttgttcggagcacacgcacaatccgatcgatccccaaatccccttcgtctctcctcgcgagcctcgtggatcccagcttcaaggtacggcgatcgatcatcccccctccttctctctaccttcttttctctagactacatcggatggcgatccatggttagggcctgctagtttcccttcctgttttgtcgatggctgcgaggcacaatagatctgatggcgttatgacggctaacttgtcatgttgttgcgatttatagtccctttaggagatcagtttaatttctcggatggttcgagatcggtggtccatggttagtaccctaagatccgcgctgttagggttcgtagatggaggcgacctgttctgattgttaacttgtcagtacctgggaaatcctgggatggttctagctcgtccgcagatgagatcgatttcatgatcctctgtatcttgtttcgttgcctaggttccgtctaatctatccgtggtatgatgtagatgttttgatcgtgctaactacgtcttgtaaagttaattgtcaggtcataatttttagcatgcctttttttttgtttggttttgtctaattgggctgtcgttctagatcagagtagaagactgttccaaactacctgctggatttattgaacttggatctgtatgtgtgtcacatatcttcataaattcatgattaagatggattgaaatatcttttatctttttggtatggatagttctatatgttggtgtggctttgttagatgtatacatgcttagatacatgaagcaacgtgctgctactgtttagtaattgctgttcatttgtctaataaacagataaggatatgtatttatgttgctgttggttttgctggtactttgttggatacaaatgcttcaatacagaaaacagcatgctgctacgatttaccatttatctaatcttatcatatgtctaatctaataaacaaacatgcttttaaattatcttcatatgcttggatgatggcatacacagcggctatgtgtggttttttaaatacccagcatcatgggcatgcatgacactgctttaatatgctttttatttgcttgagactgtttcttttgtttatactgaccctttagttcggtgactcttctgcaggtcgactttaacttagcctaggatccatggcccagtccaagcacggcctgaccaaggagatgaccatgaagtaccgcatggagggctgcgtggacggccacaagttcgtgatcaccggcgagggcatcggctaccccttcaagggcaagcaggccatcaacctgtgcgtggtggagggcggccccttgcccttcgccgaggacatcttgtccgccgccttcatgtacggcaaccgcgtgttcaccgagtacccccaggacatcgtcgactacttcaagaactcctgccccgccggctacacctgggaccgctccttcctgttcgaggacggcgccgtgtgcatctgcaacgccgacatcaccgtgagcgtggaggagaactgcatgtaccacgagtccaagttctacggcgtgaacttccccgccgacggccccgtgatgaagaagatgaccgacaactgggagccctcctgcgagaagatcatccccgtgcccaagcagggcatcttgaagggcgacgtgagcatgtacctgctgctgaaggacggtggccgcttgcgctgccagttcgacaccgtgtacaaggccaagtccgtgccccgcaagatgcccgactggcacttcatccagcacaagctgacccgcgaggaccgcagcgacgccaagaaccagaagtggcacctgaccgagcacgccatcgcctccggctccgccttgccctccggactcagatctcgatagggtaccaatggccagttaacagatccagctgctgctgttctagggttcacaagtctgcctatttgtcttccccaatggagctatggttgtctggtctggtccttggtcgtgtcccgtttcattgtgtactatttacctgtaatgtgtatccttaagtctggtttgatggtgtctgaaacgttttgctgtggtagagcagcatggaagaactataatgaataagtgatccctaatcattgtgtccaaattttgcttctgctatacccttttgtgctgtttcttatgttttgcttaaaaatttgatctgacaaacaaatttgtctaaattatgctcttgttctgactgtgtactgtacacatttgtattgctaccggtttggcacatagttttctctttgattgcagatcaaacccttctgattgcagattgcttggctatggctgatgtgctcactgttcttctttagcttgtatattgctgatggtggcttggctacggctgaaaaagttgctgctgcgccgacttggcaactgttgctccagtaatgctttgtcctctcttcctagccgccgacttggcacttggcagctgttgctcctgtaatgcgttgttatctcttatctcttgagatgtactatgattttgaggctgtttgacttgtgccagattgccagtgctgatgctatattatctcaggtttttatgctagtatatgttttactgtgtgctgcctgtgtcgagttacgtaatctattgaaccgctatgcgtgttgatgccctgttgttgcttgccagattgatgcccctgttgcttgcagcttgcaagctgtagtgaaatcctaaaattcgaaaccaaatctattctgaacttttgaagatctgtgatgtccggaagaaaagattcaaacagataaacgggactctccagaatctataaaataaatgatcgacaaacgctttgctttggtaggcttcctagttagttagcggaccgggatccgacggcgtcttcaccgccccgccgccgcccgagccggacttgtcgctgccgccgccgctgctcatcttgcgcgcttgtgtccctccctcagtccctgcgttcgcggatcgcgggcgggtgcgacccgtttggactccggccggtagccttcgtgccgacctcgctcggtccaccggtttgtcggggacccacatgtcagtgaaggtacgcgtccacgtccacagaccctactaccccagacgagtccaaatcgctgttccctcacactctcgtgtaccagcgcgcggcggaaagcacctttccaacaaccgccgacacgtcggtcccacgtcggcatgctccaccggtcagtgtttggcgtgtacggctcccggcgacgaacgagtgtggcctaagctttcctactcccatcccatctgagccacacatctctctcacgccacgcgcacaaaacagccaggctcccacgcgcatcaaccggctctccctttccgtgccactcgcccccaagccccaaaccctcgccgccgcctccgagacagccgccgccacctaggccatggccaccgccgccgccgcgtctaccgcgctcactggcgccactaccgctgcgcccaaggcgaggcgccgggcgcacctcctggccacccgccgcgccctcgccgcgcccatcaggtgctcagcggcgtcacccgccatgccgatggctcccccggccaccccgctccggccgtggggccccaccgagccccgcaagggtgctgacatcctcgtcgagtccctcgagcgctgcggcgtccgcgacgtcttcgcctaccccggcggcgcgtcgatggagatccaccaggcactcacccgctcccccgtcatcgccaaccacctcttccgccacgagcaaggggaggcctttgccgcctccggctacgcgcgctcctcgggccgcgtcggcgtctgcatcgccacctccggccccggcgccaccaacctagtctccgcgctcgccgacgcgctgctcgattccgtcccgatggtcgccatcacgggacaggtggcgcgacgcatgattggcaccgacgccttccaggagacgcccatcgtcgaggtcacgcgctccatcaccaagcacaactacctggtcctcgacgtcgacgacatcccccgcgtcgtgcaggaggctttcttcctcgcctcctctggtcgaccagggccggtgcttgtcgacatccccaaggacatccagcagcagatggcggtgcctgtctgggacaagcccatgagtctgcctgggtacattgcgcgccttcccaagccccctgcgactgagttgcttgagcaggtgctgcgtcttgttggtgaatcgcggcgccctgttctttatgtgggcggtggctgcgcagcatctggtgaggagttgcgacgctttgtggagctgactggaatcccggtcacaactactcttatgggcctcggcaacttccccagcgacgacccactgtctctgcgcatgctaggtatgcatgggacggtgtatgcaaattatgcagtggataaggccgatctgttgcttgcacttggtgtgcggtttgatgatcgcgtgacagggaagattgaggcttttgcaagcagggctaagattgtgcacgttgatattgatccggctgagattggcaagaacaagcagccacatgtgtccatctgtgcagatgttaagcttgctttgcagggcatgaatgctcttcttgaaggaagcacatcaaagaagagctttgactttggctcatggaacgatgagttggatcagcagaagagggaattcccccttgggtataaaacatctaatgaggagatccagccacaatatgctattcaggttcttgatgagctgacgaaaggcgaggccatcatcggcacaggtgttgggcagcaccagatgtgggcggcacagtactacacttacaagcggccaaggcagtggttgtcttcagctggtcttggggctatgggatttggtttgccggctgctgctggtgcttctgtggcaaacccaggtgtcactgttgttgacatcgatggagatggtagctttctcatgaacgttcaggagctagctatgatccgaattgagaacctcccagtgaaggtctttgtgctaaacaaccagcacctggggatggtggtgcagttggaggacaggttctataaggccaacagagcgcacacatacttgggaaacccagagaatgaaagtgagatatatccagatttcgtgacgatcgccaaagggttcaacattccagccgtccgtgtgacaaagaagaacgaagtccgcgcagcgataaagaagatgctcgagactccagggccgtacctcttggatataatcgtcccacaccaggagcatgtgttgcctatgatccctagtggtggggctttcaaggatatgatcctggatggtgatggcaggactgtgtactgacttcgaataggtacccggggatcctctagtgccgtgggtcgtttaagctgccgctgtacctgtgtcgtctggtgccttctggtgtacctgggaggttgtcgtctatcaagtatctgtggttggtgtcatgagtcagtgagtcccaatactgttcgtgtcctgtgtgcattatacccaaaactgttatgggcaaatcatgaataagcttgatgttcgaacttaaaagtctctgctcaatatggtattatggttgtttttgttcgtctcctaatatttgcctgggatcaaattttattggctggtgttcatttgacctccatgttcttgctaggctccattttttactctacagccataatatgtttgattgtttggtttgttctttgttgtacacctggttctgtcgagcttagttttcgacactggcttacagcttaacatgttgctattttattgggttctgattgctattttattgggttctgattgctagtttttgctgaatccaaaaaccatgttatttatttaagcgatccaggttattattatgatggtggctaagtttttttttttccaagggtaaattttctggattctccagtgtttctgtggccgaattcaatcactagagtcgacctgcaaagcttcggtccgggcctagaaggcccgcgccacttacgcttgattccgatgacttcgtaggttcctagctcaagccgctcgtgtccaagcgtcacttacgattagctaatgattacggcatctaggaccgactagctagctagctaagagctcggtaccgagctcgaattcattccgattaatcgtggcctcttgctcttcaggatgaagagctatgtttaaacgtgcaagcgctactagacaattcagtacattaaaaacgtccgcaatgtgttattaagttgtctaagcgtcaatttgtttacaccacaatatatcctgcca

SEQ ID NO: 21 - DNA, 17767 bp, synthetic construct
  misc_feature 1..17767: note = PHP93696
  source 1..17767: mol_type = other DNA
gtttacccgccaatatatcctgtcaaacactgcggccgcacttgaccgcggatggagccggagctgtggtgaggccatcgacgggaggtgggggagaacacagtctcagtgttctttgtgagtccgcaaggtttttagcttttctgtattaattaaggttgctgttggctgtagaatacggtcgtggaagagctgtatcggtagctactacgtaagctattatatactggaagtctggagctcgtcgatctccggtcgtcttcctccatttctcctcgtcttgctttgactgctgctaccatttgcttctgttttctgatgaagcatgccatgtcggccaccagtgtttgtgtggtttttgcagggaatggctttcaagtgctgtgattgaatggccctcgtcgtcctcggctgagctcacatggacgcgtcatgtgagtgagatatatgatcatatgatgagtggggttcgggtgagtgcgtacttgaagtaggatcccgctttcactcattcattcattggcctttaaaccgggaaattttcgcgaggagatggagggaagcaagcagggtgacgagtgcagagtgccgcgagcgctttgtcaaaaggcaccgccgtaggcaaaaaaatcaatggccctgactgactcgatggtagtactactgtagagactagagagggttgctccccatatcttcgtgtgacttttactccagcattgcatttccgtcattgagacgttaattaatagcagctttcgggacagatgactgtggccatgtttcgtcacggccgcttcgtgccagctgggggtactatagtactgtgattttgttagtaaaaactttcattaggccaccattgacgaccgggccttcgcttttgctgcgctaattaaccatttcccggcgaccgaagggaacatgaacatgccccgacacatgagggcatgaggactagtgttctccctgtcgttcgttgacttgactagtgatagtttaaacgctcttcaactggaagagcggttactaccggttcactagctagctgctaatcgagctagttaccctatgaggtgacatgaagcgctcacggttactatgacggttagcttcacgactgttggtggcagtagcgtacgacttagctatagttccggacttacctagctagaattcgagctcggtaccctggttcacaaactcaatacaacacacagtggagtagggtattacgctccggcggcccgaaccactctaaatccttgtgtcctcgtgtgctcttccaccattaatgactgtaattgcagggacacgaagagttgtagcgcttttgccaacaagatccgctatatgctagtagagtggaacctgcacagcaacaagcatccaataatctgagaataagaattatgtgtggtgatggttctcatctctgcaactcgccattttcgcgagagaaccaaatccaagttggtgaagatcatgatttgggctcatgggctggcatagtagctattacctttgcaattgtggttcgaatctatccgatattctccttttcagggagagctaatgcttatgcttattgggtattttggtttgacactgcttcacgcccaaaaaaaggcaactatgtctgagttggatatggcccaaaaaaaggcagctatgtctgagttggatatggaagtcttctttcgtttagggtgaagtaagaccaagctcatgagcttattatcttaggtcggaacaaattagttgataggcatggcacatttatcaaattataatgattttaacagaaaagcaacacctctttttcagcagcaccagctttgcaagctgcaattgacactccaagcatagtatttgctccaaactcagcctgcatttcgcacaatatcatatctatttccatttggataaaatatattttccagaaatatgggaacagaatcaagatacagaaaaaagttgtggtagtagtggtaagtggaaacacaagtacagtgaaaagatagcattatttctgaacagtcaaattaaccgaaataagtagtatcacatactgcccctaaattgactacacccaatgtaaagaattgcttgagcatattgagccatcagttgtttgtttgtgtaacggatttgacaatgcagagttcaggagcaaaaaaccgcaaaggagagaaagagggaaaggatctcctagtatcccaccttgtggcgcgccctgtcaagtgcatgatggcctggtcgatctgcgtctgctgctgcggttccatcccaacgagtgcctccgacaccttgtcgttgatcacccgcaccgcgtaggcgacccccctggcgaggaacttccgcctctcggaggccccggccgcgtcggcggcggcgccctcgagcgcgcccacgctagccgtagatgctcggtgcacggccttgttggtgtgcaactcgacctcaacggccggtgcgctacgcccgtcaaggatctggcgcgcccgcaccctcgtgatcacggtgggcgcctcccgcctcatgtggccgacgatgaaaagcgccgggttaggggccttggcgcgcaccgccgtattcagggcctcctcgctcttgcgcgagagcaggtgcttccccaggtactcctgcactgacaaggctgccacagcggtggaatttgtcctcacgacttcgccacgtcgtcctcacctccctggcttcccacgactccgccgtatcgaggtgctcggtgggtcgtcttaatccgaagtccgaactaggaagacgagacagagaggtctgaggaatgggcctcgtttgatgttgagctgaattatttttccagcataagcccaggtcttggtccatgaacaaaattactagaaacccagcccagtactacgatctaaaagagggactgccactggatagctctctctagcattctccacgctccaatacagcggcgtcgtgtctatccgggtctatccgcgaacacgtgagaactctccagaaactgctttctcctccacttcatctctctcgctttccctctataaaaagaccccttctaggaattgagggagacagcaagcaccaagcagcgatccgaagctcaatcaattcactcaaacctcttccccaaatcttcgattagatcttcgttgacaagaagactagaaccgaacctgacatgtccaacctgctcacggttcaccagaaccttccggctcttccagtggacgcgacgtccgatgaagtcaggaagaacctcatggacatgttccgcgacaggcaagcgttcagcgagcacacctggaagatgctgctctccgtctgccgctcctgggctgcatggtgcaagctgaacaacaggaagtggttccccgctgagcccgaggacgtgagggattaccttctgtacctgcaagcgcgaggtttgtttctgcttctacctttgatatatatataataattatcattaattagtagtaatataatatttcaaatatttttttcaaaataaaagaatgtagtatatagcaattgcttttctgtagtttataagtgtgtatattttaatttataacttttctaatatatgaccaaaacatggtgatgcctaggtctggcagtgaagaccatccagcaacaccttggacaactgaacatgcttcacaggcgctccggcctcccgcgccccagcgactcgaacgccgtgagcctcgtcatgcgccgcatcaggaaggaaaacgtcgatgccggcgaaagggcaaagcaggccctcgcgttcgagaggaccgatttcgaccaggtccgcagcctgatggagaacagcgacaggtgccaggacattaggaacctggcgttcctcggaattgcatacaacacgctcctcaggatcgcggaaattgcccgcattcgcgtgaaggacattagccgcaccgacggcggcaggatgcttatccacattggcaggaccaagacgctcgtttccaccgcaggcgtcgaaaaggccctcagcctcggagtgaccaagctcgtcgaacgctggatctccgtgtccggcgtcgcggacgacccaaacaactacctcttctgccgcgtccgcaagaacggggtggctgcccctagcgccaccagccaactcagcacgagggccttggaaggtattttcgaggccacccaccgcctgatctacggcgcgaaggatgacagcggtcaacgctacctcgcatggtccgggcactccgcccgcgttggagctgctagggacatggcccgcgccggtgtttccatccccgaaatcatgcaggcgggtggatggacgaacgtgaacattgtcatgaactacattcgcaaccttgacagcgagacgggcgcaatggttcgcctcctggaagatggtgactgaggtacccaacctagacttgtccatcttctggattggccaacttaattaatgtatgaaataaaaggatgcacacatagtgacatgctaatcactataatgtgggcatcaaagttgtgtgttatgtgtaattactagttatctgaataaaagagaaagagatcatccatatttcttatcctaaatgaatgtcacgtgtctttataattctttgatgaaccagatgcatttcattaaccaaatccatatacatataaatattaatcatatataattaatatcaattgggttagcaaaacaaatctagtctaggtgtgttttgcgatccgatatcacgtaagcgcttacgacgtaagcgcttacgcacgtgcagcgtgacccggtcgtgcccctctctagagataatgagcattgcatgtctaagttataaaaaattaccacatattttttttgtcacacttgtttgaagtgcagtttatctatctttatacatatatttaaactttactctacgaataatataatctatagtactacaataatatcagtgttttagagaatcatataaatgaacagttagacatggtctaaaggacaattgagtattttgacaacaggactctacagttttatctttttagtgtgcatgtgttctcctttttttttgcaaatagcttcacctatataatacttcatccattttattagtacatccatttagggtttagggttaatggtttttatagactaatttttttagtacatctattttattctattttagcctctaaattaagaaaactaaaactctattttagtttttttatttaataatttagatataaaatagaataaaataaagtgactaaaaattaaacaaataccctttaagaaattaaaaaaactaaggaaacatttttcttgtttcgagtagataatgccagcctgttaaacgccgtcgacgagtctaacggacaccaaccagcgaaccagcagcgtcgcgtcgggccaagcgaagcagacggcacggcatctctgtcgctgcctctggacccctctcgagagttccgctccaccgttggacttgctccgctgtcggcatccagaaattgcgtggcggagcggcagacgtgagccggcacggcaggcggcctcctcctcctctcacggcaccggcagctacgggggattcctttcccaccgctccttcgctttcccttcctcgcccgccgtaataaatagacaccccctccacaccctctttccccaacctcgtgttgttcggagcgcacacacacacaaccagatctcccccaaatccacccgtcggcacctccgcttcaaggtacgccgctcgtcctcccccccccccctctctaccttctctagatcggcgttccggtccatgcatggttagggcccggtagttctacttctgttcatgtttgtgttagatccgtgtttgtgttagatccgtgctgctagcgttcgtacacggatgcgacctgtacgtcagacacgttctgattgctaacttgccagtgtttctctttggggaatcctgggatggctctagccgttccgcagacgggatcgatttcatgattttttttgtttcgttgcatagggtttggtttgcccttttcctttatttcaatatatgccgtgcacttgtttgtcgggtcatcttttcatgcttttttttgtcttggttgtgatgatgtggtctggttgggcggtcgttctagatcggagtagaattctgtttcaaactacctggtggatttattaattttggatctgtatgtgtgtgccatacatattcatagttacgaattgaagatgatggatggaaatatcgatctaggataggtatacatgttgatgcgggttttactgatgcatatacagagatgctttttgttcgcttggttgtgatgatgtggtgtggttgggcggtcgttcattcgttctagatcggagtagaatactgtttcaaactacctggtgtatttattaattttggaactgtatgtgtgtgtcatacatcttcatagttacgagtttaagatggatggaaatatcgatctaggataggtatacatgttgatgtgggttttactgatgcatatacatgatggcatatgcagcatctattcatatgctctaaccttgagtacctatctattataataaacaagtatgttttataattattttgatcttgatatacttggatgatggcatatgcagcagctatatgtggatttttttagccctgccttcatacgctatttatttgcttggtactgtttcttttgtcgatgctcaccctgttgtttggtgttacttctgcagataacttcgtatagcatacattatacgaagttatacgtaagcgcttacgacgtaagcgcttacgccggctttaattcgtaacgagcagtttataccgttttgcgctgcattcaccttcgtgagtccggaccccggaagacaggaactgtagcctttttccctttgctagcatgaatatgaatagaataacacgaatttaacatcaattcagctcatattggaacaatctacgcctaaaatttagtggaacacgttttgctcattttccttgaaaagcaacagtgaagcaacatcggtaaaggttcttttggttgcctctaacggtctaacctgaggattcagttataatctggaacatgacagaaacagagcctcgcacccgttttgggaccaaaaccacatgatcgatctccaagaagattattttggacaatatttttccagccacaggcaatccgaagaccacaaatcagaggcactccaaatgcagcccatccattggaccatacagataagacccggataaggcaggatccatggcggccaatgcgggcggcggtggagcgggaggaggcagcggcagcggcagcgtggctgcgccggcggtgtgccgccccagcggctcgcggtggacgccgacgccggagcagatcaggatgctgaaggagctctactacggctgcggcatccggtcgcccagctcggagcagatccagcgcatcaccgccatgctgcggcagcacggcaagatcgagggcaagaacgtcttctactggttccagaaccacaaggcccgcgagcgccagaagcgccgcctcaccagcctcgacgtcaacgtgcccgccgccggcgcggccgacgccaccaccagccaactcggcgtcctctcgctgtcgtcgccgccgccttcaggcgcggcgcctccctcgcccaccctcggcttctacgccgccggcaatggcggcggatcggctgtgctgctggacacgagttccgactggggcagcagcggcgctgctatggccaccgagacatgcttcctgcaggactacatgggcgtgacggacacgggcagctcgtcgcagtggccacgcttctcgtcgtcggacacgataatggcggcggccgcggcgcgggcggcgacgacgcgggcgcccgagacgctccctctcttcccgacctgcggcgacgacggcggcagcggtagcagcagctacttgccgttctggggtgccgcgtccacaactgccggcgccacttcttccgttgcgatccaacagcaacaccagctgcaggagcagtacagcttttacagcaacagcaacagcacccagctggccggcaccggcaaccaagacgtatcggcaacagcagcagcagccgccgccctggagctgagcctcagctcatggtgctccccttaccctgctgcagggagtatgtgagatctgacaaagcagcattagtccgttgatcggtggaagaccactcgtcagtgttgagttgaatgtttgatcaataaaatacggcaatgctgtaagggttgttttttatgccattgataatacactgtactgttcagttgttgaactctatttcttagccatgccaagtgcttttcttattttgaataacattacagcaaaaagttgaaagacaaaaaaaaaaacccccgaacagagtgctttgggtcccaacgttctttagactgtgttcggcgttccccctaaatttctccccctatatctcactcacttgtcacatcagcgttctctttccccctatatctccacgctctacagcagttccacctatatcaaacctctataccccaccacaacaatattatatactttcatcttcaactaactcatgtaccttccaatttttttctactaataattatttacgtgcacagaaacttaggcaagggagagagagagctctagatgctcggcgttaggcttttagtccgctaggtggctagaccgaggttaggacgctagttcactaggggcctagtggtgttttaagtgcgcataacttcgtatagcatacattatacgaagttataggatccatggactccagcagcttcctccctgccgccggcgcggagaatggctcggcggcgggcggcgccaacaatggcggcgctgctcagcagcatgcggcgccggcgatccgcgagcaggaccggctgatgccgatcgcgaacgtgatccgcatcatgcggcgcgtgctgccggcgcacgccaagattagcgacgacgccaaggagacgatccaggagtgcgtgtcggagtacatcagcttcatcacgggggaggccaacgagcggtgccagcgggagcagcgcaagaccatcaccgccgaggacgtgctgtgggccatgagccgcctcggcttcgacgactacgtcgagccgctcggcgcctacctccaccgctaccgcgagttcgagggcgacgcgcgcggcgtcgggctcgtccctggggccgccccatcgcgcggcggcgaccaccacccgcactccatgtcgccagcggcgatgctcaagtcccgcgggccagtctccggagccgccatgctaccgcaccaccaccaccaccacgacatgcagatgcacgccgccatgtacgggggaacggccgtgcccccgccggccgggcctcctcaccacggcgggttcctcatgccacacccacagggtagtagccactacctgccttacgcgtacgagcccacgtacggcggtgagcacgcgatggctgcatactatggaggcgccgcgtacgcgcccggcaacggcgggagcggcgacggcagtggcagtggcggcggtggcgggagcgcgtcgcacacaccgcagggcagcggcggcttggagcacccgcacccgttcgcgtacaagtagtggtacctgacatcttatagtctgcaacctctcgtgtctgaattcctatctttatcaagtgttattgcttccacgactataggacagctttcgtcgaaagcttttgctcatgtgatctcgaaggattcatctagtctgatttttcgtgacttgtatcggttttattggattcatccaacatatatcaataaaaaatgagttgtgtttcctttcttcctagttcagttaaaattatttccctcctgcgcttgtgctgtaattgtctgtgtacctgttgtttgtgactgtgttagttcccttggatatgatttcgtatttgatatgtacatggagatagcttagcttcattattggagtatgaagttagtatgacatagtcactctcctggaaaattgacactgcaaaccatatttttattctgaaccacaaatcctagtcagtccgctggcatatgccgtccgtttgctgaatccagaacgtgggtttggagatgtacggctgagatgcctctatgcgaaggggatttcgtggtgaaacgagatgggagtagagcaacgcccgtggaagatgcttcaaacttccacacttttgagcaacgatcggcagtagtaaggtagacgatttcaagatcaaagcatatgaagataaacaacatcaacaacaaaatttgttggggttctatagagagaaacagagctacatacatacactgttttgtatctaccatctgagatgatgaaaagatgaaaaactaaagaatgccccggcgccaacgccaggacacgccgcgcgcgcgtcacccgagccatctcttgacccagccggcgctgtatatttacacacgttgcagcatcgatcaccacctgttcgatcgcgtcgccgtcacccgtacgcgtattaagacccgtcgtcaagtaggaattccagaaatcaacgcacggtaactaaatcctcgcgctaagctgggtcagcggaccgcggaccgggttaccgaattcctgcccttaaggccaattgttcaagattcattcaacaattgaaacatctcccatgattaaatcagtataaggttgctatggtcttgcttgacaaagtttttttttgagggaatttcaactaaatttttgagtgaaactatcaaatactgattttaaaaaatttttataaaaggaagcgcagagataaaaggccatctatgctacaaaagtacccaaaaatgtaatcctaaagtatgaattgcattttttttttgtttggacgaaaggaaaggagtattaccacaagaatgatatcatcttcatatttagatcttttttgggtaaagcttgagattctctaaatatagagaaatcagaagaaaaaaaaaccgtgttttggtggttttgatttctagcctccacaataactttgacggcgtcgacaagtctaacggacaccaagcagcgaaccaccagcgccgagccaagcgaagcagacggccgagacgttgacaccttcggcgcggcatctctcgagagttccgctccggcgctccacctccaccgctggcggtttcttattccgttccgttccgcctcctgctctgctcctctccacaccacacggcacgaaaccgttacggcaccggcagcacccagcacgggagaggggattcctttcccaccgttccttccctttccgccccgccgctataaatagccagccccatccccagcttttttccccaatctcatctcctctctcctgttgttcggagcacacgcacaatccgatcgatccccaaatccccttcgtctctcctcgcgagcctcgtggatcccagcttcaaggtacggcgatcgatcatcccccctccttctctctaccttcttttctctagactacatcggatggcgatccatggttagggcctgctagtttcccttcctgttttgtcgatggctgcgaggcacaatagatctgatggcgttatgacggctaacttgtcatgttgttgcgatttatagtccctttaggagatcagtttaatttctcggatggttcgagatcggtggtccatggttagtaccctaagatccgcgctgttagggttcgtagatggaggcgacctgttctgattgttaacttgtcagtacctgggaaatcctgggatggttctagctcgtccgcagatgagatcgatttcatgatcctctgtatcttgtttcgttgcctaggttccgtctaatctatccgtggtatgatgtagatgttttgatcgtgctaactacgtcttgtaaagttaattgtcaggtcataatttttagcatgcctttttttttgtttggttttgtctaattgggctgtcgttctagatcagagtagaagactgttccaaactacctgctggatttattgaacttggatctgtatgtgtgtcacatatcttcataaattcatgattaagatggattgaaatatcttttatctttttggtatggatagttctatatgttggtgtggctttgttagatgtatacatgcttagatacatgaagcaacgtgctgctactgtttagtaattgctgttcatttgtctaataaacagataaggatatgtatttatgttgctgttggttttgctggtactttgttggatacaaatgcttcaatacagaaaacagcatgctgctacgatttaccatttatctaatcttatcatatgtctaatctaataaacaaacatgcttttaaattatcttcatatgcttggatgatggcatacacagcggctatgtgtggttttttaaatacccagcatcatgggcatgcatgacactgctttaatatgctttttatttgcttgagactgtttcttttgtttatactgaccctttagttcggtgactcttctgcaggtcgactttaacttagcctaggatccatggcccagtccaagcacggcctgaccaaggagatgaccatgaagtaccgcatggagggctgcgtggacggccacaagttcgtgatcaccggcgagggcatcggctaccccttcaagggcaagcaggccatcaacctgtgcgtggtggagggcggccccttgcccttcgccgaggacatcttgtccgccgccttcatgtacggcaaccgcgtgttcaccgagtacccccaggacatcgtcgactacttcaagaactcctgccccgccggctacacctgggaccgctccttcctgttcgaggacggcgccgtgtgcatctgcaacgccgacatcaccgtgagcgtggaggagaactgcatgtaccacgagtccaagttctacggcgtgaacttccccgccgacggccccgtgatgaagaagatgaccgacaactgggagccctcctgcgagaagatcatccccgtgcccaagcagggcatcttgaagggcgacgtgagcatgtacctgctgctgaaggacggtggccgcttgcgctgccagttcgacaccgtgtacaaggccaagtccgtgccccgcaagatgcccgactggcacttcatccagcacaagctgacccgcgaggaccgcagcgacgccaagaaccagaagtggcacctgaccgagcacgccatcgcctccggctccgccttgccctccggactcagatctcgatagggtaccaatggccagttaacagatccagctgctgctgttctagggttcacaagtctgcctatttgtcttccccaatggagctatggttgtctggtctggtccttggtcgtgtcccgtttcattgtgtactatttacctgtaatgtgtatccttaagtctggtttgatggtgtctgaaacgttttgctgtggtagagcagcatggaagaactataatgaataagtgatccctaatcattgtgtccaaattttgcttctgctatacccttttgtgctgtttcttatgttttgcttaaaaatttgatctgacaaacaaatttgtctaaattatgctcttgttctgactgtgtactgtacacatttgtattgctaccggtttggcacatagttttctctttgattgcagatcaaacccttctgattgcagattgcttggctatggctgatgtgctcactgttcttctttagcttgtatattgctgatggtggcttggctacggctgaaaaagttgctgctgcgccgacttggcaactgttgctccagtaatgctttgtcctctcttcctagccgccgacttggcacttggcagctgttgctcctgtaatgcgttgttatctcttatctcttgagatgtactatgattttgaggctgtttgacttgtgccagattgccagtgctgatgctatattatctcaggtttttatgctagtatatgttttactgtgtgctgcctgtgtcgagttacgtaatctattgaaccgctatgcgtgttgatgccctgttgttgcttgccagattgatgcccctgttgcttgcagcttgcaagctgtagtgaaatcctaaaattcgaaaccaaatctattctgaacttttgaagatctgtgatgtccggaagaaaagattcaaacagataaacgggactctccagaatctataaaataaatgatcgacaaacgctttgctttggtaggcttcctagttagttagcggaccgggatccgacggcgtcttcaccgccccgccgccgcccgagccggacttgtcgctgccgccgccgctgctcatcttgcgcgcttgtgtccctccctcagtccctgcgttcgcggatcgcgggcgggtgcgacccgtttggactccggccggtagccttcgtgccgacctcgctcggtccaccggtttgtcggggacccacatgtcagtgaaggtacgcgtccacgtccacagaccctactaccccagacgagtccaaatcgctgttccctcacactctcgtgtaccagcgcgcggcggaaagcacctttccaacaaccgccgacacgtcggtcccacgtcggcatgctccaccggtcagtgtttggcgtgtacggctcccggcgacgaacgagtgtggcctaagctttcctactcccatcccatctgagccacacatctctctcacgccacgcgcacaaaacagccaggctcccacgcgcatcaaccggctctccctttccgtgccactcgcccccaagccccaaaccctcgccgccgcctccgagacagccgccgccacctaggccatggccaccgccgccgccgcgtctaccgcgctcactggcgccactaccgctgcgcccaaggcgaggcgccgggcgcacctcctggccacccgccgcgccctcgccgcgcccatcaggtgctcagcggcgtcacccgccatgccgatggctcccccggccaccccgctccggccgtggggccccaccgagccccgcaagggtgctgacatcctcgtcgagtccctcgagcgctgcggcgtccgcgacgtcttcgcctaccccggcggcgcgtcgatggagatccaccaggcactcacccgctcccccgtcatcgccaaccacctcttccgccacgagcaaggggaggcctttgccgcctccggctacgcgcgctcctcgggccgcgtcggcgtctgcatcgccacctccggccccggcgccaccaacctagtctccgcgctcgccgacgcgctgctcgattccgtcccgatggtcgccatcacgggacaggtggcgcgacgcatgattggcaccgacgccttccaggagacgcccatcgtcgaggtcacgcgctccatcaccaagcacaactacctggtcctcgacgtcgacgacatcccccgcgtcgtgcaggaggctttcttcctcgcctcctctggtcgaccagggccggtgcttgtcgacatccccaaggacatccagcagcagatggcggtgcctgtctgggacaagcccatgagtctgcctgggtacattgcgcgccttcccaagccccctgcgactgagttgcttgagcaggtgctgcgtcttgttggtgaatcgcggcgccctgttctttatgtgggcggtggctgcgcagcatctggtgaggagttgcgacgctttgtggagctgactggaatcccggtcacaactactcttatgggcctcggcaacttccccagcgacgacccactgtctctgcgcatgctaggtatgcatgggacggtgtatgcaaattatgcagtggataaggccgatctgttgcttgcacttggtgtgcggtttgatgatcgcgtgacagggaagattgaggcttttgcaagcagggctaagattgtgcacgttgatattgatccggctgagattggcaagaacaagcagccacatgtgtccatctgtgcagatgttaagcttgctttgcagggcatgaatgctcttcttgaaggaagcacatcaaagaagagctttgactttggctcatggaacgatgagttggatcagcagaagagggaattcccccttgggtataaaacatctaatgaggagatccagccacaatatgctattcaggttcttgatgagctgacgaaaggcgaggccatcatcggcacaggtgttgggcagcaccagatgtgggcggcacagtactacacttacaagcggccaaggcagtggttgtcttcagctggtcttggggctatgggatttggtttgccggctgctgctggtgcttctgtggcaaacccaggtgtcactgttgttgacatcgatggagatggtagctttctcatgaacgttcaggagctagctatgatccgaattgagaacctcccagtgaaggtctttgtgctaaacaaccagcacctggggatggtggtgcagttggaggacaggttctataaggccaacagagcgcacacatacttgggaaacccagagaatgaaagtgagatatatccagatttcgtgacgatcgccaaagggttcaacattccagccgtccgtgtgacaaagaagaacgaagtccgcgcagcgataaagaagatgctcgagactccagggccgtacctcttggatataatcgtcccacaccaggagcatgtgttgcctatgatccctagtggtggggctttcaaggatatgatcctggatggtgatggcaggactgtgtactgacttcgaataggtacccggggatcctctagtgccgtgggtcgtttaagctgccgctgtacctgtgtcgtctggtgccttctggtgtacctgggaggttgtcgtctatcaagtatctgtggttggtgtcatgagtcagtgagtcccaatactgttcgtgtcctgtgtgcattatacccaaaactgttatgggcaaatcatgaataagcttgatgttcgaacttaaaagtctctgctcaatatggtattatggttgtttttgttcgtctcctaatatttgcctgggatcaaattttattggctggtgttcatttgacctccatgttcttgctaggctccattttttactctacagccataatatgtttgattgtttggtttgttctttgttgtacacctggttctgtcgagcttagttttcgacactggcttacagcttaacatgttgctattttattgggttctgattgctattttattgggttctgattgctagtttttgctgaatccaaaaaccatgttatttatttaagcgatccaggttattattatgatggtggctaagtttttttttttccaagggtaaattttctggattctccagtgtttctgtggccgaattcaatcactagagtcgacctgcaaagcttcggtccgggcctagaaggcccgcgccacttacgcttgattccgatgacttcgtaggttcctagctcaagccgctcgtgtccaagcgtcacttacgattagctaatgattacggcatctaggaccgactagctagctagctaagagctcggtaccgagctcgaattcattccgattaatcgtggcctcttgctcttcaggatgaagagctatgtttaaacgtgcaagcgctactagacaattcagtacattaaaaacgtccgcaatgtgttattaagttgtctaagcgtcaatttgtttacaccacaatatatcctgcca

SEQ ID NO: 22 - DNA, 21105 bp, synthetic construct
  misc_feature 1..21105: note = PHP93738
  source 1..21105: mol_type = other DNA
gtttacccgccaatatatcctgtcaaacactgcggccgcacttgaccgcggatggagccggagctgtggtgaggccatcgacgggaggtgggggagaacacagtctcagtgttctttgtgagtccgcaaggtttttagcttttctgtattaattaaggttgctgttggctgtagaatacggtcgtggaagagctgtatcggtagctactacgtaagctattatatactggaagtctggagctcgtcgatctccggtcgtcttcctccatttctcctcgtcttgctttgactgctgctaccatttgcttctgttttctgatgaagcatgccatgtcggccaccagtgtttgtgtggtttttgcagggaatggctttcaagtgctgtgattgaatggccctcgtcgtcctcggctgagctcacatggacgcgtcatgtgagtgagatatatgatcatatgatgagtggggttcgggtgagtgcgtacttgaagtaggatcccgctttcactcattcattcattggcctttaaaccgggaaattttcgcgaggagatggagggaagcaagcagggtgacgagtgcagagtgccgcgagcgctttgtcaaaaggcaccgccgtaggcaaaaaaatcaatggccctgactgactcgatggtagtactactgtagagactagagagggttgctccccatatcttcgtgtgacttttactccagcattgcatttccgtcattgagacgttaattaatagcagctttcgggacagatgactgtggccatgtttcgtcacggccgcttcgtgccagctgggggtactatagtactgtgattttgttagtaaaaactttcattaggccaccattgacgaccgggccttcgcttttgctgcgctaattaaccatttcccggcgaccgaagggaacatgaacatgccccgacacatgagggcatgaggactagtgttctccctgtcgttcgttgacttgactagtgatagtttaaacgctcttcaactggaagagcggttactaccggttcactagctagctgctaatcgagctagttaccctatgaggtgacatgaagcgctcacggttactatgacggttagcttcacgactgttggtggcagtagcgtacgacttagctatagttccggacttacctagctaataacttcgtatagcatacattatacgaagttatggttaccgaattcgagctcggtaccctggttcacaaactcaatacaacacacagtggagtagggtattacgctccggcggcccgaaccactctaaatccttgtgtcctcgtgtgctcttccaccattaatgactgtaattgcagggacacgaagagttgtagcgcttttgccaacaagatccgctatatgctagtagagtggaacctgcacagcaacaagcatccaataatctgagaataagaattatgtgtggtgatggttctcatctctgcaactcgccattttcgcgagagaaccaaatccaagttggtgaagatcatgatttgggctcatgggctggcatagtagctattacctttgcaattgtggttcgaatctatccgatattctccttttcagggagagctaatgcttatgcttattgggtattttggtttgacactgcttcacgcccaaaaaaaggcaactatgtctgagttggatatggcccaaaaaaaggcagctatgtctgagttggatatggaagtcttctttcgtttagggtgaagtaagaccaagctcatgagcttattatcttaggtcggaacaaattagttgataggcatggcacatttatcaaattataatgattttaacagaaaagcaacacctctttttcagcagcaccagctttgcaagctgcaattgacactccaagcatagtatttgctccaaactcagcctgcatttcgcacaatatcatatctatttccatttggataaaatatattttccagaaatatgggaacagaatcaagatacagaaaaaagttgtggtagtagtggtaagtggaaacacaagtacagtgaaaagatagcattatttctgaacagtcaaattaaccgaaataagtagtatcacatactgcccctaaattgactacacccaatgtaaagaattgcttgagcatattgagccatcagttgtttgtttgtgtaacggatttgacaatgcagagttcaggagcaaaaaaccgcaaaggagagaaagagggaaaggatctcctagtatcccaccttgtggcgcgccctgtcaagtgcatgatggcctggtcgatctgcgtctgctgctgcggttccatcccaacgagtgcctccgacaccttgtcgttgatcacccgcaccgcgtaggcgacccccctggcgaggaacttccgcctctcggaggccccggccgcgtcggcggcggcgccctcgagcgcgcccacgctagccgtagatgctcggtgcacggccttgttggtgtgcaactcgacctcaacggccggtgcgctacgcccgtcaaggatctggcgcgcccgcaccctcgtgatcacggtgggcgcctcccgcctcatgtggccgacgatgaaaagcgccgggttaggggccttggcgcgcaccgccgtattcagggcctcctcgctcttgcgcgagagcaggtgcttccccaggtactcctgcactgacaaggctgccacagcggtggaatttgtcctcacgacttcgccacgtcgtcctcacctccctggcttcccacgactccgccgtatcgaggtgctcggtgggtcgtcttaatccgaagtccgaactaggaagacgagacagagaggtctgaggaatgggcctcgtttgatgttgagctgaattatttttccagcataagcccaggtcttggtccatgaacaaaattactagaaacccagcccagtactacgatctaaaagagggactgccactggatagctctctctagcattctccacgctccaatacagcggcgtcgtgtctatccgggtctatccgcgaacacgtgagaactctccagaaactgctttctcctccacttcatctctctcgctttccctctataaaaagaccccttctaggaattgagggagacagcaagcaccaagcagcgatccgaagctcaatcaattcactcaaacctcttccccaaatcttcgattagatcttcgttgacaagaagactagaaccgaacctgacatgtccaacctgctcacggttcaccagaaccttccggctcttccagtggacgcgacgtccgatgaagtcaggaagaacctcatggacatgttccgcgacaggcaagcgttcagcgagcacacctggaagatgctgctctccgtctgccgctcctgggctgcatggtgcaagctgaacaacaggaagtggttccccgctgagcccgaggacgtgagggattaccttctgtacctgcaagcgcgaggtttgtttctgcttctacctttgatatatatataataattatcattaattagtagtaatataatatttcaaatatttttttcaaaataaaagaatgtagtatatagcaattgcttttctgtagtttataagtgtgtatattttaatttataacttttctaatatatgaccaaaacatggtgatgcctaggtctggcagtgaagaccatccagcaacaccttggacaactgaacatgcttcacaggcgctccggcctcccgcgccccagcgactcgaacgccgtgagcctcgtcatgcgccgcatcaggaaggaaaacgtcgatgccggcgaaagggcaaagcaggccctcgcgttcgagaggaccgatttcgaccaggtccgcagcctgatggagaacagcgacaggtgccaggacattaggaacctggcgttcctcggaattgcatacaacacgctcctcaggatcgcggaaattgcccgcattcgcgtgaaggacattagccgcaccgacggcggcaggatgcttatccacattggcaggaccaagacgctcgtttccaccgcaggcgtcgaaaaggccctcagcctcggagtgaccaagctcgtcgaacgctggatctccgtgtccggcgtcgcggacgacccaaacaactacctcttctgccgcgtccgcaagaacggggtggctgcccctagcgccaccagccaactcagcacgagggccttggaaggtattttcgaggccacccaccgcctgatctacggcgcgaaggatgacagcggtcaacgctacctcgcatggtccgggcactccgcccgcgttggagctgctagggacatggcccgcgccggtgtttccatccccgaaatcatgcaggcgggtggatggacgaacgtgaacattgtcatgaactacattcgcaaccttgacagcgagacgggcgcaatggttcgcctcctggaagatggtgactgagctagacccagctttcttgtacaaagtggccgttaacggatgcagacttgtccatcttctggattggccaacttaattaatgtatgaaataaaaggatgcacacatagtgacatgctaatcactataatgtgggcatcaaagttgtgtgttatgtgtaattactagttatctgaataaaagagaaagagatcatccatatttcttatcctaaatgaatgtcacgtgtctttataattctttgatgaaccagatgcatttcattaaccaaatccatatacatataaatattaatcatatataattaatatcaattgggttagcaaaacaaatctagtctaggtgtgttttgcgaattgcggcaaggttgcgcccgccccagcttggtcagccgctccgggcttagaaggccgatctcgcgggcacccagctttcttctacaaagtggccgtttacggatcggctagaatgtcccgcaccggcttaccgatttgcacctcgctaccctgggttcgaccgaagctgaccgatgcttgcgcccgctcgcgaggccggccaagcttgatatcgaattcctgcagcccatccctcagccgcctttcactatcttttttgcccgagtcattgtcatgtgaaccttggcatgtataatcggtgaattgcgtcgattttcctcttataggtgggccaatgaatccgtgtgatcgcgtctgattggctagagatatgtttcttccttgttggatgtattttcatacataatcatatgcatacaaatatttcattacactttatagaaatggtcagtaataaaccctatcactatgtctggtgtttcattttatttgcttttaaacgaaaattgacttcctgattcaatatttaaggatcgtcaacggtgtgcagttactaaattctggtttgtaggaactatagtaaactattcaagtcttcacttattgtgcactcacctctcgccacatcaccacagatgttattcacgtcttaaatttgaactacacatcatattgacacaatattttttttaaataagcgattaaaacctagcctctatgtcaacaatggtgtacataaccagcgaagtttagggagtaaaaaacatcgccttacacaaagttcgctttaaaaaataaagagtaaattttactttggaccacccttcaaccaatgtttcactttagaacgagtaattttattattgtcactttggaccaccctcaaatcttttttccatctacatccaatttatcatgtcaaagaaatggtctacatacagctaaggagatttatcgacgaatagtagctagcatactcgaggtcattcatatgcttgagaagagagtcgggatagtccaaaataaaacaaaggtaagattacctggtcaaaagtgaaaacatcagttaaaaggtggtataaagtaaaatatcggtaataaaaggtggcccaaagtgaaatttactcttttctactattataaaaattgaggatgtttttgtcggtactttgatacgtcatttttgtatgaattggtttttaagtttattcgcttttggaaatgcatatctgtatttgagtcgggttttaagttcgtttgcttttgtaaatacagagggatttgtataagaaatatctttaaaaaaacccatatgctaatttgacataatttttgagaaaaatatatattcaggcgaattctcacaatgaacaataataagattaaaatagctttcccccgttgcagcgcatgggtattttttctagtaaaaataaaagataaacttagactcaaaacatttacaaaaacaacccctaaagttcctaaagcccaaagtgctatccacgatccatagcaagcccagcccaacccaacccaacccaacccaccccagtccagccaactggacaatagtctccacacccccccactatcaccgtgagttgtccgcacgcaccgcacgtctcgcagccaaaaaaaaaaaaagaaagaaaaaaaagaaaaagaaaaaacagcaggtgggtccgggtcgtgggggccggaaacgcgaggaggatcgcgagccagcgacgaggccggccctccctccgcttccaaagaaacgccccccatcgccactatatacatacccccccctctcctcccatccccccaaccctaccaccaccaccaccaccacctccacctcctcccccctcgctgccggacgacgagctcctcccccctccccctccgccgccgccgcgccggtaaccaccccgcccctctcctctttctttctccgttttttttttccgtcacggtctcgatctttggccttggtagtttgggtgggcgagaggcggcttcgtgcgcgcccagatcggtgcgcgggaggggcgggatctcgcggctggggctctcgccggcgtggatcaggcccggatctcgcggggaatggggctctcggatgtagatctgcgatccgccgttgttgggggagatgatggggggtttaaaatttccgccatgctaaacaagatcaggaagaggggaaaagggcactatggtttatatttttatatatttctgctgcttcgtcaggcttagatgtgctagatctttctttcttctttttgtgggtagaatttgaatccctcagcattgttcatcggtagtttttcttttcatgatttgtgacaaatgcagcctcgtgcggagcttttttgtaggtagaaggatccgcccatggcggccaatgcgggcggcggtggagcgggaggaggcagcggcagcggcagcgtggctgcgccggcggtgtgccgccccagcggctcgcggtggacgccgacgccggagcagatcaggatgctgaaggagctctactacggctgcggcatccggtcgcccagctcggagcagatccagcgcatcaccgccatgctgcggcagcacggcaagatcgagggcaagaacgtcttctactggttccagaaccacaaggcccgcgagcgccagaagcgccgcctcaccagcctcgacgtcaacgtgcccgccgccggcgcggccgacgccaccaccagccaactcggcgtcctctcgctgtcgtcgccgccgccttcaggcgcggcgcctccctcgcccaccctcggcttctacgccgccggcaatggcggcggatcggctgtgctgctggacacgagttccgactggggcagcagcggcgctgctatggccaccgagacatgcttcctgcaggactacatgggcgtgacggacacgggcagctcgtcgcagtggccacgcttctcgtcgtcggacacgataatggcggcggccgcggcgcgggcggcgacgacgcgggcgcccgagacgctccctctcttcccgacctgcggcgacgacggcggcagcggtagcagcagctacttgccgttctggggtgccgcgtccacaactgccggcgccacttcttccgttgcgatccaacagcaacaccagctgcaggagcagtacagcttttacagcaacagcaacagcacccagctggccggcaccggcaaccaagacgtatcggcaacagcagcagcagccgccgccctggagctgagcctcagctcatggtgctccccttaccctgctgcagggagtatgtgagagcaacgcgagctgccactgctcttcactgatgtctctggaatggaaggaggaggaagtgagaacagatcattcgacaaagcagcattagtccgttgatcggtggaagaccactcgtcagtgttgagttgaatgtttgatcaataaaatacggcaatgctgtaagggttgttttttatgccattgataatacactgtactgttcagttgttgaactctatttcttagccatgccaagtgcttttcttattttgaataacattacagcaaaaagttgaaagacaaaaaaaaaaacccccgaacagagtgctttgggtcccaagcttctttagactgtgttcggcgttccccctaaatttctccccctatatctcactcacttgtcacatcagcgttctctttccccctatatctccacgctctacagcagttccacctatatcaaacctctataccccaccacaacaatattatatactttcatcttcaactaactcatgtaccttccaatttttttctactaataattatttacgtgcacagaaacttagcaaggagagagagagcgggaatttaaatgctcggcgttaggcttttagtccgctaggtggctagaccgaggttaggacgctagttcactaggggcctagtggtgttttaagacgtcacggtcaccacgcgtggaccgaagcttgcatgcctgcagtgcagcgtgacccggtcgtgcccctctctagagataatgagcattgcatgtctaagttataaaaaattaccacatattttttttgtcacacttgtttgaagtgcagtttatctatctttatacatatatttaaactttactctacgaataatataatctatagtactacaataatatcagtgttttagagaatcatataaatgaacagttagacatggtctaaaggacaattgagtattttgacaacaggactctacagttttatctttttagtgtgcatgtgttctcctttttttttgcaaatagcttcacctatataatacttcatccattttattagtacatccatttagggtttagggttaatggtttttatagactaatttttttagtacatctattttattctattttagcctctaaattaagaaaactaaaactctattttagtttttttatttaataatttagatataaaatagaataaaataaagtgactaaaaattaaacaaataccctttaagaaattaaaaaaactaaggaaacatttttcttgtttcgagtagataatgccagcctgttaaacgccgtcgacgagtctaacggacaccaaccagcgaaccagcagcgtcgcgtcgggccaagcgaagcagacggcacggcatctctgtcgctgcctctggacccctctcgagagttccgctccaccgttggacttgctccgctgtcggcatccagaaattgcgtggcggagcggcagacgtgagccggcacggcaggcggcctcctcctcctctcacggcaccggcagctacgggggattcctttcccaccgctccttcgctttcccttcctcgcccgccgtaataaatagacaccccctccacaccctctttccccaacctcgtgttgttcggagcgcacacacacacaaccagatctcccccaaatccacccgtcggcacctccgcttcaaggtacgccgctcgtcctcccccccccccctctctaccttctctagatcggcgttccggtccatgcatggttagggcccggtagttctacttctgttcatgtttgtgttagatccgtgtttgtgttagatccgtgctgctagcgttcgtacacggatgcgacctgtacgtcagacacgttctgattgctaacttgccagtgtttctctttggggaatcctgggatggctctagccgttccgcagacgggatcgatttcatgattttttttgtttcgttgcatagggtttggtttgcccttttcctttatttcaatatatgccgtgcacttgtttgtcgggtcatcttttcatgcttttttttgtcttggttgtgatgatgtggtctggttgggcggtcgttctagatcggagtagaattctgtttcaaactacctggtggatttattaattttggatctgtatgtgtgtgccatacatattcatagttacgaattgaagatgatggatggaaatatcgatctaggataggtatacatgttgatgcgggttttactgatgcatatacagagatgctttttgttcgcttggttgtgatgatgtggtgtggttgggcggtcgttcattcgttctagatcggagtagaatactgtttcaaactacctggtgtatttattaattttggaactgtatgtgtgtgtcatacatcttcatagttacgagtttaagatggatggaaatatcgatctaggataggtatacatgttgatgtgggttttactgatgcatatacatgatggcatatgcagcatctattcatatgctctaaccttgagtacctatctattataataaacaagtatgttttataattattttgatcttgatatacttggatgatggcatatgcagcagctatatgtggatttttttagcactgccttcatacgctatttatttgcttggtactgtttcttttgtcgatgctcaccctgttgtttggtgttacttctgcaggtcgactttaacttagcctaggatccatggccactgtgaacaactggctcgctttctccctctccccgcaggagctgccgccctcccagacgacggactccacactcatctcggccgccaccgccgaccatgtctccggcgatgtctgcttcaacatcccccaagattggagcatgaggggatcagagctttcggcgctcgtcgcggagccgaagctggaggacttcctcggcggcatctccttctccgagcagcatcacaaggccaactgcaacatgatacccagcactagcagcacagtttgctacgcgagctcaggtgctagcaccggctaccatcaccagctgtaccaccagcccaccagctcagcgctccacttcgcggactccgtaatggtggcttcctcggccggtgtccacgacggcggtgccatgctcagcgcggccgccgctaacggtgtcgctggcgctgccagtgccaacggcggcggcatcgggctgtccatgattaagaactggctgcggagccaaccggcgcccatgcagccgagggtggcggcggctgagggcgcgcaggggctctctttgtccatgaacatggcggggacgacccaaggcgctgctggcatgccacttctcgctggagagcgcgcacgggcgcccgagagtgtatcgacgtcagcacagggtggagccgtcgtcgtcacggcgccgaaggaggatagcggtggcagcggtgttgccggcgctctagtagccgtgagcacggacacgggtggcagcggcggcgcgtcggctgacaacacggcaaggaagacggtggacacgttcgggcagcgcacgtcgatttaccgtggcgtgacaaggcatagatggactgggagatatgaggcacatctttgggataacagttgcagaagggaagggcaaactcgtaagggtcgtcaagtctatttaggtggctatgataaagaggagaaagctgctagggcttatgatcttgctgctctgaagtactggggtgccacaacaacaacaaattttccagtgagtaactacgaaaaggagctcgaggacatgaagcacatgacaaggcaggagtttgtagcgtctctgagaaggaagagcagtggtttctccagaggtgcatccatttacaggggagtgactaggcatcaccaacatggaagatggcaagcacggattggacgagttgcagggaacaaggatctttacttgggcaccttcagcacccaggaggaggcagcggaggcgtacgacatcgcggcgatcaagttccgcggcctcaacgccgtcaccaacttcgacatgagccgctacgacgtgaagagcatcctggacagcagcgccctccccatcggcagcgccgccaagcgcctcaaggaggccgaggccgcagcgtccgcgcagcaccaccacgccggcgtggtgagctacgacgtcggccgcatcgcctcgcagctcggcgacggcggagccctggcggcggcgtacggcgcgcactaccacggcgccgcctggccgaccatcgcgttccagccgggcgccgccagcacaggcctgtaccacccgtacgcgcagcagccaatgcgcggcggcgggtggtgcaagcaggagcaggaccacgcggtgatcgcggccgcgcacagcctgcaggacctccaccacctgaacctgggcgcggccggcgcgcacgactttttctcggcagggcagcaggccgccgccgctgcgatgcacggcctgggtagcatcgacagtgcgtcgctcgagcacagcaccggctccaactccgtcgtctacaacggcggggtcggcgacagcaacggcgccagcgccgtcggcggcagtggcggtggctacatgatgccgatgagcgctgccggagcaaccactacatcggcaatggtgagccacgagcaggtgcatgcacgggcctacgacgaagccaagcaggctgctcagatggggtacgagagctacctggtgaacgcggagaacaatggtggcggaaggatgtctgcatgggggactgtcgtgtctgcagccgcggcggcagcagcaagcagcaacgacaacatggccgccgacgtcgggcatggcggcgcgcagctcttcagtgtctggaacgacacttaagcgtacctagtggtacctgacatcttatagtctgcaacctctcgtgtctgaattcctatctttatcaagtgttattgcttccacgactataggacagctttcgtcgaaagcttttgctcatgtgatctcgaaggattcatctagtctgatttttcgtgacttgtatcggttttattggattcatccaacatatatcaataaaaaatgagttgtgtttcctttcttcctagttcagttaaaattatttccctcctgcgcttgtgctgtaattgtctgtgtacctgttgtttgtgactgtgttagttcccttggatatgatttcgtatttgatatgtacatggagatagcttagcttcattattggagtatgaagttagtatgacatagtcactctcctggaaaattgacactgcaaaccatatttttattctgaaccacaaatcctagtcagtccgctggcatatgccgtccgtttgctgaatccagaacgtgggtttggagatgtacggctgagatgcctctatgcgaaggggatttcgtggtgaaacgagatgggagtagagcaacgcccgtggaagatgcttcaaacttccacacttttgagcaacgatcggcagtagtaaggtagacgatttcaagatcaaagcatatgaagataaacaacatcaacaacaaaatttgttggggttctatagagagaaacagagctacatacatacactgttttgtatctaccatctgagatgatgaaaagatgaaaaactaaagaatgccccggcgccaacgccaggacacgccgcgcgcgcgtcacccgagccatctcttgacccagccggcgctgtatatttacacacgttgcagcatcgatcaccacctgttcgatcgcgtcgccgtcaccggcgcgccgcgacttattgaactagtctagggcgcggctaacaacctagcttagattgccttgtctaaacccttaggctaacgcgccactctagacgtgcgcacgataacttcgtatagcatacattatacgaagttataacagcggaccgggttaccgaattcctgcccttaaggccaattgttcaagattcattcaacaattgaaacatctcccatgattaaatcagtataaggttgctatggtcttgcttgacaaagtttttttttgagggaatttcaactaaatttttgagtgaaactatcaaatactgattttaaaaaatttttataaaaggaagcgcagagataaaaggccatctatgctacaaaagtacccaaaaatgtaatcctaaagtatgaattgcattttttttttgtttggacgaaaggaaaggagtattaccacaagaatgatatcatcttcatatttagatcttttttgggtaaagcttgagattctctaaatatagagaaatcagaagaaaaaaaaaccgtgttttggtggttttgatttctagcctccacaataactttgacggcgtcgacaagtctaacggacaccaagcagcgaaccaccagcgccgagccaagcgaagcagacggccgagacgttgacaccttcggcgcggcatctctcgagagttccgctccggcgctccacctccaccgctggcggtttcttattccgttccgttccgcctcctgctctgctcctctccacaccacacggcacgaaaccgttacggcaccggcagcacccagcacgggagaggggattcctttcccaccgttccttccctttccgccccgccgctataaatagccagccccatccccagcttttttccccaatctcatctcctctctcctgttgttcggagcacacgcacaatccgatcgatccccaaatccccttcgtctctcctcgcgagcctcgtggatcccagcttcaaggtacggcgatcgatcatcccccctccttctctctaccttcttttctctagactacatcggatggcgatccatggttagggcctgctagtttcccttcctgttttgtcgatggctgcgaggcacaatagatctgatggcgttatgacggctaacttgtcatgttgttgcgatttatagtccctttaggagatcagtttaatttctcggatggttcgagatcggtggtccatggttagtaccctaagatccgcgctgttagggttcgtagatggaggcgacctgttctgattgttaacttgtcagtacctgggaaatcctgggatggttctagctcgtccgcagatgagatcgatttcatgatcctctgtatcttgtttcgttgcctaggttccgtctaatctatccgtggtatgatgtagatgttttgatcgtgctaactacgtcttgtaaagttaattgtcaggtcataatttttagcatgcctttttttttgtttggttttgtctaattgggctgtcgttctagatcagagtagaagactgttccaaactacctgctggatttattgaacttggatctgtatgtgtgtcacatatcttcataaattcatgattaagatggattgaaatatcttttatctttttggtatggatagttctatatgttggtgtggctttgttagatgtatacatgcttagatacatgaagcaacgtgctgctactgtttagtaattgctgttcatttgtctaataaacagataaggatatgtatttatgttgctgttggttttgctggtactttgttggatacaaatgcttcaatacagaaaacagcatgctgctacgatttaccatttatctaatcttatcatatgtctaatctaataaacaaacatgcttttaaattatcttcatatgcttggatgatggcatacacagcggctatgtgtggttttttaaatacccagcatcatgggcatgcatgacactgctttaatatgctttttatttgcttgagactgtttcttttgtttatactgaccctttagttcggtgactcttctgcaggtcgactttaacttagcctaggatccatggcccagtccaagcacggcctgaccaaggagatgaccatgaagtaccgcatggagggctgcgtggacggccacaagttcgtgatcaccggcgagggcatcggctaccccttcaagggcaagcaggccatcaacctgtgcgtggtggagggcggccccttgcccttcgccgaggacatcttgtccgccgccttcatgtacggcaaccgcgtgttcaccgagtacccccaggacatcgtcgactacttcaagaactcctgccccgccggctacacctgggaccgctccttcctgttcgaggacggcgccgtgtgcatctgcaacgccgacatcaccgtgagcgtggaggagaactgcatgtaccacgagtccaagttctacggcgtgaacttccccgccgacggccccgtgatgaagaagatgaccgacaactgggagccctcctgcgagaagatcatccccgtgcccaagcagggcatcttgaagggcgacgtgagcatgtacctgctgctgaaggacggtggccgcttgcgctgccagttcgacaccgtgtacaaggccaagtccgtgccccgcaagatgcccgactggcacttcatccagcacaagctgacccgcgaggaccgcagcgacgccaagaaccagaagtggcacctgaccgagcacgccatcgcctccggctccgccttgccctccggactcagatctcgatagggtaccaatggccagttaacagatccagctgctgctgttctagggttcacaagtctgcctatttgtcttccccaatggagctatggttgtctggtctggtccttggtcgtgtcccgtttcattgtgtactatttacctgtaatgtgtatccttaagtctggtttgatggtgtctgaaacgttttgctgtggtagagcagcatggaagaactataatgaataagtgatccctaatcattgtgtccaaattttgcttctgctatacccttttgtgctgtttcttatgttttgcttaaaaatttgatctgacaaacaaatttgtctaaattatgctcttgttctgactgtgtactgtacacatttgtattgctaccggtttggcacatagttttctctttgattgcagatcaaacccttctgattgcagattgcttggctatggctgatgtgctcactgttcttctttagcttgtatattgctgatggtggcttggctacggctgaaaaagttgctgctgcgccgacttggcaactgttgctccagtaatgctttgtcctctcttcctagccgccgacttggcacttggcagctgttgctcctgtaatgcgttgttatctcttatctcttgagatgtactatgattttgaggctgtttgacttgtgccagattgccagtgctgatgctatattatctcaggtttttatgctagtatatgttttactgtgtgctgcctgtgtcgagttacgtaatctattgaaccgctatgcgtgttgatgccctgttgttgcttgccagattgatgcccctgttgcttgcagcttgcaagctgtagtgaaatcctaaaattcgaaaccaaatctattctgaacttttgaagatctgtgatgtccggaagaaaagattcaaacagataaacgggactctccagaatctataaaataaatgatcgacaaacgctttgctttggtaggcttcctagttagttagcggaccgggatccgacggcgtcttcaccgccccgccgccgcccgagccggacttgtcgctgccgccgccgctgctcatcttgcgcgcttgtgtccctccctcagtccctgcgttcgcggatcgcgggcgggtgcgacccgtttggactccggccggtagccttcgtgccgacctcgctcggtccaccggtttgtcggggacccacatgtcagtgaaggtacgcgtccacgtccacagaccctactaccccagacgagtccaaatcgctgttccctcacactctcgtgtaccagcgcgcggcggaaagcacctttccaacaaccgccgacacgtcggtcccacgtcggcatgctccaccggtcagtgtttggcgtgtacggctcccggcgacgaacgagtgtggcctaagctttcctactcccatcccatctgagccacacatctctctcacgccacgcgcacaaaacagccaggctcccacgcgcatcaaccggctctccctttccgtgccactcgcccccaagccccaaaccctcgccgccgcctccgagacagccgccgccacctaggccatggccaccgccgccgccgcgtctaccgcgctcactggcgccactaccgctgcgcccaaggcgaggcgccgggcgcacctcctggccacccgccgcgccctcgccgcgcccatcaggtgctcagcggcgtcacccgccatgccgatggctcccccggccaccccgctccggccgtggggccccaccgagccccgcaagggtgctgacatcctcgtcgagtccctcgagcgctgcggcgtccgcgacgtcttcgcctaccccggcggcgcgtcgatggagatccaccaggcactcacccgctcccccgtcatcgccaaccacctcttccgccacgagcaaggggaggcctttgccgcctccggctacgcgcgctcctcgggccgcgtcggcgtctgcatcgccacctccggccccggcgccaccaacctagtctccgcgctcgccgacgcgctgctcgattccgtcccgatggtcgccatcacgggacaggtggcgcgacgcatgattggcaccgacgccttccaggagacgcccatcgtcgaggtcacgcgctccatcaccaagcacaactacctggtcctcgacgtcgacgacatcccccgcgtcgtgcaggaggctttcttcctcgcctcctctggtcgaccagggccggtgcttgtcgacatccccaaggacatccagcagcagatggcggtgcctgtctgggacaagcccatgagtctgcctgggtacattgcgcgccttcccaagccccctgcgactgagttgcttgagcaggtgctgcgtcttgttggtgaatcgcggcgccctgttctttatgtgggcggtggctgcgcagcatctggtgaggagttgcgacgctttgtggagctgactggaatcccggtcacaactactcttatgggcctcggcaacttccccagcgacgacccactgtctctgcgcatgctaggtatgcatgggacggtgtatgcaaattatgcagtggataaggccgatctgttgcttgcacttggtgtgcggtttgatgatcgcgtgacagggaagattgaggcttttgcaagcagggctaagattgtgcacgttgatattgatccggctgagattggcaagaacaagcagccacatgtgtccatctgtgcagatgttaagcttgctttgcagggcatgaatgctcttcttgaaggaagcacatcaaagaagagctttgactttggctcatggaacgatgagttggatcagcagaagagggaattcccccttgggtataaaacatctaatgaggagatccagccacaatatgctattcaggttcttgatgagctgacgaaaggcgaggccatcatcggcacaggtgttgggcagcaccagatgtgggcggcacagtactacacttacaagcggccaaggcagtggttgtcttcagctggtcttggggctatgggatttggtttgccggctgctgctggtgcttctgtggcaaacccaggtgtcactgttgttgacatcgatggagatggtagctttctcatgaacgttcaggagctagctatgatccgaattgagaacctcccagtgaaggtctttgtgctaaacaaccagcacctggggatggtggtgcagttggaggacaggttctataaggccaacagagcgcacacatacttgggaaacccagagaatgaaagtgagatatatccagatttcgtgacgatcgccaaagggttcaacattccagccgtccgtgtgacaaagaagaacgaagtccgcgcagcgataaagaagatgctcgagactccagggccgtacctcttggatataatcgtcccacaccaggagcatgtgttgcctatgatccctagtggtggggctttcaaggatatgatcctggatggtgatggcaggactgtgtactgacttcgaataggtacccggggatcctctagtgccgtgggtcgtttaagctgccgctgtacctgtgtcgtctggtgccttctggtgtacctgggaggttgtcgtctatcaagtatctgtggttggtgtcatgagtcagtgagtcccaatactgttcgtgtcctgtgtgcattatacccaaaactgttatgggcaaatcatgaataagcttgatgttcgaacttaaaagtctctgctcaatatggtattatggttgtttttgttcgtctcctaatatttgcctgggatcaaattttattggctggtgttcatttgacctccatgttcttgctaggctccattttttactctacagccataatatgtttgattgtttggtttgttctttgttgtacacctggttctgtcgagcttagttttcgacactggcttacagcttaacatgttgctattttattgggttctgattgctattttattgggttctgattgctagtttttgctgaatccaaaaaccatgttatttatttaagcgatccaggttattattatgatggtggctaagtttttttttttccaagggtaaattttctggattctccagtgtttctgtggccgaattcaatcactagagtcgacctgcaaagcttcggtccgggcctagaaggcccgcgccacttacgcttgattccgatgacttcgtaggttcctagctcaagccgctcgtgtccaagcgtcacttacgattagctaatgattacggcatctaggaccgactagctagctagctaagagctcggtaccgagctcgaattcattccgattaatcgtggcctcttgctcttcaggatgaagagctatgtttaaacgtgcaagcgctactagacaattcagtacattaaaaacgtccgcaatgtgttattaagttgtctaagcgtcaatttgtttacaccacaatatatcctgcca

SEQ ID NO: 23 - DNA, 19770 bp, synthetic construct
  misc_feature 1..19770: note = PHP93739
  source 1..19770: mol_type = other DNA
gtttacccgccaatatatcctgtcaaacactgcggccgcacttgaccgcggatggagccggagctgtggtgaggccatcgacgggaggtgggggagaacacagtctcagtgttctttgtgagtccgcaaggtttttagcttttctgtattaattaaggttgctgttggctgtagaatacggtcgtggaagagctgtatcggtagctactacgtaagctattatatactggaagtctggagctcgtcgatctccggtcgtcttcctccatttctcctcgtcttgctttgactgctgctaccatttgcttctgttttctgatgaagcatgccatgtcggccaccagtgtttgtgtggtttttgcagggaatggctttcaagtgctgtgattgaatggccctcgtcgtcctcggctgagctcacatggacgcgtcatgtgagtgagatatatgatcatatgatgagtggggttcgggtgagtgcgtacttgaagtaggatcccgctttcactcattcattcattggcctttaaaccgggaaattttcgcgaggagatggagggaagcaagcagggtgacgagtgcagagtgccgcgagcgctttgtcaaaaggcaccgccgtaggcaaaaaaatcaatggccctgactgactcgatggtagtactactgtagagactagagagggttgctccccatatcttcgtgtgacttttactccagcattgcatttccgtcattgagacgttaattaatagcagctttcgggacagatgactgtggccatgtttcgtcacggccgcttcgtgccagctgggggtactatagtactgtgattttgttagtaaaaactttcattaggccaccattgacgaccgggccttcgcttttgctgcgctaattaaccatttcccggcgaccgaagggaacatgaacatgccccgacacatgagggcatgaggactagtgttctccctgtcgttcgttgacttgactagtgatagtttaaacgctcttcaactggaagagcggttactaccggttcactagctagctgctaatcgagctagttaccctatgaggtgacatgaagcgctcacggttactatgacggttagcttcacgactgttggtggcagtagcgtacgacttagctatagttccggacttacctagctaataacttcgtatagcatacattatacgaagttatggttaccgaattcgagctcggtaccctggttcacaaactcaatacaacacacagtggagtagggtattacgctccggcggcccgaaccactctaaatccttgtgtcctcgtgtgctcttccaccattaatgactgtaattgcagggacacgaagagttgtagcgcttttgccaacaagatccgctatatgctagtagagtggaacctgcacagcaacaagcatccaataatctgagaataagaattatgtgtggtgatggttctcatctctgcaactcgccattttcgcgagagaaccaaatccaagttggtgaagatcatgatttgggctcatgggctggcatagtagctattacctttgcaattgtggttcgaatctatccgatattctccttttcagggagagctaatgcttatgcttattgggtattttggtttgacactgcttcacgcccaaaaaaaggcaactatgtctgagttggatatggcccaaaaaaaggcagctatgtctgagttggatatggaagtcttctttcgtttagggtgaagtaagaccaagctcatgagcttattatcttaggtcggaacaaattagttgataggcatggcacatttatcaaattataatgattttaacagaaaagcaacacctctttttcagcagcaccagctttgcaagctgcaattgacactccaagcatagtatttgctccaaactcagcctgcatttcgcacaatatcatatctatttccatttggataaaatatattttccagaaatatgggaacagaatcaagatacagaaaaaagttgtggtagtagtggtaagtggaaacacaagtacagtgaaaagatagcattatttctgaacagtcaaattaaccgaaataagtagtatcacatactgcccctaaattgactacacccaatgtaaagaattgcttgagcatattgagccatcagttgtttgtttgtgtaacggatttgacaatgcagagttcaggagcaaaaaaccgcaaaggagagaaagagggaaaggatctcctagtatcccaccttgtggcgcgccctgtcaagtgcatgatggcctggtcgatctgcgtctgctgctgcggttccatcccaacgagtgcctccgacaccttgtcgttgatcacccgcaccgcgtaggcgacccccctggcgaggaacttccgcctctcggaggccccggccgcgtcggcggcggcgccctcgagcgcgcccacgctagccgtagatgctcggtgcacggccttgttggtgtgcaactcgacctcaacggccggtgcgctacgcccgtcaaggatctggcgcgcccgcaccctcgtgatcacggtgggcgcctcccgcctcatgtggccgacgatgaaaagcgccgggttaggggccttggcgcgcaccgccgtattcagggcctcctcgctcttgcgcgagagcaggtgcttccccaggtactcctgcactgacaaggctgccacagcggtggaatttgtcctcacgacttcgccacgtcgtcctcacctccctggcttcccacgactccgccgtatcgaggtgctcggtgggtcgtcttaatccgaagtccgaactaggaagacgagacagagaggtctgaggaatgggcctcgtttgatgttgagctgaattatttttccagcataagcccaggtcttggtccatgaacaaaattactagaaacccagcccagtactacgatctaaaagagggactgccactggatagctctctctagcattctccacgctccaatacagcggcgtcgtgtctatccgggtctatccgcgaacacgtgagaactctccagaaactgctttctcctccacttcatctctctcgctttccctctataaaaagaccccttctaggaattgagggagacagcaagcaccaagcagcgatccgaagctcaatcaattcactcaaacctcttccccaaatcttcgattagatcttcgttgacaagaagactagaaccgaacctgacatgtccaacctgctcacggttcaccagaaccttccggctcttccagtggacgcgacgtccgatgaagtcaggaagaacctcatggacatgttccgcgacaggcaagcgttcagcgagcacacctggaagatgctgctctccgtctgccgctcctgggctgcatggtgcaagctgaacaacaggaagtggttccccgctgagcccgaggacgtgagggattaccttctgtacctgcaagcgcgaggtttgtttctgcttctacctttgatatatatataataattatcattaattagtagtaatataatatttcaaatatttttttcaaaataaaagaatgtagtatatagcaattgcttttctgtagtttataagtgtgtatattttaatttataacttttctaatatatgaccaaaacatggtgatgcctaggtctggcagtgaagaccatccagcaacaccttggacaactgaacatgcttcacaggcgctccggcctcccgcgccccagcgactcgaacgccgtgagcctcgtcatgcgccgcatcaggaaggaaaacgtcgatgccggcgaaagggcaaagcaggccctcgcgttcgagaggaccgatttcgaccaggtccgcagcctgatggagaacagcgacaggtgccaggacattaggaacctggcgttcctcggaattgcatacaacacgctcctcaggatcgcggaaattgcccgcattcgcgtgaaggacattagccgcaccgacggcggcaggatgcttatccacattggcaggaccaagacgctcgtttccaccgcaggcgtcgaaaaggccctcagcctcggagtgaccaagctcgtcgaacgctggatctccgtgtccggcgtcgcggacgacccaaacaactacctcttctgccgcgtccgcaagaacggggtggctgcccctagcgccaccagccaactcagcacgagggccttggaaggtattttcgaggccacccaccgcctgatctacggcgcgaaggatgacagcggtcaacgctacctcgcatggtccgggcactccgcccgcgttggagctgctagggacatggcccgcgccggtgtttccatccccgaaatcatgcaggcgggtggatggacgaacgtgaacattgtcatgaactacattcgcaaccttgacagcgagacgggcgcaatggttcgcctcctggaagatggtgactgaggtacccaacctagacttgtccatcttctggattggccaacttaattaatgtatgaaataaaaggatgcacacatagtgacatgctaatcactataatgtgggcatcaaagttgtgtgttatgtgtaattactagttatctgaataaaagagaaagagatcatccatatttcttatcctaaatgaatgtcacgtgtctttataattctttgatgaaccagatgcatttcattaaccaaatccatatacatataaatattaatcatatataattaatatcaattgggttagcaaaacaaatctagtctaggtgtgttttgcgatccgatcgaggccggccacactgatagtttaaactgaaggcgggaaacgacaatctgatcatgagcggagaattaagggagtcacgttatgacccccgccgatgacgcgggacaagccgttttacgtttggaactgacagaaccgcaacgattgaaggagccactcagccgcgggtttctggagtttaatgagctaagcacatacgtcagaaaccattattgcgcgttcaaaagtcgcctaaggtcactatcagctagcaaatatttcttgtcaaaaatgctccactgacgttccataaattcccctcggtatccaattagagtctcatattcactctcccggcggatctcgactctagaggatcgctcaggaaggccgctgagatagagccatggcggccaatgcgggcggcggtggagcgggaggaggcagcggcagcggcagcgtggctgcgccggcggtgtgccgccccagcggctcgcggtggacgccgacgccggagcagatcaggatgctgaaggagctctactacggctgcggcatccggtcgcccagctcggagcagatccagcgcatcaccgccatgctgcggcagcacggcaagatcgagggcaagaacgtcttctactggttccagaaccacaaggcccgcgagcgccagaagcgccgcctcaccagcctcgacgtcaacgtgcccgccgccggcgcggccgacgccaccaccagccaactcggcgtcctctcgctgtcgtcgccgccgccttcaggcgcggcgcctccctcgcccaccctcggcttctacgccgccggcaatggcggcggatcggctgtgctgctggacacgagttccgactggggcagcagcggcgctgctatggccaccgagacatgcttcctgcaggactacatgggcgtgacggacacgggcagctcgtcgcagtggccacgcttctcgtcgtcggacacgataatggcggcggccgcggcgcgggcggcgacgacgcgggcgcccgagacgctccctctcttcccgacctgcggcgacgacggcggcagcggtagcagcagctacttgccgttctggggtgccgcgtccacaactgccggcgccacttcttccgttgcgatccaacagcaacaccagctgcaggagcagtacagcttttacagcaacagcaacagcacccagctggccggcaccggcaaccaagacgtatcggcaacagcagcagcagccgccgccctggagctgagcctcagctcatggtgctccccttaccctgctgcagggagtatgtgagagcaacgcgagctgccactgctcttcactgatgtctctggaatggaaggaggaggaagtgagaacagatcattcgacaaagcagcattagtccgttgatcggtggaagaccactcgtcagtgttgagttgaatgtttgatcaataaaatacggcaatgctgtaagggttgttttttatgccattgataatacactgtactgttcagttgttgaactctatttcttagccatgccaagtgcttttcttattttgaataacattacagcaaaaagttgaaagacaaaaaaaaaaacccccgaacagagtgctttgggtcccaagcttctttagactgtgttcggcgttccccctaaatttctccccctatatctcactcacttgtcacatcagcgttctctttccccctatatctccacgctctacagcagttccacctatatcaaacctctataccccaccacaacaatattatatactttcatcttcaactaactcatgtaccttccaatttttttctactaataattatttacgtgcacagaaacttagcaaggagagagagagcgggaatttaaatgctcggcgttaggcttttagtccgctaggtggctagaccgaggttaggacgctagttcactaggggcctagtggtgttttaagacgtcacggtcacccggtccgggcctagaaggccagcttcaagtttgtacaaaaaagcaggctccggccagaatggcccggaccgaagcttgcatgcctgcagtgcagcgtgacccggtcgtgcccctctctagagataatgagcattgcatgtctaagttataaaaaattaccacatattttttttgtcacacttgtttgaagtgcagtttatctatctttatacatatatttaaactttactctacgaataatataatctatagtactacaataatatcagtgttttagagaatcatataaatgaacagttagacatggtctaaaggacaattgagtattttgacaacaggactctacagttttatctttttagtgtgcatgtgttctcctttttttttgcaaatagcttcacctatataatacttcatccattttattagtacatccatttagggtttagggttaatggtttttatagactaatttttttagtacatctattttattctattttagcctctaaattaagaaaactaaaactctattttagtttttttatttaataatttagatataaaatagaataaaataaagtgactaaaaattaaacaaataccctttaagaaattaaaaaaactaaggaaacatttttcttgtttcgagtagataatgccagcctgttaaacgccgtcgacgagtctaacggacaccaaccagcgaaccagcagcgtcgcgtcgggccaagcgaagcagacggcacggcatctctgtcgctgcctctggacccctctcgagagttccgctccaccgttggacttgctccgctgtcggcatccagaaattgcgtggcggagcggcagacgtgagccggcacggcaggcggcctcctcctcctctcacggcaccggcagctacgggggattcctttcccaccgctccttcgctttcccttcctcgcccgccgtaataaatagacaccccctccacaccctctttccccaacctcgtgttgttcggagcgcacacacacacaaccagatctcccccaaatccacccgtcggcacctccgcttcaaggtacgccgctcgtcctcccccccccccctctctaccttctctagatcggcgttccggtccatgcatggttagggcccggtagttctacttctgttcatgtttgtgttagatccgtgtttgtgttagatccgtgctgctagcgttcgtacacggatgcgacctgtacgtcagacacgttctgattgctaacttgccagtgtttctctttggggaatcctgggatggctctagccgttccgcagacgggatcgatttcatgattttttttgtttcgttgcatagggtttggtttgcccttttcctttatttcaatatatgccgtgcacttgtttgtcgggtcatcttttcatgcttttttttgtcttggttgtgatgatgtggtctggttgggcggtcgttctagatcggagtagaattctgtttcaaactacctggtggatttattaattttggatctgtatgtgtgtgccatacatattcatagttacgaattgaagatgatggatggaaatatcgatctaggataggtatacatgttgatgcgggttttactgatgcatatacagagatgctttttgttcgcttggttgtgatgatgtggtgtggttgggcggtcgttcattcgttctagatcggagtagaatactgtttcaaactacctggtgtatttattaattttggaactgtatgtgtgtgtcatacatcttcatagttacgagtttaagatggatggaaatatcgatctaggataggtatacatgttgatgtgggttttactgatgcatatacatgatggcatatgcagcatctattcatatgctctaaccttgagtacctatctattataataaacaagtatgttttataattattttgatcttgatatacttggatgatggcatatgcagcagctatatgtggatttttttagcactgccttcatacgctatttatttgcttggtactgtttcttttgtcgatgctcaccctgttgtttggtgttacttctgcaggtcgactttaacttagcctaggatccatggccactgtgaacaactggctcgctttctccctctccccgcaggagctgccgccctcccagacgacggactccacactcatctcggccgccaccgccgaccatgtctccggcgatgtctgcttcaacatcccccaagattggagcatgaggggatcagagctttcggcgctcgtcgcggagccgaagctggaggacttcctcggcggcatctccttctccgagcagcatcacaaggccaactgcaacatgatacccagcactagcagcacagtttgctacgcgagctcaggtgctagcaccggctaccatcaccagctgtaccaccagcccaccagctcagcgctccacttcgcggactccgtaatggtggcttcctcggccggtgtccacgacggcggtgccatgctcagcgcggccgccgctaacggtgtcgctggcgctgccagtgccaacggcggcggcatcgggctgtccatgattaagaactggctgcggagccaaccggcgcccatgcagccgagggtggcggcggctgagggcgcgcaggggctctctttgtccatgaacatggcggggacgacccaaggcgctgctggcatgccacttctcgctggagagcgcgcacgggcgcccgagagtgtatcgacgtcagcacagggtggagccgtcgtcgtcacggcgccgaaggaggatagcggtggcagcggtgttgccggcgctctagtagccgtgagcacggacacgggtggcagcggcggcgcgtcggctgacaacacggcaaggaagacggtggacacgttcgggcagcgcacgtcgatttaccgtggcgtgacaaggcatagatggactgggagatatgaggcacatctttgggataacagttgcagaagggaagggcaaactcgtaagggtcgtcaagtctatttaggtggctatgataaagaggagaaagctgctagggcttatgatcttgctgctctgaagtactggggtgccacaacaacaacaaattttccagtgagtaactacgaaaaggagctcgaggacatgaagcacatgacaaggcaggagtttgtagcgtctctgagaaggaagagcagtggtttctccagaggtgcatccatttacaggggagtgactaggcatcaccaacatggaagatggcaagcacggattggacgagttgcagggaacaaggatctttacttgggcaccttcagcacccaggaggaggcagcggaggcgtacgacatcgcggcgatcaagttccgcggcctcaacgccgtcaccaacttcgacatgagccgctacgacgtgaagagcatcctggacagcagcgccctccccatcggcagcgccgccaagcgcctcaaggaggccgaggccgcagcgtccgcgcagcaccaccacgccggcgtggtgagctacgacgtcggccgcatcgcctcgcagctcggcgacggcggagccctggcggcggcgtacggcgcgcactaccacggcgccgcctggccgaccatcgcgttccagccgggcgccgccagcacaggcctgtaccacccgtacgcgcagcagccaatgcgcggcggcgggtggtgcaagcaggagcaggaccacgcggtgatcgcggccgcgcacagcctgcaggacctccaccacctgaacctgggcgcggccggcgcgcacgactttttctcggcagggcagcaggccgccgccgctgcgatgcacggcctgggtagcatcgacagtgcgtcgctcgagcacagcaccggctccaactccgtcgtctacaacggcggggtcggcgacagcaacggcgccagcgccgtcggcggcagtggcggtggctacatgatgccgatgagcgctgccggagcaaccactacatcggcaatggtgagccacgagcaggtgcatgcacgggcctacgacgaagccaagcaggctgctcagatggggtacgagagctacctggtgaacgcggagaacaatggtggcggaaggatgtctgcatgggggactgtcgtgtctgcagccgcggcggcagcagcaagcagcaacgacaacatggccgccgacgtcgggcatggcggcgcgcagctcttcagtgtctggaacgacacttaatattggtaccgtcatgggtcgtttaagctgccgatgtgcctgcgtcgtctggtgccctctctccatatggaggttgtcaaagtatctgctgttcgtgtcatgagtcgtgtcagtgttggtttaataatggaccggttgtgttgtgtgtgcgtactacccagaactatgacaaatcatgaataagtttgatgtttgaaattaaagcctgtgctcattatgttctgtctttcagttgtctcctaatatttgcctgcaggtactggctatctaccgtttcttacttaggaggtgtttgaatgcactaaaactaatagttagtggctaaaattagttaaaacatccaaacaccatagctaatagttgaactattagctatttttggaaaattagttaatagtgaggtagttatttgttagctagctaattcaactaacaatttttagccaactaacaattagtttcagtgcattcaaacacccccttaatgttaaggtggttctatctaccgtctcctaatatatggttgattgttcggtttgttgctatgctattgggttctgattgctgctagttcttgctgaatccagaagttctcgtagtatagctcagattcatattatttatttgagtgataagtgatccaggttattactatgttagctaggttttttttacaaggataaattatctgtgatcataattcttatgaaagctttatgtttcctggaggcagtggcatgcaatgcatgacagcaacttgatcacaccagctgaggtagatacggtaacaaggttcttaaatctgttcaccaaatcattggagaacacacatacacattcttgccagtcttggttagagaaatttcatgacaaaatgccaaagctgtcttgactcttcacttttggccatgagtcgtgacgcgacttattgaactagtctagggcgcggctaacaacctagcttagattgccttgtctaaacccttaggctaacgcgccactctagaaggccgatctcccgggataacttcgtatagcatacattatacgaagttatgaattccggaccgggttaccgaattcctgcccttaaggccaattgttcaagattcattcaacaattgaaacatctcccatgattaaatcagtataaggttgctatggtcttgcttgacaaagtttttttttgagggaatttcaactaaatttttgagtgaaactatcaaatactgattttaaaaaatttttataaaaggaagcgcagagataaaaggccatctatgctacaaaagtacccaaaaatgtaatcctaaagtatgaattgcattttttttttgtttggacgaaaggaaaggagtattaccacaagaatgatatcatcttcatatttagatcttttttgggtaaagcttgagattctctaaatatagagaaatcagaagaaaaaaaaaccgtgttttggtggttttgatttctagcctccacaataactttgacggcgtcgacaagtctaacggacaccaagcagcgaaccaccagcgccgagccaagcgaagcagacggccgagacgttgacaccttcggcgcggcatctctcgagagttccgctccggcgctccacctccaccgctggcggtttcttattccgttccgttccgcctcctgctctgctcctctccacaccacacggcacgaaaccgttacggcaccggcagcacccagcacgggagaggggattcctttcccaccgttccttccctttccgccccgccgctataaatagccagccccatccccagcttttttccccaatctcatctcctctctcctgttgttcggagcacacgcacaatccgatcgatccccaaatccccttcgtctctcctcgcgagcctcgtggatcccagcttcaaggtacggcgatcgatcatcccccctccttctctctaccttcttttctctagactacatcggatggcgatccatggttagggcctgctagtttcccttcctgttttgtcgatggctgcgaggcacaatagatctgatggcgttatgacggctaacttgtcatgttgttgcgatttatagtccctttaggagatcagtttaatttctcggatggttcgagatcggtggtccatggttagtaccctaagatccgcgctgttagggttcgtagatggaggcgacctgttctgattgttaacttgtcagtacctgggaaatcctgggatggttctagctcgtccgcagatgagatcgatttcatgatcctctgtatcttgtttcgttgcctaggttccgtctaatctatccgtggtatgatgtagatgttttgatcgtgctaactacgtcttgtaaagttaattgtcaggtcataatttttagcatgcctttttttttgtttggttttgtctaattgggctgtcgttctagatcagagtagaagactgttccaaactacctgctggatttattgaacttggatctgtatgtgtgtcacatatcttcataaattcatgattaagatggattgaaatatcttttatctttttggtatggatagttctatatgttggtgtggctttgttagatgtatacatgcttagatacatgaagcaacgtgctgctactgtttagtaattgctgttcatttgtctaataaacagataaggatatgtatttatgttgctgttggttttgctggtactttgttggatacaaatgcttcaatacagaaaacagcatgctgctacgatttaccatttatctaatcttatcatatgtctaatctaataaacaaacatgcttttaaattatcttcatatgcttggatgatggcatacacagcggctatgtgtggttttttaaatacccagcatcatgggcatgcatgacactgctttaatatgctttttatttgcttgagactgtttcttttgtttatactgaccctttagttcggtgactcttctgcaggtcgactttaacttagcctaggatccatggcccagtccaagcacggcctgaccaaggagatgaccatgaagtaccgcatggagggctgcgtggacggccacaagttcgtgatcaccggcgagggcatcggctaccccttcaagggcaagcaggccatcaacctgtgcgtggtggagggcggccccttgcccttcgccgaggacatcttgtccgccgccttcatgtacggcaaccgcgtgttcaccgagtacccccaggacatcgtcgactacttcaagaactcctgccccgccggctacacctgggaccgctccttcctgttcgaggacggcgccgtgtgcatctgcaacgccgacatcaccgtgagcgtggaggagaactgcatgtaccacgagtccaagttctacggcgtgaacttccccgccgacggccccgtgatgaagaagatgaccgacaactgggagccctcctgcgagaagatcatccccgtgcccaagcagggcatcttgaagggcgacgtgagcatgtacctgctgctgaaggacggtggccgcttgcgctgccagttcgacaccgtgtacaaggccaagtccgtgccccgcaagatgcccgactggcacttcatccagcacaagctgacccgcgaggaccgcagcgacgccaagaaccagaagtggcacctgaccgagcacgccatcgcctccggctccgccttgccctccggactcagatctcgatagggtaccaatggccagttaacagatccagctgctgctgttctagggttcacaagtctgcctatttgtcttccccaatggagctatggttgtctggtctggtccttggtcgtgtcccgtttcattgtgtactatttacctgtaatgtgtatccttaagtctggtttgatggtgtctgaaacgttttgctgtggtagagcagcatggaagaactataatgaataagtgatccctaatcattgtgtccaaattttgcttctgctatacccttttgtgctgtttcttatgttttgcttaaaaatttgatctgacaaacaaatttgtctaaattatgctcttgttctgactgtgtactgtacacatttgtattgctaccggtttggcacatagttttctctttgattgcagatcaaacccttctgattgcagattgcttggctatggctgatgtgctcactgttcttctttagcttgtatattgctgatggtggcttggctacggctgaaaaagttgctgctgcgccgacttggcaactgttgctccagtaatgctttgtcctctcttcctagccgccgacttggcacttggcagctgttgctcctgtaatgcgttgttatctcttatctcttgagatgtactatgattttgaggctgtttgacttgtgccagattgccagtgctgatgctatattatctcaggtttttatgctagtatatgttttactgtgtgctgcctgtgtcgagttacgtaatctattgaaccgctatgcgtgttgatgccctgttgttgcttgccagattgatgcccctgttgcttgcagcttgcaagctgtagtgaaatcctaaaattcgaaaccaaatctattctgaacttttgaagatctgtgatgtccggaagaaaagattcaaacagataaacgggactctccagaatctataaaataaatgatcgacaaacgctttgctttggtaggcttcctagttagttagcggaccgggatccgacggcgtcttcaccgccccgccgccgcccgagccggacttgtcgctgccgccgccgctgctcatcttgcgcgcttgtgtccctccctcagtccctgcgttcgcggatcgcgggcgggtgcgacccgtttggactccggccggtagccttcgtgccgacctcgctcggtccaccggtttgtcggggacccacatgtcagtgaaggtacgcgtccacgtccacagaccctactaccccagacgagtccaaatcgctgttccctcacactctcgtgtaccagcgcgcggcggaaagcacctttccaacaaccgccgacacgtcggtcccacgtcggcatgctccaccggtcagtgtttggcgtgtacggctcccggcgacgaacgagtgtggcctaagctttcctactcccatcccatctgagccacacatctctctcacgccacgcgcacaaaacagccaggctcccacgcgcatcaaccggctctccctttccgtgccactcgcccccaagccccaaaccctcgccgccgcctccgagacagccgccgccacctaggccatggccaccgccgccgccgcgtctaccgcgctcactggcgccactaccgctgcgcccaaggcgaggcgccgggcgcacctcctggccacccgccgcgccctcgccgcgcccatcaggtgctcagcggcgtcacccgccatgccgatggctcccccggccaccccgctccggccgtggggccccaccgagccccgcaagggtgctgacatcctcgtcgagtccctcgagcgctgcggcgtccgcgacgtcttcgcctaccccggcggcgcgtcgatggagatccaccaggcactcacccgctcccccgtcatcgccaaccacctcttccgccacgagcaaggggaggcctttgccgcctccggctacgcgcgctcctcgggccgcgtcggcgtctgcatcgccacctccggccccggcgccaccaacctagtctccgcgctcgccgacgcgctgctcgattccgtcccgatggtcgccatcacgggacaggtggcgcgacgcatgattggcaccgacgccttccaggagacgcccatcgtcgaggtcacgcgctccatcaccaagcacaactacctggtcctcgacgtcgacgacatcccccgcgtcgtgcaggaggctttcttcctcgcctcctctggtcgaccagggccggtgcttgtcgacatccccaaggacatccagcagcagatggcggtgcctgtctgggacaagcccatgagtctgcctgggtacattgcgcgccttcccaagccccctgcgactgagttgcttgagcaggtgctgcgtcttgttggtgaatcgcggcgccctgttctttatgtgggcggtggctgcgcagcatctggtgaggagttgcgacgctttgtggagctgactggaatcccggtcacaactactcttatgggcctcggcaacttccccagcgacgacccactgtctctgcgcatgctaggtatgcatgggacggtgtatgcaaattatgcagtggataaggccgatctgttgcttgcacttggtgtgcggtttgatgatcgcgtgacagggaagattgaggcttttgcaagcagggctaagattgtgcacgttgatattgatccggctgagattggcaagaacaagcagccacatgtgtccatctgtgcagatgttaagcttgctttgcagggcatgaatgctcttcttgaaggaagcacatcaaagaagagctttgactttggctcatggaacgatgagttggatcagcagaagagggaattcccccttgggtataaaacatctaatgaggagatccagccacaatatgctattcaggttcttgatgagctgacgaaaggcgaggccatcatcggcacaggtgttgggcagcaccagatgtgggcggcacagtactacacttacaagcggccaaggcagtggttgtcttcagctggtcttggggctatgggatttggtttgccggctgctgctggtgcttctgtggcaaacccaggtgtcactgttgttgacatcgatggagatggtagctttctcatgaacgttcaggagctagctatgatccgaattgagaacctcccagtgaaggtctttgtgctaaacaaccagcacctggggatggtggtgcagttggaggacaggttctataaggccaacagagcgcacacatacttgggaaacccagagaatgaaagtgagatatatccagatttcgtgacgatcgccaaagggttcaacattccagccgtccgtgtgacaaagaagaacgaagtccgcgcagcgataaagaagatgctcgagactccagggccgtacctcttggatataatcgtcccacaccaggagcatgtgttgcctatgatccctagtggtggggctttcaaggatatgatcctggatggtgatggcaggactgtgtactgacttcgaataggtacccggggatcctctagtgccgtgggtcgtttaagctgccgctgtacctgtgtcgtctggtgccttctggtgtacctgggaggttgtcgtctatcaagtatctgtggttggtgtcatgagtcagtgagtcccaatactgttcgtgtcctgtgtgcattatacccaaaactgttatgggcaaatcatgaataagcttgatgttcgaacttaaaagtctctgctcaatatggtattatggttgtttttgttcgtctcctaatatttgcctgggatcaaattttattggctggtgttcatttgacctccatgttcttgctaggctccattttttactctacagccataatatgtttgattgtttggtttgttctttgttgtacacctggttctgtcgagcttagttttcgacactggcttacagcttaacatgttgctattttattgggttctgattgctattttattgggttctgattgctagtttttgctgaatccaaaaaccatgttatttatttaagcgatccaggttattattatgatggtggctaagtttttttttttccaagggtaaattttctggattctccagtgtttctgtggccgaattcaatcactagagtcgacctgcaaagcttcggtccgggcctagaaggcccgcgccacttacgcttgattccgatgacttcgtaggttcctagctcaagccgctcgtgtccaagcgtcacttacgattagctaatgattacggcatctaggaccgactagttcttatgtgcttctagtctccaaatgtggttgatagttattttgctctaagatcaacagtaatgaagtataaatcatcgttgtggtgtgctactcggttaattgagcattaacacacacaaacatgacgaggatggtataatctccaaaaatgtgtactttgttaggtgggaccctatagccttgattaatgtgctatgttaggcatgcctggaaacgtgtgacgcatatgttttgtgaacctgttgatattatatgtgcttttatattaccatattttattaaaatactaatatttattactagtaagatataacattctatctagcttaaaaactaaccataaatattccataataactagatttaccaaactaatatactaaatatacataataaatacaaaattaacaagacaataatcaatatttatgagcttaatatatttagacattatggttggtcgacgataatcatgctaacttttcgtaattgcttgattgaaatatgcttagaataatgcctctttgttctacatggcaaatagggaccattatggtgtaacaccctgggaaccacaaacaccccgaaatgctactaaactacacaactaaccttcatatataaaatttcgacagcatctcctttgaaaatttgcatagacgtggaagcaacagagtataaacagatctgcgtttaaacgtgcaagcgctactagacaattcagtacattaaaaacgtccgcaatgtgttattaagttgtctaagcgtcaatttgtttacaccacaatatatcctgcca

SEQ ID NO: 24 - DNA, 19118 bp, synthetic construct
  misc_feature 1..19118: note = PHP93743
  source 1..19118: mol_type = other DNA
gtttacccgccaatatatcctgtcaaacactgcggccgcacttgaccgcggatggagccggagctgtggtgaggccatcgacgggaggtgggggagaacacagtctcagtgttctttgtgagtccgcaaggtttttagcttttctgtattaattaaggttgctgttggctgtagaatacggtcgtggaagagctgtatcggtagctactacgtaagctattatatactggaagtctggagctcgtcgatctccggtcgtcttcctccatttctcctcgtcttgctttgactgctgctaccatttgcttctgttttctgatgaagcatgccatgtcggccaccagtgtttgtgtggtttttgcagggaatggctttcaagtgctgtgattgaatggccctcgtcgtcctcggctgagctcacatggacgcgtcatgtgagtgagatatatgatcatatgatgagtggggttcgggtgagtgcgtacttgaagtaggatcccgctttcactcattcattcattggcctttaaaccgggaaattttcgcgaggagatggagggaagcaagcagggtgacgagtgcagagtgccgcgagcgctttgtcaaaaggcaccgccgtaggcaaaaaaatcaatggccctgactgactcgatggtagtactactgtagagactagagagggttgctccccatatcttcgtgtgacttttactccagcattgcatttccgtcattgagacgttaattaatagcagctttcgggacagatgactgtggccatgtttcgtcacggccgcttcgtgccagctgggggtactatagtactgtgattttgttagtaaaaactttcattaggccaccattgacgaccgggccttcgcttttgctgcgctaattaaccatttcccggcgaccgaagggaacatgaacatgccccgacacatgagggcatgaggactagtgttctccctgtcgttcgttgacttgactagtgatagtttaaacgctcttcaactggaagagcggttactaccggttcactagctagctgctaatcgagctagttaccctatgaggtgacatgaagcgctcacggttactatgacggttagcttcacgactgttggtggcagtagcgtacgacttagctatagttccggacttacctagctaataacttcgtatagcatacattatacgaagttatggttaccgaattcgagctcggtaccctggttcacaaactcaatacaacacacagtggagtagggtattacgctccggcggcccgaaccactctaaatccttgtgtcctcgtgtgctcttccaccattaatgactgtaattgcagggacacgaagagttgtagcgcttttgccaacaagatccgctatatgctagtagagtggaacctgcacagcaacaagcatccaataatctgagaataagaattatgtgtggtgatggttctcatctctgcaactcgccattttcgcgagagaaccaaatccaagttggtgaagatcatgatttgggctcatgggctggcatagtagctattacctttgcaattgtggttcgaatctatccgatattctccttttcagggagagctaatgcttatgcttattgggtattttggtttgacactgcttcacgcccaaaaaaaggcaactatgtctgagttggatatggcccaaaaaaaggcagctatgtctgagttggatatggaagtcttctttcgtttagggtgaagtaagaccaagctcatgagcttattatcttaggtcggaacaaattagttgataggcatggcacatttatcaaattataatgattttaacagaaaagcaacacctctttttcagcagcaccagctttgcaagctgcaattgacactccaagcatagtatttgctccaaactcagcctgcatttcgcacaatatcatatctatttccatttggataaaatatattttccagaaatatgggaacagaatcaagatacagaaaaaagttgtggtagtagtggtaagtggaaacacaagtacagtgaaaagatagcattatttctgaacagtcaaattaaccgaaataagtagtatcacatactgcccctaaattgactacacccaatgtaaagaattgcttgagcatattgagccatcagttgtttgtttgtgtaacggatttgacaatgcagagttcaggagcaaaaaaccgcaaaggagagaaagagggaaaggatctcctagtatcccaccttgtggcgcgccctgtcaagtgcatgatggcctggtcgatctgcgtctgctgctgcggttccatcccaacgagtgcctccgacaccttgtcgttgatcacccgcaccgcgtaggcgacccccctggcgaggaacttccgcctctcggaggccccggccgcgtcggcggcggcgccctcgagcgcgcccacgctagccgtagatgctcggtgcacggccttgttggtgtgcaactcgacctcaacggccggtgcgctacgcccgtcaaggatctggcgcgcccgcaccctcgtgatcacggtgggcgcctcccgcctcatgtggccgacgatgaaaagcgccgggttaggggccttggcgcgcaccgccgtattcagggcctcctcgctcttgcgcgagagcaggtgcttccccaggtactcctgcactgacaaggctgccacagcggtggaatttgtcctcacgacttcgccacgtcgtcctcacctccctggcttcccacgactccgccgtatcgaggtgctcggtgggtcgtcttaatccgaagtccgaactaggaagacgagacagagaggtctgaggaatgggcctcgtttgatgttgagctgaattatttttccagcataagcccaggtcttggtccatgaacaaaattactagaaacccagcccagtactacgatctaaaagagggactgccactggatagctctctctagcattctccacgctccaatacagcggcgtcgtgtctatccgggtctatccgcgaacacgtgagaactctccagaaactgctttctcctccacttcatctctctcgctttccctctataaaaagaccccttctaggaattgagggagacagcaagcaccaagcagcgatccgaagctcaatcaattcactcaaacctcttccccaaatcttcgattagatcttcgttgacaagaagactagaaccgaacctgacatgtccaacctgctcacggttcaccagaaccttccggctcttccagtggacgcgacgtccgatgaagtcaggaagaacctcatggacatgttccgcgacaggcaagcgttcagcgagcacacctggaagatgctgctctccgtctgccgctcctgggctgcatggtgcaagctgaacaacaggaagtggttccccgctgagcccgaggacgtgagggattaccttctgtacctgcaagcgcgaggtttgtttctgcttctacctttgatatatatataataattatcattaattagtagtaatataatatttcaaatatttttttcaaaataaaagaatgtagtatatagcaattgcttttctgtagtttataagtgtgtatattttaatttataacttttctaatatatgaccaaaacatggtgatgcctaggtctggcagtgaagaccatccagcaacaccttggacaactgaacatgcttcacaggcgctccggcctcccgcgccccagcgactcgaacgccgtgagcctcgtcatgcgccgcatcaggaaggaaaacgtcgatgccggcgaaagggcaaagcaggccctcgcgttcgagaggaccgatttcgaccaggtccgcagcctgatggagaacagcgacaggtgccaggacattaggaacctggcgttcctcggaattgcatacaacacgctcctcaggatcgcggaaattgcccgcattcgcgtgaaggacattagccgcaccgacggcggcaggatgcttatccacattggcaggaccaagacgctcgtttccaccgcaggcgtcgaaaaggccctcagcctcggagtgaccaagctcgtcgaacgctggatctccgtgtccggcgtcgcggacgacccaaacaactacctcttctgccgcgtccgcaagaacggggtggctgcccctagcgccaccagccaactcagcacgagggccttggaaggtattttcgaggccacccaccgcctgatctacggcgcgaaggatgacagcggtcaacgctacctcgcatggtccgggcactccgcccgcgttggagctgctagggacatggcccgcgccggtgtttccatccccgaaatcatgcaggcgggtggatggacgaacgtgaacattgtcatgaactacattcgcaaccttgacagcgagacgggcgcaatggttcgcctcctggaagatggtgactgaggtacccaacctagacttgtccatcttctggattggccaacttaattaatgtatgaaataaaaggatgcacacatagtgacatgctaatcactataatgtgggcatcaaagttgtgtgttatgtgtaattactagttatctgaataaaagagaaagagatcatccatatttcttatcctaaatgaatgtcacgtgtctttataattctttgatgaaccagatgcatttcattaaccaaatccatatacatataaatattaatcatatataattaatatcaattgggttagcaaaacaaatctagtctaggtgtgttttgcgaatgcgaccttcttatgtgcttctagtctccaaatgtggttgatagttattttgctctaagatcaacagtaatgaagtataaatcatcgttgtggtgtgctactcggttaattgagcattaacacacacaaacatgacgaggatggtataatctccaaaaatgtgtactttgttaggtcgatcggaagttgaagacaaagaaggtcttaaatcctggctagcaacactgaactatgccagaaaccacatcaaagcatatcggcaagcttcttggcccattatatccaaagacctcagagaaaggtgagcgaaggctcaattcagaagattggaagctgatcaataggatcaagacaatggtgagaacgcttccaaatctcactattccaccagaagatgcatacattatcattgaaacagatgcatgtgcaactggatggggagcagtatgcaagtggaagaaaaacaaggcagacccaagaaatacagagcaaatctgtaggtatgccagtggaaaatttgataagccaaaaggaacctgtgatgcagaaatctatggggttatgaatggcttagaaaagatgagattgttctacttggacaaaagagagatcacagtcagaactgacagtagtgcaatcgaaaggttctacaacaagagtgctgaacacaagccttctgagatcagatggatcaggttcatggactacatcactggtgcaggaccagagatagtcattgaacacataaaagggaagaggaatggtttagctgacatcttgtccaggctcaaagccaaattagctcagaatgaaccaacggaagagatgatcctgcttacacaagccataagggaagtaattccttatccagatcatccatacactgagcaactcagagaatggggaaacaaaattctcgatccattccccacattcaagaaggacatgttcgaaagaacagagcaagcttttatgctaacagaggaaccagttctactctgtgcatgcaggaagcctgcaattcagttagtgtccagaacatctgccaacccaggaaggaaattcttcaagtgcgcaatgaacaaatgccattgctggtactgggcagatctcattgaagaacacattcaagacagaattgatgaatttctcaagaatcttgaagttctgaagaccggtggcgtgcaaacaatggaggaggaacttatgaaggaagtcaccaagctgaagatagaagaggaggagttcgaggaataccaggccacaccaagggctatgtcgccagtagccgcagaagatgtgctagatctccaagacgtaagcaatgacgattgaggaggcattgacgtcagggatgaccgcagcggagagtactgggcccattcagtggatgctccactgagttgtattattgtgtgcttttcggacaagtgtgctgtccactttcttttggcacctgtgccactttattccttgtctgccacgatgcctttgcttagcttgtaagcaaggatcgcagtgcgtgtgtgacaccaccccccttccgacgctctgcctatataaggcaccgtctgtaagctcttacgatcatcggtagttcaccaaggatcggtagttcaccacatgagtatttgagtcaagtttggcttgaataataagaattacacctttccgcaggatccatggcggccaatgcgggcggcggtggagcgggaggaggcagcggcagcggcagcgtggctgcgccggcggtgtgccgccccagcggctcgcggtggacgccgacgccggagcagatcaggatgctgaaggagctctactacggctgcggcatccggtcgcccagctcggagcagatccagcgcatcaccgccatgctgcggcagcacggcaagatcgagggcaagaacgtcttctactggttccagaaccacaaggcccgcgagcgccagaagcgccgcctcaccagcctcgacgtcaacgtgcccgccgccggcgcggccgacgccaccaccagccaactcggcgtcctctcgctgtcgtcgccgccgccttcaggcgcggcgcctccctcgcccaccctcggcttctacgccgccggcaatggcggcggatcggctgtgctgctggacacgagttccgactggggcagcagcggcgctgctatggccaccgagacatgcttcctgcaggactacatgggcgtgacggacacgggcagctcgtcgcagtggccacgcttctcgtcgtcggacacgataatggcggcggccgcggcgcgggcggcgacgacgcgggcgcccgagacgctccctctcttcccgacctgcggcgacgacggcggcagcggtagcagcagctacttgccgttctggggtgccgcgtccacaactgccggcgccacttcttccgttgcgatccaacagcaacaccagctgcaggagcagtacagcttttacagcaacagcaacagcacccagctggccggcaccggcaaccaagacgtatcggcaacagcagcagcagccgccgccctggagctgagcctcagctcatggtgctccccttaccctgctgcagggagtatgtgagagcaacgcgagctgccactgctcttcactgatgtctctggaatggaaggaggaggaagtgagaacagatcattcgacaaagcagcattagtccgttgatcggtggaagaccactcgtcagtgttgagttgaatgtttgatcaataaaatacggcaatgctgtaagggttgttttttatgccattgataatacactgtactgttcagttgttgaactctatttcttagccatgccaagtgcttttcttattttgaataacattacagcaaaaagttgaaagacaaaaaaaaaaacccccgaacagagtgctttgggtcccaagcttctttagactgtgttcggcgttccccctaaatttctccccctatatctcactcacttgtcacatcagcgttctctttccccctatatctccacgctctacagcagttccacctatatcaaacctctataccccaccacaacaatattatatactttcatcttcaactaactcatgtaccttccaatttttttctactaataattatttacgtgcacagaaacttagcaaggagagagagagcgggaatttaaatgctcggcgttaggcttttagtccgctaggtggctagaccgaggttaggacgctagttcactaggggcctagtggtgttttaagacgtcacggtcacccggtccgggcctagaaggccagcttcaagtttgtacaaaaaagcaggctccggccagaatggcccggaccgaagcttgcatgcctgcagtgcagcgtgacccggtcgtgcccctctctagagataatgagcattgcatgtctaagttataaaaaattaccacatattttttttgtcacacttgtttgaagtgcagtttatctatctttatacatatatttaaactttactctacgaataatataatctatagtactacaataatatcagtgttttagagaatcatataaatgaacagttagacatggtctaaaggacaattgagtattttgacaacaggactctacagttttatctttttagtgtgcatgtgttctcctttttttttgcaaatagcttcacctatataatacttcatccattttattagtacatccatttagggtttagggttaatggtttttatagactaatttttttagtacatctattttattctattttagcctctaaattaagaaaactaaaactctattttagtttttttatttaataatttagatataaaatagaataaaataaagtgactaaaaattaaacaaataccctttaagaaattaaaaaaactaaggaaacatttttcttgtttcgagtagataatgccagcctgttaaacgccgtcgacgagtctaacggacaccaaccagcgaaccagcagcgtcgcgtcgggccaagcgaagcagacggcacggcatctctgtcgctgcctctggacccctctcgagagttccgctccaccgttggacttgctccgctgtcggcatccagaaattgcgtggcggagcggcagacgtgagccggcacggcaggcggcctcctcctcctctcacggcaccggcagctacgggggattcctttcccaccgctccttcgctttcccttcctcgcccgccgtaataaatagacaccccctccacaccctctttccccaacctcgtgttgttcggagcgcacacacacacaaccagatctcccccaaatccacccttcggcacctccgcttcaaggtacgccgctcgtcctcccccccccccctctctaccttctctagatcggcgttccggtccatgcatggttagggcccggtagttctacttctgttcatgtttgtgttagatccgtgtttgtgttagatccgtgctgctagcgttcgtacacggatgcgacctgtacgtcagacacgttctgattgctaacttgccagtgtttctctttggggaatcctgggatggctctagccgttccgcagacgggatcgatttcatgattttttttgtttcgttgcatagggtttggtttgcccttttcctttatttcaatatatgccgtgcacttgtttgtcgggtcatcttttcatgcttttttttgtcttggttgtgatgatgtggtctggttgggcggtcgttctagatcggagtagaattctgtttcaaactacctggtggatttattaattttggatctgtatgtgtgtgccatacatattcatagttacgaattgaagatgatggatggaaatatcgatctaggataggtatacatgttgatgcgggttttactgatgcatatacagagatgctttttgttcgcttggttgtgatgatgtggtgtggttgggcggtcgttcattcgttctagatcggagtagaatactgtttcaaactacctggtgtatttattaattttggaactgtatgtgtgtgtcatacatcttcatagttacgagtttaagatggatggaaatatcgatctaggataggtatacatgttgatgtgggttttactgatgcatatacatgatggcatatgcagcatctattcatatgctctaaccttgagtacctatctattataataaacaagtatgttttataattattttgatcttgatatacttggatgatggcatatgcagcagctatatgtggatttttttagccctgccttcatacgctatttatttgcttggtactgtttcttttgtcgatgctcaccctgttgtttggtgttacttctgcaggtcgactttaacttagcctaggatccatggcctcttcatctgcacccaggttccgtgtctattccaagtacctctttctaacatatcctgaatgtacccttgagccacagtacgccttggattcacttcgcactctcttgaacaaatatgagcccctctacatcgctgctgttagagagctccacgaagatggatcaccacatctgcacgttctcgtgcagaacaagcttcgtgcttccatcaccaatcccaatgccttaaacctccgtatggatacatctccattctccatattccatccaaatatacaagctgccaaagactgcaaccaagttcgtgattacatcacgaaggaggttgactccgatgtaaacacagctgagtggggaacattcgtggctgtttcaactccaggtcgtaaagaccgtgatgcggatatgaaacagatcattgaatctagttcctctcgcgaggaattcctcagcatggtttgcaatcgttttccgtttgaatggtctatccgtctcaaagacttcgagtacacggcacgccatctatttcctgacccagttgccacttacacacctgagtttccaaccgaatcactcatttgccatgagaccattgaaagctggaaaaatgaacatctctactctctgtccctcgagagctacatcctgtgcaccagcacccctgccgaccaggcccagtccgacctcgaatggatggacgactacagccgtagtcaccggggaggcataagtccatctacatctgcgggccaaccagaacaggaaagacttcctgggcaaggtctctaggcgtacctagtggtacctgacatcttatagtctgcaacctctcgtgtctgaattcctatctttatcaagtgttattgcttccacgactataggacagctttcgtcgaaaggttttgctcatgtgatctcgaaggattcatctagtctgatttttcgtgacttgtatcggttttattggattcatccaacatatatcaataaaaaatgagttgtgtttcctttcttcctagttcagttaaaattatttccctcctgcgcttgtgctgtaattgtctgtgtacctgttgtttgtgactgtgttagttcccttggatatgatttcgtatttgatatgtacatggagatagcttagcttcattattggagtatgaagttagtatgacatagtcactctcctggaaaattgacactgcaaaccatatttttattctgaaccacaaatcctagtcagtccgctggcatatgccgtccgtttgctgaatccagaacgtgggtttggagatgtacggctgagatgcctctatgcgaaggggatttcgtggtgaaacgagatgggagtagagcaacgcccgtggaagatgcttcaaacttccacacttttgagcaacgatcggcagtagtaaggtagacgatttcaagatcaaagcatatgaagataaacaacatcaacaacaaaatttgttggggttctatagagagaaacagagctacatacatacactgttttgtatctaccatctgagatgatgaaaagatgaaaaactaaagaatgccccggcgccaacgccaggacacgccgcgcgcgcgtcacccgagccatctcttgacccagccggcgctgtatatttacacacgttgcagcatcgatcaccacctgttcgatcgcgtcgccgtcaccaagcttggcgcgccggtcacccggtccgggcctagaaggccacccgggattaagacccgtcgtcaagtaggaattccagaaatcaacgcacggtaactaaatcctcgcgctaagctgggtcaggaggccggccataacttcgtatagcatacattatacgaagttataggcctcggaccgggttaccgaattcctgcccttaaggccaattgttcaagattcattcaacaattgaaacatctcccatgattaaatcagtataaggttgctatggtcttgcttgacaaagtttttttttgagggaatttcaactaaatttttgagtgaaactatcaaatactgattttaaaaaatttttataaaaggaagcgcagagataaaaggccatctatgctacaaaagtacccaaaaatgtaatcctaaagtatgaattgcattttttttttgtttggacgaaaggaaaggagtattaccacaagaatgatatcatcttcatatttagatcttttttgggtaaagcttgagattctctaaatatagagaaatcagaagaaaaaaaaaccgtgttttggtggttttgatttctagcctccacaataactttgacggcgtcgacaagtctaacggacaccaagcagcgaaccaccagcgccgagccaagcgaagcagacggccgagacgttgacaccttcggcgcggcatctctcgagagttccgctccggcgctccacctccaccgctggcggtttcttattccgttccgttccgcctcctgctctgctcctctccacaccacacggcacgaaaccgttacggcaccggcagcacccagcacgggagaggggattcctttcccaccgttccttccctttccgccccgccgctataaatagccagccccatccccagcttttttccccaatctcatctcctctctcctgttgttcggagcacacgcacaatccgatcgatccccaaatccccttcgtctctcctcgcgagcctcgtggatcccagcttcaaggtacggcgatcgatcatcccccctccttctctctaccttcttttctctagactacatcggatggcgatccatggttagggcctgctagtttcccttcctgttttgtcgatggctgcgaggcacaatagatctgatggcgttatgacggctaacttgtcatgttgttgcgatttatagtccctttaggagatcagtttaatttctcggatggttcgagatcggtggtccatggttagtaccctaagatccgcgctgttagggttcgtagatggaggcgacctgttctgattgttaacttgtcagtacctgggaaatcctgggatggttctagctcgtccgcagatgagatcgatttcatgatcctctgtatcttgtttcgttgcctaggttccgtctaatctatccgtggtatgatgtagatgttttgatcgtgctaactacgtcttgtaaagttaattgtcaggtcataatttttagcatgcctttttttttgtttggttttgtctaattgggctgtcgttctagatcagagtagaagactgttccaaactacctgctggatttattgaacttggatctgtatgtgtgtcacatatcttcataaattcatgattaagatggattgaaatatcttttatctttttggtatggatagttctatatgttggtgtggctttgttagatgtatacatgcttagatacatgaagcaacgtgctgctactgtttagtaattgctgttcatttgtctaataaacagataaggatatgtatttatgttgctgttggttttgctggtactttgttggatacaaatgcttcaatacagaaaacagcatgctgctacgatttaccatttatctaatcttatcatatgtctaatctaataaacaaacatgcttttaaattatcttcatatgcttggatgatggcatacacagcggctatgtgtggttttttaaatacccagcatcatgggcatgcatgacactgctttaatatgctttttatttgcttgagactgtttcttttgtttatactgaccctttagttcggtgactcttctgcaggtcgactttaacttagcctaggatccatggcccagtccaagcacggcctgaccaaggagatgaccatgaagtaccgcatggagggctgcgtggacggccacaagttcgtgatcaccggcgagggcatcggctaccccttcaagggcaagcaggccatcaacctgtgcgtggtggagggcggccccttgcccttcgccgaggacatcttgtccgccgccttcatgtacggcaaccgcgtgttcaccgagtacccccaggacatcgtcgactacttcaagaactcctgccccgccggctacacctgggaccgctccttcctgttcgaggacggcgccgtgtgcatctgcaacgccgacatcaccgtgagcgtggaggagaactgcatgtaccacgagtccaagttctacggcgtgaacttccccgccgacggccccgtgatgaagaagatgaccgacaactgggagccctcctgcgagaagatcatccccgtgcccaagcagggcatcttgaagggcgacgtgagcatgtacctgctgctgaaggacggtggccgcttgcgctgccagttcgacaccgtgtacaaggccaagtccgtgccccgcaagatgcccgactggcacttcatccagcacaagctgacccgcgaggaccgcagcgacgccaagaaccagaagtggcacctgaccgagcacgccatcgcctccggctccgccttgccctccggactcagatctcgatagggtaccaatggccagttaacagatccagctgctgctgttctagggttcacaagtctgcctatttgtcttccccaatggagctatggttgtctggtctggtccttggtcgtgtcccgtttcattgtgtactatttacctgtaatgtgtatccttaagtctggtttgatggtgtctgaaacgttttgctgtggtagagcagcatggaagaactataatgaataagtgatccctaatcattgtgtccaaattttgcttctgctatacccttttgtgctgtttcttatgttttgcttaaaaatttgatctgacaaacaaatttgtctaaattatgctcttgttctgactgtgtactgtacacatttgtattgctaccggtttggcacatagttttctctttgattgcagatcaaacccttctgattgcagattgcttggctatggctgatgtgctcactgttcttctttagcttgtatattgctgatggtggcttggctacggctgaaaaagttgctgctgcgccgacttggcaactgttgctccagtaatgctttgtcctctcttcctagccgccgacttggcacttggcagctgttgctcctgtaatgcgttgttatctcttatctcttgagatgtactatgattttgaggctgtttgacttgtgccagattgccagtgctgatgctatattatctcaggtttttatgctagtatatgttttactgtgtgctgcctgtgtcgagttacgtaatctattgaaccgctatgcgtgttgatgccctgttgttgcttgccagattgatgcccctgttgcttgcagcttgcaagctgtagtgaaatcctaaaattcgaaaccaaatctattctgaacttttgaagatctgtgatgtccggaagaaaagattcaaacagataaacgggactctccagaatctataaaataaatgatcgacaaacgctttgctttggtaggcttcctagttagttagcggaccgggatccgacggcgtcttcaccgccccgccgccgcccgagccggacttgtcgctgccgccgccgctgctcatcttgcgcgcttgtgtccctccctcagtccctgcgttcgcggatcgcgggcgggtgcgacccgtttggactccggccggtagccttcgtgccgacctcgctcggtccaccggtttgtcggggacccacatgtcagtgaaggtacgcgtccacgtccacagaccctactaccccagacgagtccaaatcgctgttccctcacactctcgtgtaccagcgcgcggcggaaagcacctttccaacaaccgccgacacgtcggtcccacgtcggcatgctccaccggtcagtgtttggcgtgtacggctcccggcgacgaacgagtgtggcctaagctttcctactcccatcccatctgagccacacatctctctcacgccacgcgcacaaaacagccaggctcccacgcgcatcaaccggctctccctttccgtgccactcgcccccaagccccaaaccctcgccgccgcctccgagacagccgccgccacctaggccatggccaccgccgccgccgcgtctaccgcgctcactggcgccactaccgctgcgcccaaggcgaggcgccgggcgcacctcctggccacccgccgcgccctcgccgcgcccatcaggtgctcagcggcgtcacccgccatgccgatggctcccccggccaccccgctccggccgtggggccccaccgagccccgcaagggtgctgacatcctcgtcgagtccctcgagcgctgcggcgtccgcgacgtcttcgcctaccccggcggcgcgtcgatggagatccaccaggcactcacccgctcccccgtcatcgccaaccacctcttccgccacgagcaaggggaggcctttgccgcctccggctacgcgcgctcctcgggccgcgtcggcgtctgcatcgccacctccggccccggcgccaccaacctagtctccgcgctcgccgacgcgctgctcgattccgtcccgatggtcgccatcacgggacaggtggcgcgacgcatgattggcaccgacgccttccaggagacgcccatcgtcgaggtcacgcgctccatcaccaagcacaactacctggtcctcgacgtcgacgacatcccccgcgtcgtgcaggaggctttcttcctcgcctcctctggtcgaccagggccggtgcttgtcgacatccccaaggacatccagcagcagatggcggtgcctgtctgggacaagcccatgagtctgcctgggtacattgcgcgccttcccaagccccctgcgactgagttgcttgagcaggtgctgcgtcttgttggtgaatcgcggcgccctgttctttatgtgggcggtggctgcgcagcatctggtgaggagttgcgacgctttgtggagctgactggaatcccggtcacaactactcttatgggcctcggcaacttccccagcgacgacccactgtctctgcgcatgctaggtatgcatgggacggtgtatgcaaattatgcagtggataaggccgatctgttgcttgcacttggtgtgcggtttgatgatcgcgtgacagggaagattgaggcttttgcaagcagggctaagattgtgcacgttgatattgatccggctgagattggcaagaacaagcagccacatgtgtccatctgtgcagatgttaagcttgctttgcagggcatgaatgctcttcttgaaggaagcacatcaaagaagagctttgactttggctcatggaacgatgagttggatcagcagaagagggaattcccccttgggtataaaacatctaatgaggagatccagccacaatatgctattcaggttcttgatgagctgacgaaaggcgaggccatcatcggcacaggtgttgggcagcaccagatgtgggcggcacagtactacacttacaagcggccaaggcagtggttgtcttcagctggtcttggggctatgggatttggtttgccggctgctgctggtgcttctgtggcaaacccaggtgtcactgttgttgacatcgatggagatggtagctttctcatgaacgttcaggagctagctatgatccgaattgagaacctcccagtgaaggtctttgtgctaaacaaccagcacctggggatggtggtgcagttggaggacaggttctataaggccaacagagcgcacacatacttgggaaacccagagaatgaaagtgagatatatccagatttcgtgacgatcgccaaagggttcaacattccagccgtccgtgtgacaaagaagaacgaagtccgcgcagcgataaagaagatgctcgagactccagggccgtacctcttggatataatcgtcccacaccaggagcatgtgttgcctatgatccctagtggtggggctttcaaggatatgatcctggatggtgatggcaggactgtgtactgacttcgaataggtacccggggatcctctagtgccgtgggtcgtttaagctgccgctgtacctgtgtcgtctggtgccttctggtgtacctgggaggttgtcgtctatcaagtatctgtggttggtgtcatgagtcagtgagtcccaatactgttcgtgtcctgtgtgcattatacccaaaactgttatgggcaaatcatgaataagcttgatgttcgaacttaaaagtctctgctcaatatggtattatggttgtttttgttcgtctcctaatatttgcctgggatcaaattttattggctggtgttcatttgacctccatgttcttgctaggctccattttttactctacagccataatatgtttgattgtttggtttgttctttgttgtacacctggttctgtcgagcttagttttcgacactggcttacagcttaacatgttgctattttattgggttctgattgctattttattgggttctgattgctagtttttgctgaatccaaaaaccatgttatttatttaagcgatccaggttattattatgatggtggctaagtttttttttttccaagggtaaattttctggattctccagtgtttctgtggccgaattcaatcactagagtcgacctgcaaagcttcggtccgggcctagaaggcccgcgccacttacgcttgattccgatgacttcgtaggttcctagctcaagccgctcgtgtccaagcgtcacttacgattagctaatgattacggcatctaggaccgactagctagctagctaagagctcggtaccgagctcgaattcattccgattaatcgtggcctcttgctcttcaggatgaagagctatgtttaaacgtgcaagcgctactagacaattcagtacattaaaaacgtccgcaatgtgttattaagttgtctaagcgtcaatttgtttacaccacaatatatcctgcca

SEQ ID NO: 25 - DNA, 17841 bp, synthetic construct
  misc_feature 1..17841: note = PHP93766
  source 1..17841: mol_type = other DNA
gtttacccgccaatatatcctgtcaaacactgcggccgcacttgaccgcggatggagccggagctgtggtgaggccatcgacgggaggtgggggagaacacagtctcagtgttctttgtgagtccgcaaggtttttagcttttctgtattaattaaggttgctgttggctgtagaatacggtcgtggaagagctgtatcggtagctactacgtaagctattatatactggaagtctggagctcgtcgatctccggtcgtcttcctccatttctcctcgtcttgctttgactgctgctaccatttgcttctgttttctgatgaagcatgccatgtcggccaccagtgtttgtgtggtttttgcagggaatggctttcaagtgctgtgattgaatggccctcgtcgtcctcggctgagctcacatggacgcgtcatgtgagtgagatatatgatcatatgatgagtggggttcgggtgagtgcgtacttgaagtaggatcccgctttcactcattcattcattggcctttaaaccgggaaattttcgcgaggagatggagggaagcaagcagggtgacgagtgcagagtgccgcgagcgctttgtcaaaaggcaccgccgtaggcaaaaaaatcaatggccctgactgactcgatggtagtactactgtagagactagagagggttgctccccatatcttcgtgtgacttttactccagcattgcatttccgtcattgagacgttaattaatagcagctttcgggacagatgactgtggccatgtttcgtcacggccgcttcgtgccagctgggggtactatagtactgtgattttgttagtaaaaactttcattaggccaccattgacgaccgggccttcgcttttgctgcgctaattaaccatttcccggcgaccgaagggaacatgaacatgccccgacacatgagggcatgaggactagtgttctccctgtcgttcgttgacttgactagtgatagtttaaacgctcttcaactggaagagcggttactaccggttcactagctagctgctaatcgagctagttaccctatgaggtgacatgaagcgctcacggttactatgacggttagcttcacgactgttggtggcagtagcgtacgacttagctatagttccggacttacctagctaataacttcgtatagcatacattatacgaagttatggttaccgaattcgagctcggtaccctggttcacaaactcaatacaacacacagtggagtagggtattacgctccggcggcccgaaccactctaaatccttgtgtcctcgtgtgctcttccaccattaatgactgtaattgcagggacacgaagagttgtagcgcttttgccaacaagatccgctatatgctagtagagtggaacctgcacagcaacaagcatccaataatctgagaataagaattatgtgtggtgatggttctcatctctgcaactcgccattttcgcgagagaaccaaatccaagttggtgaagatcatgatttgggctcatgggctggcatagtagctattacctttgcaattgtggttcgaatctatccgatattctccttttcagggagagctaatgcttatgcttattgggtattttggtttgacactgcttcacgcccaaaaaaaggcaactatgtctgagttggatatggcccaaaaaaaggcagctatgtctgagttggatatggaagtcttctttcgtttagggtgaagtaagaccaagctcatgagcttattatcttaggtcggaacaaattagttgataggcatggcacatttatcaaattataatgattttaacagaaaagcaacacctctttttcagcagcaccagctttgcaagctgcaattgacactccaagcatagtatttgctccaaactcagcctgcatttcgcacaatatcatatctatttccatttggataaaatatattttccagaaatatgggaacagaatcaagatacagaaaaaagttgtggtagtagtggtaagtggaaacacaagtacagtgaaaagatagcattatttctgaacagtcaaattaaccgaaataagtagtatcacatactgcccctaaattgactacacccaatgtaaagaattgcttgagcatattgagccatcagttgtttgtttgtgtaacggatttgacaatgcagagttcaggagcaaaaaaccgcaaaggagagaaagagggaaaggatctcctagtatcccaccttgtggcgcgccctgtcaagtgcatgatggcctggtcgatctgcgtctgctgctgcggttccatcccaacgagtgcctccgacaccttgtcgttgatcacccgcaccgcgtaggcgacccccctggcgaggaacttccgcctctcggaggccccggccgcgtcggcggcggcgccctcgagcgcgcccacgctagccgtagatgctcggtgcacggccttgttggtgtgcaactcgacctcaacggccggtgcgctacgcccgtcaaggatctggcgcgcccgcaccctcgtgatcacggtgggcgcctcccgcctcatgtggccgacgatgaaaagcgccgggttaggggccttggcgcgcaccgccgtattcagggcctcctcgctcttgcgcgagagcaggtgcttccccaggtactcctgcactgacaaggctgccacagcggtggaatttgtcctcacgacttcgccacgtcgtcctcacctccctggcttcccacgactccgccgtatcgaggtgctcggtgggtcgtcttaatccgaagtccgaactaggaagacgagacagagaggtctgaggaatgggcctcgtttgatgttgagctgaattatttttccagcataagcccaggtcttggtccatgaacaaaattactagaaacccagcccagtactacgatctaaaagagggactgccactggatagctctctctagcattctccacgctccaatacagcggcgtcgtgtctatccgggtctatccgcgaacacgtgagaactctccagaaactgctttctcctccacttcatctctctcgctttccctctataaaaagaccccttctaggaattgagggagacagcaagcaccaagcagcgatccgaagctcaatcaattcactcaaacctcttccccaaatcttcgattagatcttcgttgacaagaagactagaaccgaacctgacatgtccaacctgctcacggttcaccagaaccttccggctcttccagtggacgcgacgtccgatgaagtcaggaagaacctcatggacatgttccgcgacaggcaagcgttcagcgagcacacctggaagatgctgctctccgtctgccgctcctgggctgcatggtgcaagctgaacaacaggaagtggttccccgctgagcccgaggacgtgagggattaccttctgtacctgcaagcgcgaggtttgtttctgcttctacctttgatatatatataataattatcattaattagtagtaatataatatttcaaatatttttttcaaaataaaagaatgtagtatatagcaattgcttttctgtagtttataagtgtgtatattttaatttataacttttctaatatatgaccaaaacatggtgatgcctaggtctggcagtgaagaccatccagcaacaccttggacaactgaacatgcttcacaggcgctccggcctcccgcgccccagcgactcgaacgccgtgagcctcgtcatgcgccgcatcaggaaggaaaacgtcgatgccggcgaaagggcaaagcaggccctcgcgttcgagaggaccgatttcgaccaggtccgcagcctgatggagaacagcgacaggtgccaggacattaggaacctggcgttcctcggaattgcatacaacacgctcctcaggatcgcggaaattgcccgcattcgcgtgaaggacattagccgcaccgacggcggcaggatgcttatccacattggcaggaccaagacgctcgtttccaccgcaggcgtcgaaaaggccctcagcctcggagtgaccaagctcgtcgaacgctggatctccgtgtccggcgtcgcggacgacccaaacaactacctcttctgccgcgtccgcaagaacggggtggctgcccctagcgccaccagccaactcagcacgagggccttggaaggtattttcgaggccacccaccgcctgatctacggcgcgaaggatgacagcggtcaacgctacctcgcatggtccgggcactccgcccgcgttggagctgctagggacatggcccgcgccggtgtttccatccccgaaatcatgcaggcgggtggatggacgaacgtgaacattgtcatgaactacattcgcaaccttgacagcgagacgggcgcaatggttcgcctcctggaagatggtgactgaggtacccaacctagacttgtccatcttctggattggccaacttaattaatgtatgaaataaaaggatgcacacatagtgacatgctaatcactataatgtgggcatcaaagttgtgtgttatgtgtaattactagttatctgaataaaagagaaagagatcatccatatttcttatcctaaatgaatgtcacgtgtctttataattctttgatgaaccagatgcatttcattaaccaaatccatatacatataaatattaatcatatataattaatatcaattgggttagcaaaacaaatctagtctaggtgtgttttgcgatccgatcgaggccggccacactgatagtttaaactgaaggcgggaaacgacaatctgatcatgagcggagaattaagggagtcacgttatgacccccgccgatgacgcgggacaagccgttttacgtttggaactgacagaaccgcaacgattgaaggagccactcagccgcgggtttctggagtttaatgagctaagcacatacgtcagaaaccattattgcgcgttcaaaagtcgcctaaggtcactatcagctagcaaatatttcttgtcaaaaatgctccactgacgttccataaattcccctcggtatccaattagagtctcatattcactctcccggcggatctcgactctagaggatcgctcaggaaggccgctgagatagagccatggcggccaatgcgggcggcggtggagcgggaggaggcagcggcagcggcagcgtggctgcgccggcggtgtgccgccccagcggctcgcggtggacgccgacgccggagcagatcaggatgctgaaggagctctactacggctgcggcatccggtcgcccagctcggagcagatccagcgcatcaccgccatgctgcggcagcacggcaagatcgagggcaagaacgtcttctactggttccagaaccacaaggcccgcgagcgccagaagcgccgcctcaccagcctcgacgtcaacgtgcccgccgccggcgcggccgacgccaccaccagccaactcggcgtcctctcgctgtcgtcgccgccgccttcaggcgcggcgcctccctcgcccaccctcggcttctacgccgccggcaatggcggcggatcggctgtgctgctggacacgagttccgactggggcagcagcggcgctgctatggccaccgagacatgcttcctgcaggactacatgggcgtgacggacacgggcagctcgtcgcagtggccacgcttctcgtcgtcggacacgataatggcggcggccgcggcgcgggcggcgacgacgcgggcgcccgagacgctccctctcttcccgacctgcggcgacgacggcggcagcggtagcagcagctacttgccgttctggggtgccgcgtccacaactgccggcgccacttcttccgttgcgatccaacagcaacaccagctgcaggagcagtacagcttttacagcaacagcaacagcacccagctggccggcaccggcaaccaagacgtatcggcaacagcagcagcagccgccgccctggagctgagcctcagctcatggtgctccccttaccctgctgcagggagtatgtgagagcaacgcgagctgccactgctcttcactgatgtctctggaatggaaggaggaggaagtgagaacagatcattcgacaaagcagcattagtccgttgatcggtggaagaccactcgtcagtgttgagttgaatgtttgatcaataaaatacggcaatgctgtaagggttgttttttatgccattgataatacactgtactgttcagttgttgaactctatttcttagccatgccaagtgcttttcttattttgaataacattacagcaaaaagttgaaagacaaaaaaaaaaacccccgaacagagtgctttgggtcccaagcttctttagactgtgttcggcgttccccctaaatttctccccctatatctcactcacttgtcacatcagcgttctctttccccctatatctccacgctctacagcagttccacctatatcaaacctctataccccaccacaacaatattatatactttcatcttcaactaactcatgtaccttccaatttttttctactaataattatttacgtgcacagaaacttagcaaggagagagagagcgggaatttaaatgctcggcgttaggcttttagtccgctaggtggctagaccgaggttaggacgctagttcactaggggcctagtggtgttttaagacgtcacggtcacccggtccgggcctagaaggccagcttcaagtttgtacaaaaaagcaggctccggccagaatggcccggaccgaagcttgcatgcctgcagtgcagcgtgacccggtcgtgcccctctctagagataatgagcattgcatgtctaagttataaaaaattaccacatattttttttgtcacacttgtttgaagtgcagtttatctatctttatacatatatttaaactttactctacgaataatataatctatagtactacaataatatcagtgttttagagaatcatataaatgaacagttagacatggtctaaaggacaattgagtattttgacaacaggactctacagttttatctttttagtgtgcatgtgttctcctttttttttgcaaatagcttcacctatataatacttcatccattttattagtacatccatttagggtttagggttaatggtttttatagactaatttttttagtacatctattttattctattttagcctctaaattaagaaaactaaaactctattttagtttttttatttaataatttagatataaaatagaataaaataaagtgactaaaaattaaacaaataccctttaagaaattaaaaaaactaaggaaacatttttcttgtttcgagtagataatgccagcctgttaaacgccgtcgacgagtctaacggacaccaaccagcgaaccagcagcgtcgcgtcgggccaagcgaagcagacggcacggcatctctgtcgctgcctctggacccctctcgagagttccgctccaccgttggacttgctccgctgtcggcatccagaaattgcgtggcggagcggcagacgtgagccggcacggcaggcggcctcctcctcctctcacggcaccggcagctacgggggattcctttcccaccgctccttcgctttcccttcctcgcccgccgtaataaatagacaccccctccacaccctctttccccaacctcgtgttgttcggagcgcacacacacacaaccagatctcccccaaatccacccgtcggcacctccgcttcaaggtacgccgctcgtcctcccccccccccctctctaccttctctagatcggcgttccggtccatgcatggttagggcccggtagttctacttctgttcatgtttgtgttagatccgtgtttgtgttagatccgtgctgctagcgttcgtacacggatgcgacctgtacgtcagacacgttctgattgctaacttgccagtgtttctctttggggaatcctgggatggctctagccgttccgcagacgggatcgatttcatgattttttttgtttcgttgcatagggtttggtttgcccttttcctttatttcaatatatgccgtgcacttgtttgtcgggtcatcttttcatgcttttttttgtcttggttgtgatgatgtggtctggttgggcggtcgttctagatcggagtagaattctgtttcaaactacctggtggatttattaattttggatctgtatgtgtgtgccatacatattcatagttacgaattgaagatgatggatggaaatatcgatctaggataggtatacatgttgatgcgggttttactgatgcatatacagagatgctttttgttcgcttggttgtgatgatgtggtgtggttgggcggtcgttcattcgttctagatcggagtagaatactgtttcaaactacctggtgtatttattaattttggaactgtatgtgtgtgtcatacatcttcatagttacgagtttaagatggatggaaatatcgatctaggataggtatacatgttgatgtgggttttactgatgcatatacatgatggcatatgcagcatctattcatatgctctaaccttgagtacctatctattataataaacaagtatgttttataattattttgatcttgatatacttggatgatggcatatgcagcagctatatgtggatttttttagccctgccttcatacgctatttatttgcttggtactgtttcttttgtcgatgctcaccctgttgtttggtgttacttctgcaggtcgactttaacttagcctaggatccgcccatggactccagcagcttcctccctgccgccggcgcggagaatggctcggcggcgggcggcgccaacaatggcggcgctgctcagcagcatgcggcgccggcgatccgcgagcaggaccggctgatgccgatcgcgaacgtgatccgcatcatgcggcgcgtgctgccggcgcacgccaagattagcgacgacgccaaggagacgatccaggagtgcgtgtcggagtacatcagcttcatcacgggggaggccaacgagcggtgccagcgggagcagcgcaagaccatcaccgccgaggacgtgctgtgggccatgagccgcctcggcttcgacgactacgtcgagccgctcggcgcctacctccaccgctaccgcgagttcgagggcgacgcgcgcggcgtcgggctcgtccctggggccgccccatcgcgcggcggcgaccaccacccgcactccatgtcgccagcggcgatgctcaagtcccgcgggccagtctccggagccgccatgctaccgcaccaccaccaccaccacgacatgcagatgcacgccgccatgtacgggggaacggccgtgcccccgccggccgggcctcctcaccacggcgggttcctcatgccacacccacagggtagtagccactacctgccttacgcgtacgagcccacgtacggcggtgagcacgcgatggctgcatactatggaggcgccgcgtacgcgcccggcaacggcgggagcggcgacggcagtggcagtggcggcggtggcgggagcgcgtcgcacacaccgcagggcagcggcggcttggagcacccgcacccgttcgcgtacaagtagttatgtacaggtacctgacatcttatagtctgcaacctctcgtgtctgaattcctatctttatcaagtgttattgcttccacgactataggacagctttcgtcgaaagcttttgctcatgtgatctcgaaggattcatctagtctgatttttcgtgacttgtatcggttttattggattcatccaacatatatcaataaaaaatgagttgtgtttcctttcttcctagttcagttaaaattatttccctcctgcgcttgtgctgtaattgtctgtgtacctgttgtttgtgactgtgttagttcccttggatatgatttcgtatttgatatgtacatggagatagcttagcttcattattggagtatgaagttagtatgacatagtcactctcctggaaaattgacactgcaaaccatatttttattctgaaccacaaatcctagtcagtccgctggcatatgccgtccgtttgctgaatccagaacgtgggtttggagatgtacggctgagatgcctctatgcgaaggggatttcgtggtgaaacgagatgggagtagagcaacgcccgtggaagatgcttcaaacttccacacttttgagcaacgatcggcagtagtaaggtagacgatttcaagatcaaagcatatgaagataaacaacatcaacaacaaaatttgttggggttctatagagagaaacagagctacatacatacactgttttgtatctaccatctgagatgatgaaaagatgaaaaactaaagaatgccccggcgccaacgccaggacacgccgcgcgcgcgtcacccgagccatctcttgacccagccggcgctgtatatttacacacgttgcagcatcgatcaccacctgttcgatcgcgtcgccgtcaccggtaccgagctcgaattccggattaagacccgtcgtcaagtaggaattccagaaatcaacgcacggtaactaaatcctcgcgctaagctgggtcagtgcgcacgataacttcgtatagcatacattatacgaagttataacagcggaccgggttaccgaattcctgcccttaaggccaattgttcaagattcattcaacaattgaaacatctcccatgattaaatcagtataaggttgctatggtcttgcttgacaaagtttttttttgagggaatttcaactaaatttttgagtgaaactatcaaatactgattttaaaaaatttttataaaaggaagcgcagagataaaaggccatctatgctacaaaagtacccaaaaatgtaatcctaaagtatgaattgcattttttttttgtttggacgaaaggaaaggagtattaccacaagaatgatatcatcttcatatttagatcttttttgggtaaagcttgagattctctaaatatagagaaatcagaagaaaaaaaaaccgtgttttggtggttttgatttctagcctccacaataactttgacggcgtcgacaagtctaacggacaccaagcagcgaaccaccagcgccgagccaagcgaagcagacggccgagacgttgacaccttcggcgcggcatctctcgagagttccgctccggcgctccacctccaccgctggcggtttcttattccgttccgttccgcctcctgctctgctcctctccacaccacacggcacgaaaccgttacggcaccggcagcacccagcacgggagaggggattcctttcccaccgttccttccctttccgccccgccgctataaatagccagccccatccccagcttttttccccaatctcatctcctctctcctgttgttcggagcacacgcacaatccgatcgatccccaaatccccttcgtctctcctcgcgagcctcgtggatcccagcttcaaggtacggcgatcgatcatcccccctccttctctctaccttcttttctctagactacatcggatggcgatccatggttagggcctgctagtttcccttcctgttttgtcgatggctgcgaggcacaatagatctgatggcgttatgacggctaacttgtcatgttgttgcgatttatagtccctttaggagatcagtttaatttctcggatggttcgagatcggtggtccatggttagtaccctaagatccgcgctgttagggttcgtagatggaggcgacctgttctgattgttaacttgtcagtacctgggaaatcctgggatggttctagctcgtccgcagatgagatcgatttcatgatcctctgtatcttgtttcgttgcctaggttccgtctaatctatccgtggtatgatgtagatgttttgatcgtgctaactacgtcttgtaaagttaattgtcaggtcataatttttagcatgcctttttttttgtttggttttgtctaattgggctgtcgttctagatcagagtagaagactgttccaaactacctgctggatttattgaacttggatctgtatgtgtgtcacatatcttcataaattcatgattaagatggattgaaatatcttttatctttttggtatggatagttctatatgttggtgtggctttgttagatgtatacatgcttagatacatgaagcaacgtgctgctactgtttagtaattgctgttcatttgtctaataaacagataaggatatgtatttatgttgctgttggttttgctggtactttgttggatacaaatgcttcaatacagaaaacagcatgctgctacgatttaccatttatctaatcttatcatatgtctaatctaataaacaaacatgcttttaaattatcttcatatgcttggatgatggcatacacagcggctatgtgtggttttttaaatacccagcatcatgggcatgcatgacactgctttaatatgctttttatttgcttgagactgtttcttttgtttatactgaccctttagttcggtgactcttctgcaggtcgactttaacttagcctaggatccatggcccagtccaagcacggcctgaccaaggagatgaccatgaagtaccgcatggagggctgcgtggacggccacaagttcgtgatcaccggcgagggcatcggctaccccttcaagggcaagcaggccatcaacctgtgcgtggtggagggcggccccttgcccttcgccgaggacatcttgtccgccgccttcatgtacggcaaccgcgtgttcaccgagtacccccaggacatcgtcgactacttcaagaactcctgccccgccggctacacctgggaccgctccttcctgttcgaggacggcgccgtgtgcatctgcaacgccgacatcaccgtgagcgtggaggagaactgcatgtaccacgagtccaagttctacggcgtgaacttccccgccgacggccccgtgatgaagaagatgaccgacaactgggagccctcctgcgagaagatcatccccgtgcccaagcagggcatcttgaagggcgacgtgagcatgtacctgctgctgaaggacggtggccgcttgcgctgccagttcgacaccgtgtacaaggccaagtccgtgccccgcaagatgcccgactggcacttcatccagcacaagctgacccgcgaggaccgcagcgacgccaagaaccagaagtggcacctgaccgagcacgccatcgcctccggctccgccttgccctccggactcagatctcgatagggtaccaatggccagttaacagatccagctgctgctgttctagggttcacaagtctgcctatttgtcttccccaatggagctatggttgtctggtctggtccttggtcgtgtcccgtttcattgtgtactatttacctgtaatgtgtatccttaagtctggtttgatggtgtctgaaacgttttgctgtggtagagcagcatggaagaactataatgaataagtgatccctaatcattgtgtccaaattttgcttctgctatacccttttgtgctgtttcttatgttttgcttaaaaatttgatctgacaaacaaatttgtctaaattatgctcttgttctgactgtgtactgtacacatttgtattgctaccggtttggcacatagttttctctttgattgcagatcaaacccttctgattgcagattgcttggctatggctgatgtgctcactgttcttctttagcttgtatattgctgatggtggcttggctacggctgaaaaagttgctgctgcgccgacttggcaactgttgctccagtaatgctttgtcctctcttcctagccgccgacttggcacttggcagctgttgctcctgtaatgcgttgttatctcttatctcttgagatgtactatgattttgaggctgtttgacttgtgccagattgccagtgctgatgctatattatctcaggtttttatgctagtatatgttttactgtgtgctgcctgtgtcgagttacgtaatctattgaaccgctatgcgtgttgatgccctgttgttgcttgccagattgatgcccctgttgcttgcagcttgcaagctgtagtgaaatcctaaaattcgaaaccaaatctattctgaacttttgaagatctgtgatgtccggaagaaaagattcaaacagataaacgggactctccagaatctataaaataaatgatcgacaaacgctttgctttggtaggcttcctagttagttagcggaccgggatccgacggcgtcttcaccgccccgccgccgcccgagccggacttgtcgctgccgccgccgctgctcatcttgcgcgcttgtgtccctccctcagtccctgcgttcgcggatcgcgggcgggtgcgacccgtttggactccggccggtagccttcgtgccgacctcgctcggtccaccggtttgtcggggacccacatgtcagtgaaggtacgcgtccacgtccacagaccctactaccccagacgagtccaaatcgctgttccctcacactctcgtgtaccagcgcgcggcggaaagcacctttccaacaaccgccgacacgtcggtcccacgtcggcatgctccaccggtcagtgtttggcgtgtacggctcccggcgacgaacgagtgtggcctaagctttcctactcccatcccatctgagccacacatctctctcacgccacgcgcacaaaacagccaggctcccacgcgcatcaaccggctctccctttccgtgccactcgcccccaagccccaaaccctcgccgccgcctccgagacagccgccgccacctaggccatggccaccgccgccgccgcgtctaccgcgctcactggcgccactaccgctgcgcccaaggcgaggcgccgggcgcacctcctggccacccgccgcgccctcgccgcgcccatcaggtgctcagcggcgtcacccgccatgccgatggctcccccggccaccccgctccggccgtggggccccaccgagccccgcaagggtgctgacatcctcgtcgagtccctcgagcgctgcggcgtccgcgacgtcttcgcctaccccggcggcgcgtcgatggagatccaccaggcactcacccgctcccccgtcatcgccaaccacctcttccgccacgagcaaggggaggcctttgccgcctccggctacgcgcgctcctcgggccgcgtcggcgtctgcatcgccacctccggccccggcgccaccaacctagtctccgcgctcgccgacgcgctgctcgattccgtcccgatggtcgccatcacgggacaggtggcgcgacgcatgattggcaccgacgccttccaggagacgcccatcgtcgaggtcacgcgctccatcaccaagcacaactacctggtcctcgacgtcgacgacatcccccgcgtcgtgcaggaggctttcttcctcgcctcctctggtcgaccagggccggtgcttgtcgacatccccaaggacatccagcagcagatggcggtgcctgtctgggacaagcccatgagtctgcctgggtacattgcgcgccttcccaagccccctgcgactgagttgcttgagcaggtgctgcgtcttgttggtgaatcgcggcgccctgttctttatgtgggcggtggctgcgcagcatctggtgaggagttgcgacgctttgtggagctgactggaatcccggtcacaactactcttatgggcctcggcaacttccccagcgacgacccactgtctctgcgcatgctaggtatgcatgggacggtgtatgcaaattatgcagtggataaggccgatctgttgcttgcacttggtgtgcggtttgatgatcgcgtgacagggaagattgaggcttttgcaagcagggctaagattgtgcacgttgatattgatccggctgagattggcaagaacaagcagccacatgtgtccatctgtgcagatgttaagcttgctttgcagggcatgaatgctcttcttgaaggaagcacatcaaagaagagctttgactttggctcatggaacgatgagttggatcagcagaagagggaattcccccttgggtataaaacatctaatgaggagatccagccacaatatgctattcaggttcttgatgagctgacgaaaggcgaggccatcatcggcacaggtgttgggcagcaccagatgtgggcggcacagtactacacttacaagcggccaaggcagtggttgtcttcagctggtcttggggctatgggatttggtttgccggctgctgctggtgcttctgtggcaaacccaggtgtcactgttgttgacatcgatggagatggtagctttctcatgaacgttcaggagctagctatgatccgaattgagaacctcccagtgaaggtctttgtgctaaacaaccagcacctggggatggtggtgcagttggaggacaggttctataaggccaacagagcgcacacatacttgggaaacccagagaatgaaagtgagatatatccagatttcgtgacgatcgccaaagggttcaacattccagccgtccgtgtgacaaagaagaacgaagtccgcgcagcgataaagaagatgctcgagactccagggccgtacctcttggatataatcgtcccacaccaggagcatgtgttgcctatgatccctagtggtggggctttcaaggatatgatcctggatggtgatggcaggactgtgtactgacttcgaataggtacccggggatcctctagtgccgtgggtcgtttaagctgccgctgtacctgtgtcgtctggtgccttctggtgtacctgggaggttgtcgtctatcaagtatctgtggttggtgtcatgagtcagtgagtcccaatactgttcgtgtcctgtgtgcattatacccaaaactgttatgggcaaatcatgaataagcttgatgttcgaacttaaaagtctctgctcaatatggtattatggttgtttttgttcgtctcctaatatttgcctgggatcaaattttattggctggtgttcatttgacctccatgttcttgctaggctccattttttactctacagccataatatgtttgattgtttggtttgttctttgttgtacacctggttctgtcgagcttagttttcgacactggcttacagcttaacatgttgctattttattgggttctgattgctattttattgggttctgattgctagtttttgctgaatccaaaaaccatgttatttatttaagcgatccaggttattattatgatggtggctaagtttttttttttccaagggtaaattttctggattctccagtgtttctgtggccgaattcaatcactagagtcgacctgcaaagcttcggtccgggcctagaaggcccgcgccacttacgcttgattccgatgacttcgtaggttcctagctcaagccgctcgtgtccaagcgtcacttacgattagctaatgattacggcatctaggaccgactagctagctagctaagagctcggtaccgagctcgaattcattccgattaatcgtggcctcttgctcttcaggatgaagagctatgtttaaacgtgcaagcgctactagacaattcagtacattaaaaacgtccgcaatgtgttattaagttgtctaagcgtcaatttgtttacaccacaatatatcctgcca

SEQ ID NO: 26 - DNA, 18510 bp, synthetic construct
  misc_feature 1..18510: note = PHP93925
  source 1..18510: mol_type = other DNA
gtttacccgccaatatatcctgtcaaacactgcggccgcacttgaccgcggatggagccggagctgtggtgaggccatcgacgggaggtgggggagaacacagtctcagtgttctttgtgagtccgcaaggtttttagcttttctgtattaattaaggttgctgttggctgtagaatacggtcgtggaagagctgtatcggtagctactacgtaagctattatatactggaagtctggagctcgtcgatctccggtcgtcttcctccatttctcctcgtcttgctttgactgctgctaccatttgcttctgttttctgatgaagcatgccatgtcggccaccagtgtttgtgtggtttttgcagggaatggctttcaagtgctgtgattgaatggccctcgtcgtcctcggctgagctcacatggacgcgtcatgtgagtgagatatatgatcatatgatgagtggggttcgggtgagtgcgtacttgaagtaggatcccgctttcactcattcattcattggcctttaaaccgggaaattttcgcgaggagatggagggaagcaagcagggtgacgagtgcagagtgccgcgagcgctttgtcaaaaggcaccgccgtaggcaaaaaaatcaatggccctgactgactcgatggtagtactactgtagagactagagagggttgctccccatatcttcgtgtgacttttactccagcattgcatttccgtcattgagacgttaattaatagcagctttcgggacagatgactgtggccatgtttcgtcacggccgcttcgtgccagctgggggtactatagtactgtgattttgttagtaaaaactttcattaggccaccattgacgaccgggccttcgcttttgctgcgctaattaaccatttcccggcgaccgaagggaacatgaacatgccccgacacatgagggcatgaggactagtgttctccctgtcgttcgttgacttgactagtgatagtttaaacgctcttcaactggaagagcggttactaccggttcactagctagctgctaatcgagctagttaccctatgaggtgacatgaagcgctcacggttactatgacggttagcttcacgactgttggtggcagtagcgtacgacttagctatagttccggacttacccttaagataacttcgtatagcatacattatacgaagttatgggcccacgcgtgaagagcggttaccagagctggtcacctttgtccaccaagatggaactgtcttcggccagaatggccatctggattcagcaggcctagaaggccatttatcgctatcaactttgtatagaaaagttgggccgaattcgagctcggtacggccagaatggcccggaccgggttacccggaccgaagcttgcatgcctgcagtgcagcgtgacccggtcgtgcccctctctagagataatgagcattgcatgtctaagttataaaaaattaccacatattttttttgtcacacttgtttgaagtgcagtttatctatctttatacatatatttaaactttactctacgaataatataatctatagtactacaataatatcagtgttttagagaatcatataaatgaacagttagacatggtctaaaggacaattgagtattttgacaacaggactctacagttttatctttttagtgtgcatgtgttctcctttttttttgcaaatagcttcacctatataatacttcatccattttattagtacatccatttagggtttagggttaatggtttttatagactaatttttttagtacatctattttattctattttagcctctaaattaagaaaactaaaactctattttagtttttttatttaataatttagatataaaatagaataaaataaagtgactaaaaattaaacaaataccctttaagaaattaaaaaaactaaggaaacatttttcttgtttcgagtagataatgccagcctgttaaacgccgtcgacgagtctaacggacaccaaccagcgaaccagcagcgtcgcgtcgggccaagcgaagcagacggcacggcatctctgtcgctgcctctggacccctctcgagagttccgctccaccgttggacttgctccgctgtcggcatccagaaattgcgtggcggagcggcagacgtgagccggcacggcaggcggcctcctcctcctctcacggcaccggcagctacgggggattcctttcccaccgctccttcgctttcccttcctcgcccgccgtaataaatagacaccccctccacaccctctttccccaacctcgtgttgttcggagcgcacacacacacaaccagatctcccccaaatccacccgtcggcacctccgcttcaaggtacgccgctcgtcctcccccccccccctctctaccttctctagatcggcgttccggtccatgcatggttagggcccggtagttctacttctgttcatgtttgtgttagatccgtgtttgtgttagatccgtgctgctagcgttcgtacacggatgcgacctgtacgtcagacacgttctgattgctaacttgccagtgtttctctttggggaatcctgggatggctctagccgttccgcagacgggatcgatttcatgattttttttgtttcgttgcatagggtttggtttgcccttttcctttatttcaatatatgccgtgcacttgtttgtcgggtcatcttttcatgcttttttttgtcttggttgtgatgatgtggtctggttgggcggtcgttctagatcggagtagaattctgtttcaaactacctggtggatttattaattttggatctgtatgtgtgtgccatacatattcatagttacgaattgaagatgatggatggaaatatcgatctaggataggtatacatgttgatgcgggttttactgatgcatatacagagatgctttttgttcgcttggttgtgatgatgtggtgtggttgggcggtcgttcattcgttctagatcggagtagaatactgtttcaaactacctggtgtatttattaattttggaactgtatgtgtgtgtcatacatcttcatagttacgagtttaagatggatggaaatatcgatctaggataggtatacatgttgatgtgggttttactgatgcatatacatgatggcatatgcagcatctattcatatgctctaaccttgagtacctatctattataataaacaagtatgttttataattattttgatcttgatatacttggatgatggcatatgcagcagctatatgtggatttttttagccctgccttcatacgctatttatttgcttggtactgtttcttttgtcgatgctcaccctgttgtttggtgttacttctgcaggtcgactttaacttagcctaggatccatggcggccaatgcgggcggcggtggagcgggaggaggcagcggcagcggcagcgtggctgcgccggcggtgtgccgccccagcggctcgcggtggacgccgacgccggagcagatcaggatgctgaaggagctctactacggctgcggcatccggtcgcccagctcggagcagatccagcgcatcaccgccatgctgcggcagcacggcaagatcgagggcaagaacgtcttctactggttccagaaccacaaggcccgcgagcgccagaagcgccgcctcaccagcctcgacgtcaacgtgcccgccgccggcgcggccgacgccaccaccagccaactcggcgtcctctcgctgtcgtcgccgccgccttcaggcgcggcgcctccctcgcccaccctcggcttctacgccgccggcaatggcggcggatcggctgtgctgctggacacgagttccgactggggcagcagcggcgctgctatggccaccgagacatgcttcctgcaggactacatgggcgtgacggacacgggcagctcgtcgcagtggccacgcttctcgtcgtcggacacgataatggcggcggccgcggcgcgggcggcgacgacgcgggcgcccgagacgctccctctcttcccgacctgcggcgacgacggcggcagcggtagcagcagctacttgccgttctggggtgccgcgtccacaactgccggcgccacttcttccgttgcgatccaacagcaacaccagctgcaggagcagtacagcttttacagcaacagcaacagcacccagctggccggcaccggcaaccaagacgtatcggcaacagcagcagcagccgccgccctggagctgagcctcagctcatggtgctccccttaccctgctgcagggagtatgtgagagcaacgcgagctgccactgctcttcactgatgtctctggaatggaaggaggaggaagtgagaacagatcattcgacaaagcagcattagtccgttgatcggtggaagaccactcgtcagtgttgagttgaatgtttgatcaataaaatacggcaatgctgtaagggttgttttttatgccattgataatacactgtactgttcagttgttgaactctatttcttagccatgccaagtgcttttcttattttgaataacattacagcaaaaagttgaaagacaaaaaaaaaaacccccgaacagagtgctttgggtcccaagcttctttagactgtgttcggcgttccccctaaatttctccccctatatctcactcacttgtcacatcagcgttctctttccccctatatctccacgctctacagcagttccacctatatcaaacctctataccccaccacaacaatattatatactttcatcttcaactaactcatgtaccttccaatttttttctactaataattatttacgtgcacagaaacttagcaaggagagagagagcgggaatttaaatgctcggcgttaggcttttagtccgctaggtggctagaccgaggttaggacgctagttcactaggggcctagtggtgttttaagggttaccatcgagcagctggcttgtggggaccagacaaaaaaggaatggtgcagaattgttaggcgcacctaccaaaagcatctttgcctttattgcaaagataaagcagattcctctagtacaagtggggaacaaaataacgtggaaaagagctgtcctgacagcccactcactaatgcgtatgacgaacgcagtgacgaccacaaaactcgagcaacgagatcatgagccaatcaaagaggagtgatgtagacctaaagcaataatggagccatgacgtaagggcttacgcccatacgaaataattaaaggctgatgtgacctgtcggtctctcagaacctttactttttatgtttggcgtgtatttttaaatttccacggcaatgacgatgtgaccgtcgacccactaaaacattgctttgtcaaaagctaaaaaagatgatgcccgacagccacttgtgtgaagcatgagaagccggtccctccactaagaaaattagtgaagcatcttccagtggtccctccactcacagctcaatcagtgagcaacaggacgaaggaaatgacgtaagccatgacgtctaatcccagcggccgctgcgtctggacgcacaagtcatagcattatcggctaaaatttcttaatttctaaattagtcatatcggctaagaaagtggggagcactatcatttcgtagaacaagaacaaggtatcatatatatatatatatataatatttaaactttgttaagtggaatcaaagtgctagtattaatggagtttcatgtgcattaaattttatgtcacatcagcaattttgttgacttggcaaggtcatttagggtgtgtttggaagacaggggctattaggagtattaaacatagtctaattacaaaactaattgcacaaccgctaagctgaatcgcgagatggatctattaagcttaattagtccatgatttgacaatgtggtgctacaataaccatttgctaatgatggattacttaggtttaatagattcgtctcgtgatttagcctatgggttctgctattaattttgtaattagctcatatttagttcttataattagtatccgaacatccaatgtgacatgctaaagtttaaccctggtatccaaatgaagtcttatgagagtttcatcactccggtggtatatgtacttaggctccgttttcttccaccgacttatttttagcacccgtcacattgaatgtttagatactaattagaagtattaaacgtagactatttacaaaatccattacataagacgaatctaaacggcgagacgaatctattaaacctaattagtccatgatttgacaatgtgttgctacagtaaacatttgctaatgatggattaattaggcttaatagattcgtctcgccgtttagcctccacttatgtaatgggttttctaaacaatctacgtttaatactcctaattagtatctaaatattcaatgtgacacgtgctaaaaataagtcagtggaaggaagagaacgtccccttagttttccatcttattaattgtacgatgaaactgtgcagccagatgattgacaatcgcaatacttcaactagtgggccatgcacatcagcgacgtgtaacgtcgtgagttgctgttcccgtagagaaatatcaactggtgggccacgcacatcagcgtcgtgtaacgtggacggaggagccccgtgacggcgtcgacatcgaacggccaccaaccacggaaccacccgtccccacctctcggaagctccgctccacggcgtcgacatctaacggctaccagcaggcgtacgggttggagtggactccttgcctctttgcgctggcggcttccggaaattgcgtggcggagacgaggcgggctcgtctcacacggcacggaagacgtcacgggttccttccccacctctcctcttccccaccgccataaatagccgaccccctcgcctttctccccaatctcatctcgtctcgtgttgttcggagcacaccacccgccccaaatcgttcttcccgcaagcctcggcgatccttcacccgcttcaaggtacggcgatcgtcttcctcctctagatcggcgtgatctgcaagtagttgatttggtagatggttaggatctgtgcactgaagaaatcatgttagatccgcgatgtttctgttcgtagatggctgggaggtggaatttttgtgtagatctgatatgttctcctgtttatcttgtcacgctcctgcgatttgtggggattttaggtcgttgatctgggaatcgtggggttgcttctaggctgttcgtagatgaggtcgttctcacggtttactggatcattgcctagtagatcagctcgggctttcgtctttgtatatggtgcccatacttgcatctatgatctggttccgtggtgttacctaggtttctgcgcctgattcgtccgatcgattttgttagcatgtggtaaacgtttggtcatggtctgatttagattagagtcgaataggatgatctcgatctagctcttgggattaatatgcatgtgtcaccaatctgttccgtggttaagatgatgaatctatgtttagttaatgggtgtagatatatatgctgctgttcctcaatgatgccgtagcttttacctgagcagcatggttcctcctgttacttaggtagatgcacatgcttatagatcaagatatgtactgctactgttggaattgtttagtatacctgatgatcatccatgctcttgttacttgttttggtatacttggatgatggcatgctgctgctttttgttgatttgagcccatccatatctgcatatgtcacatgattaagatgattacgctgtttctgtatgatgccatagcttttatgtgagcaacatgcatcctcctggttatatgcattaatagatggaagatatctattgctacaatttgatgattattttgtacatacgatgatcaagcatgctcttcatactttgttgatatacttggataatgaaatgctgctgcacgttcattctatagcactaatgatgtgatgaacacgcacgacctgtttgtggcatctgtttgaatgtgttgttgctgttcactagagactgttttattaacctactgctagatacttacccttctgtctgtttattcttttgcagggatccatggccactgtgaacaactggctcgctttctccctctccccgcaggagctgccgccctcccagacgacggactccacactcatctcggccgccaccgccgaccatgtctccggcgatgtctgcttcaacatcccccaagattggagcatgaggggatcagagctttcggcgctcgtcgcggagccgaagctggaggacttcctcggcggcatctccttctccgagcagcatcacaaggccaactgcaacatgatacccagcactagcagcacagtttgctacgcgagctcaggtgctagcaccggctaccatcaccagctgtaccaccagcccaccagctcagcgctccacttcgcggactccgtaatggtggcttcctcggccggtgtccacgacggcggtgccatgctcagcgcggccgccgctaacggtgtcgctggcgctgccagtgccaacggcggcggcatcgggctgtccatgattaagaactggctgcggagccaaccggcgcccatgcagccgagggtggcggcggctgagggcgcgcaggggctctctttgtccatgaacatggcggggacgacccaaggcgctgctggcatgccacttctcgctggagagcgcgcacgggcgcccgagagtgtatcgacgtcagcacagggtggagccgtcgtcgtcacggcgccgaaggaggatagcggtggcagcggtgttgccggcgctctagtagccgtgagcacggacacgggtggcagcggcggcgcgtcggctgacaacacggcaaggaagacggtggacacgttcgggcagcgcacgtcgatttaccgtggcgtgacaaggcatagatggactgggagatatgaggcacatctttgggataacagttgcagaagggaagggcaaactcgtaagggtcgtcaagtctatttaggtggctatgataaagaggagaaagctgctagggcttatgatcttgctgctctgaagtactggggtgccacaacaacaacaaattttccagtgagtaactacgaaaaggagctcgaggacatgaagcacatgacaaggcaggagtttgtagcgtctctgagaaggaagagcagtggtttctccagaggtgcatccatttacaggggagtgactaggcatcaccaacatggaagatggcaagcacggattggacgagttgcagggaacaaggatctttacttgggcaccttcagcacccaggaggaggcagcggaggcgtacgacatcgcggcgatcaagttccgcggcctcaacgccgtcaccaacttcgacatgagccgctacgacgtgaagagcatcctggacagcagcgccctccccatcggcagcgccgccaagcgcctcaaggaggccgaggccgcagcgtccgcgcagcaccaccacgccggcgtggtgagctacgacgtcggccgcatcgcctcgcagctcggcgacggcggagccctggcggcggcgtacggcgcgcactaccacggcgccgcctggccgaccatcgcgttccagccgggcgccgccagcacaggcctgtaccacccgtacgcgcagcagccaatgcgcggcggcgggtggtgcaagcaggagcaggaccacgcggtgatcgcggccgcgcacagcctgcaggacctccaccacctgaacctgggcgcggccggcgcgcacgactttttctcggcagggcagcaggccgccgccgctgcgatgcacggcctgggtagcatcgacagtgcgtcgctcgagcacagcaccggctccaactccgtcgtctacaacggcggggtcggcgacagcaacggcgccagcgccgtcggcggcagtggcggtggctacatgatgccgatgagcgctgccggagcaaccactacatcggcaatggtgagccacgagcaggtgcatgcacgggcctacgacgaagccaagcaggctgctcagatggggtacgagagctacctggtgaacgcggagaacaatggtggcggaaggatgtctgcatgggggactgtcgtgtctgcagccgcggcggcagcagcaagcagcaacgacaacatggccgccgacgtcgggcatggcggcgcgcagctcttcagtgtctggaacgacacttaatattggtaccgtcatgggtcgtttaagctgccgatgtgcctgcgtcgtctggtgccctctctccatatggaggttgtcaaagtatctgctgttcgtgtcatgagtcgtgtcagtgttggtttaataatggaccggttgtgttgtgtgtgcgtactacccagaactatgacaaatcatgaataagtttgatgtttgaaattaaagcctgtgctcattatgttctgtctttcagttgtctcctaatatttgcctgcaggtactggctatctaccgtttcttacttaggaggtgtttgaatgcactaaaactaatagttagtggctaaaattagttaaaacatccaaacaccatagctaatagttgaactattagctatttttggaaaattagttaatagtgaggtagttatttgttagctagctaattcaactaacaatttttagccaactaacaattagtttcagtgcattcaaacacccccttaatgttaaggtggttctatctaccgtctcctaatatatggttgattgttcggtttgttgctatgctattgggttctgattgctgctagttcttgctgaatccagaagttctcgtagtatagctcagattcatattatttatttgagtgataagtgatccaggttattactatgttagctaggttttttttacaaggataaattatctgtgatcataattcttatgaaagctttatgtttcctggaggcagtggcatgcaatgcatgacagcaacttgatcacaccagctgaggtagatacggtaacaaggttcttaaatctgttcaccaaatcattggagaacacacatacacattcttgccagtcttggttagagaaatttcatgacaaaatgccaaagctgtcttgactcttcacttttggccatgagtcgtgacgcgacttattgaactagtctagggcgcggctaacaacctagcttagattgccttgtctaaacccttaggctaacgcgccactctagaaggccgatctcccgggataacttcgtatagcatacattatacgaagttatgaattccggaccgggttaccgaattcctgcccttaaggccaattgttcaagattcattcaacaattgaaacatctcccatgattaaatcagtataaggttgctatggtcttgcttgacaaagtttttttttgagggaatttcaactaaatttttgagtgaaactatcaaatactgattttaaaaaatttttataaaaggaagcgcagagataaaaggccatctatgctacaaaagtacccaaaaatgtaatcctaaagtatgaattgcattttttttttgtttggacgaaaggaaaggagtattaccacaagaatgatatcatcttcatatttagatcttttttgggtaaagcttgagattctctaaatatagagaaatcagaagaaaaaaaaaccgtgttttggtggttttgatttctagcctccacaataactttgacggcgtcgacaagtctaacggacaccaagcagcgaaccaccagcgccgagccaagcgaagcagacggccgagacgttgacaccttcggcgcggcatctctcgagagttccgctccggcgctccacctccaccgctggcggtttcttattccgttccgttccgcctcctgctctgctcctctccacaccacacggcacgaaaccgttacggcaccggcagcacccagcacgggagaggggattcctttcccaccgttccttccctttccgccccgccgctataaatagccagccccatccccagcttttttccccaatctcatctcctctctcctgttgttcggagcacacgcacaatccgatcgatccccaaatccccttcgtctctcctcgcgagcctcgtggatcccagcttcaaggtacggcgatcgatcatcccccctccttctctctaccttcttttctctagactacatcggatggcgatccatggttagggcctgctagtttcccttcctgttttgtcgatggctgcgaggcacaatagatctgatggcgttatgacggctaacttgtcatgttgttgcgatttatagtccctttaggagatcagtttaatttctcggatggttcgagatcggtggtccatggttagtaccctaagatccgcgctgttagggttcgtagatggaggcgacctgttctgattgttaacttgtcagtacctgggaaatcctgggatggttctagctcgtccgcagatgagatcgatttcatgatcctctgtatcttgtttcgttgcctaggttccgtctaatctatccgtggtatgatgtagatgttttgatcgtgctaactacgtcttgtaaagttaattgtcaggtcataatttttagcatgcctttttttttgtttggttttgtctaattgggctgtcgttctagatcagagtagaagactgttccaaactacctgctggatttattgaacttggatctgtatgtgtgtcacatatcttcataaattcatgattaagatggattgaaatatcttttatctttttggtatggatagttctatatgttggtgtggctttgttagatgtatacatgcttagatacatgaagcaacgtgctgctactgtttagtaattgctgttcatttgtctaataaacagataaggatatgtatttatgttgctgttggttttgctggtactttgttggatacaaatgcttcaatacagaaaacagcatgctgctacgatttaccatttatctaatcttatcatatgtctaatctaataaacaaacatgcttttaaattatcttcatatgcttggatgatggcatacacagcggctatgtgtggttttttaaatacccagcatcatgggcatgcatgacactgctttaatatgctttttatttgcttgagactgtttcttttgtttatactgaccctttagttcggtgactcttctgcaggtcgactttaacttagcctaggatccatggcccagtccaagcacggcctgaccaaggagatgaccatgaagtaccgcatggagggctgcgtggacggccacaagttcgtgatcaccggcgagggcatcggctaccccttcaagggcaagcaggccatcaacctgtgcgtggtggagggcggccccttgcccttcgccgaggacatcttgtccgccgccttcatgtacggcaaccgcgtgttcaccgagtacccccaggacatcgtcgactacttcaagaactcctgccccgccggctacacctgggaccgctccttcctgttcgaggacggcgccgtgtgcatctgcaacgccgacatcaccgtgagcgtggaggagaactgcatgtaccacgagtccaagttctacggcgtgaacttccccgccgacggccccgtgatgaagaagatgaccgacaactgggagccctcctgcgagaagatcatccccgtgcccaagcagggcatcttgaagggcgacgtgagcatgtacctgctgctgaaggacggtggccgcttgcgctgccagttcgacaccgtgtacaaggccaagtccgtgccccgcaagatgcccgactggcacttcatccagcacaagctgacccgcgaggaccgcagcgacgccaagaaccagaagtggcacctgaccgagcacgccatcgcctccggctccgccttgccctccggactcagatctcgatagggtaccaatggccagttaacagatccagctgctgctgttctagggttcacaagtctgcctatttgtcttccccaatggagctatggttgtctggtctggtccttggtcgtgtcccgtttcattgtgtactatttacctgtaatgtgtatccttaagtctggtttgatggtgtctgaaacgttttgctgtggtagagcagcatggaagaactataatgaataagtgatccctaatcattgtgtccaaattttgcttctgctatacccttttgtgctgtttcttatgttttgcttaaaaatttgatctgacaaacaaatttgtctaaattatgctcttgttctgactgtgtactgtacacatttgtattgctaccggtttggcacatagttttctctttgattgcagatcaaacccttctgattgcagattgcttggctatggctgatgtgctcactgttcttctttagcttgtatattgctgatggtggcttggctacggctgaaaaagttgctgctgcgccgacttggcaactgttgctccagtaatgctttgtcctctcttcctagccgccgacttggcacttggcagctgttgctcctgtaatgcgttgttatctcttatctcttgagatgtactatgattttgaggctgtttgacttgtgccagattgccagtgctgatgctatattatctcaggtttttatgctagtatatgttttactgtgtgctgcctgtgtcgagttacgtaatctattgaaccgctatgcgtgttgatgccctgttgttgcttgccagattgatgcccctgttgcttgcagcttgcaagctgtagtgaaatcctaaaattcgaaaccaaatctattctgaacttttgaagatctgtgatgtccggaagaaaagattcaaacagataaacgggactctccagaatctataaaataaatgatcgacaaacgctttgctttggtaggcttcctagttagttagcggaccgggatccgacggcgtcttcaccgccccgccgccgcccgagccggacttgtcgctgccgccgccgctgctcatcttgcgcgcttgtgtccctccctcagtccctgcgttcgcggatcgcgggcgggtgcgacccgtttggactccggccggtagccttcgtgccgacctcgctcggtccaccggtttgtcggggacccacatgtcagtgaaggtacgcgtccacgtccacagaccctactaccccagacgagtccaaatcgctgttccctcacactctcgtgtaccagcgcgcggcggaaagcacctttccaacaaccgccgacacgtcggtcccacgtcggcatgctccaccggtcagtgtttggcgtgtacggctcccggcgacgaacgagtgtggcctaagctttcctactcccatcccatctgagccacacatctctctcacgccacgcgcacaaaacagccaggctcccacgcgcatcaaccggctctccctttccgtgccactcgcccccaagccccaaaccctcgccgccgcctccgagacagccgccgccacctaggccatggccaccgccgccgccgcgtctaccgcgctcactggcgccactaccgctgcgcccaaggcgaggcgccgggcgcacctcctggccacccgccgcgccctcgccgcgcccatcaggtgctcagcggcgtcacccgccatgccgatggctcccccggccaccccgctccggccgtggggccccaccgagccccgcaagggtgctgacatcctcgtcgagtccctcgagcgctgcggcgtccgcgacgtcttcgcctaccccggcggcgcgtcgatggagatccaccaggcactcacccgctcccccgtcatcgccaaccacctcttccgccacgagcaaggggaggcctttgccgcctccggctacgcgcgctcctcgggccgcgtcggcgtctgcatcgccacctccggccccggcgccaccaacctagtctccgcgctcgccgacgcgctgctcgattccgtcccgatggtcgccatcacgggacaggtggcgcgacgcatgattggcaccgacgccttccaggagacgcccatcgtcgaggtcacgcgctccatcaccaagcacaactacctggtcctcgacgtcgacgacatcccccgcgtcgtgcaggaggctttcttcctcgcctcctctggtcgaccagggccggtgcttgtcgacatccccaaggacatccagcagcagatggcggtgcctgtctgggacaagcccatgagtctgcctgggtacattgcgcgccttcccaagccccctgcgactgagttgcttgagcaggtgctgcgtcttgttggtgaatcgcggcgccctgttctttatgtgggcggtggctgcgcagcatctggtgaggagttgcgacgctttgtggagctgactggaatcccggtcacaactactcttatgggcctcggcaacttccccagcgacgacccactgtctctgcgcatgctaggtatgcatgggacggtgtatgcaaattatgcagtggataaggccgatctgttgcttgcacttggtgtgcggtttgatgatcgcgtgacagggaagattgaggcttttgcaagcagggctaagattgtgcacgttgatattgatccggctgagattggcaagaacaagcagccacatgtgtccatctgtgcagatgttaagcttgctttgcagggcatgaatgctcttcttgaaggaagcacatcaaagaagagctttgactttggctcatggaacgatgagttggatcagcagaagagggaattcccccttgggtataaaacatctaatgaggagatccagccacaatatgctattcaggttcttgatgagctgacgaaaggcgaggccatcatcggcacaggtgttgggcagcaccagatgtgggcggcacagtactacacttacaagcggccaaggcagtggttgtcttcagctggtcttggggctatgggatttggtttgccggctgctgctggtgcttctgtggcaaacccaggtgtcactgttgttgacatcgatggagatggtagctttctcatgaacgttcaggagctagctatgatccgaattgagaacctcccagtgaaggtctttgtgctaaacaaccagcacctggggatggtggtgcagttggaggacaggttctataaggccaacagagcgcacacatacttgggaaacccagagaatgaaagtgagatatatccagatttcgtgacgatcgccaaagggttcaacattccagccgtccgtgtgacaaagaagaacgaagtccgcgcagcgataaagaagatgctcgagactccagggccgtacctcttggatataatcgtcccacaccaggagcatgtgttgcctatgatccctagtggtggggctttcaaggatatgatcctggatggtgatggcaggactgtgtactgacttcgaataggtacccggggatcctctagtgccgtgggtcgtttaagctgccgctgtacctgtgtcgtctggtgccttctggtgtacctgggaggttgtcgtctatcaagtatctgtggttggtgtcatgagtcagtgagtcccaatactgttcgtgtcctgtgtgcattatacccaaaactgttatgggcaaatcatgaataagcttgatgttcgaacttaaaagtctctgctcaatatggtattatggttgtttttgttcgtctcctaatatttgcctgggatcaaattttattggctggtgttcatttgacctccatgttcttgctaggctccattttttactctacagccataatatgtttgattgtttggtttgttctttgttgtacacctggttctgtcgagcttagttttcgacactggcttacagcttaacatgttgctattttattgggttctgattgctattttattgggttctgattgctagtttttgctgaatccaaaaaccatgttatttatttaagcgatccaggttattattatgatggtggctaagtttttttttttccaagggtaaattttctggattctccagtgtttctgtggccgaattcaatcactagagtcgacctgcaaagcttcggtccgggcctagaaggcccgcgccacttacgcttgattccgatgacttcgtaggttcctagctcaagccgctcgtgtccaagcgtcacttacgattagctaatgattacggcatctaggaccgactagctagctagctaagagctcggtaccgagctcgaattcattccgattaatcgtggcctcttgctcttcaggatgaagagctatgtttaaacgtgcaagcgctactagacaattcagtacattaaaaacgtccgcaatgtgttattaagttgtctaagcgtcaatttgtttacaccacaatatatcctgcca

SEQ ID NO: 27 - DNA, 19136 bp, synthetic construct
  misc_feature 1..19136: note = PHP93926
  source 1..19136: mol_type = other DNA
gtttacccgccaatatatcctgtcaaacactgcggccgcacttgaccgcggatggagccggagctgtggtgaggccatcgacgggaggtgggggagaacacagtctcagtgttctttgtgagtccgcaaggtttttagcttttctgtattaattaaggttgctgttggctgtagaatacggtcgtggaagagctgtatcggtagctactacgtaagctattatatactggaagtctggagctcgtcgatctccggtcgtcttcctccatttctcctcgtcttgctttgactgctgctaccatttgcttctgttttctgatgaagcatgccatgtcggccaccagtgtttgtgtggtttttgcagggaatggctttcaagtgctgtgattgaatggccctcgtcgtcctcggctgagctcacatggacgcgtcatgtgagtgagatatatgatcatatgatgagtggggttcgggtgagtgcgtacttgaagtaggatcccgctttcactcattcattcattggcctttaaaccgggaaattttcgcgaggagatggagggaagcaagcagggtgacgagtgcagagtgccgcgagcgctttgtcaaaaggcaccgccgtaggcaaaaaaatcaatggccctgactgactcgatggtagtactactgtagagactagagagggttgctccccatatcttcgtgtgacttttactccagcattgcatttccgtcattgagacgttaattaatagcagctttcgggacagatgactgtggccatgtttcgtcacggccgcttcgtgccagctgggggtactatagtactgtgattttgttagtaaaaactttcattaggccaccattgacgaccgggccttcgcttttgctgcgctaattaaccatttcccggcgaccgaagggaacatgaacatgccccgacacatgagggcatgaggactagtgttctccctgtcgttcgttgacttgactagtgatagtttaaacgctcttcaactggaagagcggttactaccggttcactagctagctgctaatcgagctagttaccctatgaggtgacatgaagcgctcacggttactatgacggttagcttcacgactgttggtggcagtagcgtacgacttagctatagttccggacttacctagctaataacttcgtatagcatacattatacgaagttatggttaccgaattcgagctcggtaccctggttcacaaactcaatacaacacacagtggagtagggtattacgctccggcggcccgaaccactctaaatccttgtgtcctcgtgtgctcttccaccattaatgactgtaattgcagggacacgaagagttgtagcgcttttgccaacaagatccgctatatgctagtagagtggaacctgcacagcaacaagcatccaataatctgagaataagaattatgtgtggtgatggttctcatctctgcaactcgccattttcgcgagagaaccaaatccaagttggtgaagatcatgatttgggctcatgggctggcatagtagctattacctttgcaattgtggttcgaatctatccgatattctccttttcagggagagctaatgcttatgcttattgggtattttggtttgacactgcttcacgcccaaaaaaaggcaactatgtctgagttggatatggcccaaaaaaaggcagctatgtctgagttggatatggaagtcttctttcgtttagggtgaagtaagaccaagctcatgagcttattatcttaggtcggaacaaattagttgataggcatggcacatttatcaaattataatgattttaacagaaaagcaacacctctttttcagcagcaccagctttgcaagctgcaattgacactccaagcatagtatttgctccaaactcagcctgcatttcgcacaatatcatatctatttccatttggataaaatatattttccagaaatatgggaacagaatcaagatacagaaaaaagttgtggtagtagtggtaagtggaaacacaagtacagtgaaaagatagcattatttctgaacagtcaaattaaccgaaataagtagtatcacatactgcccctaaattgactacacccaatgtaaagaattgcttgagcatattgagccatcagttgtttgtttgtgtaacggatttgacaatgcagagttcaggagcaaaaaaccgcaaaggagagaaagagggaaaggatctcctagtatcccaccttgtggcgcgccctgtcaagtgcatgatggcctggtcgatctgcgtctgctgctgcggttccatcccaacgagtgcctccgacaccttgtcgttgatcacccgcaccgcgtaggcgacccccctggcgaggaacttccgcctctcggaggccccggccgcgtcggcggcggcgccctcgagcgcgcccacgctagccgtagatgctcggtgcacggccttgttggtgtgcaactcgacctcaacggccggtgcgctacgcccgtcaaggatctggcgcgcccgcaccctcgtgatcacggtgggcgcctcccgcctcatgtggccgacgatgaaaagcgccgggttaggggccttggcgcgcaccgccgtattcagggcctcctcgctcttgcgcgagagcaggtgcttccccaggtactcctgcactgacaaggctgccacagcggtggaatttgtcctcacgacttcgccacgtcgtcctcacctccctggcttcccacgactccgccgtatcgaggtgctcggtgggtcgtcttaatccgaagtccgaactaggaagacgagacagagaggtctgaggaatgggcctcgtttgatgttgagctgaattatttttccagcataagcccaggtcttggtccatgaacaaaattactagaaacccagcccagtactacgatctaaaagagggactgccactggatagctctctctagcattctccacgctccaatacagcggcgtcgtgtctatccgggtctatccgcgaacacgtgagaactctccagaaactgctttctcctccacttcatctctctcgctttccctctataaaaagaccccttctaggaattgagggagacagcaagcaccaagcagcgatccgaagctcaatcaattcactcaaacctcttccccaaatcttcgattagatcttcgttgacaagaagactagaaccgaacctgacatgtccaacctgctcacggttcaccagaaccttccggctcttccagtggacgcgacgtccgatgaagtcaggaagaacctcatggacatgttccgcgacaggcaagcgttcagcgagcacacctggaagatgctgctctccgtctgccgctcctgggctgcatggtgcaagctgaacaacaggaagtggttccccgctgagcccgaggacgtgagggattaccttctgtacctgcaagcgcgaggtttgtttctgcttctacctttgatatatatataataattatcattaattagtagtaatataatatttcaaatatttttttcaaaataaaagaatgtagtatatagcaattgcttttctgtagtttataagtgtgtatattttaatttataacttttctaatatatgaccaaaacatggtgatgcctaggtctggcagtgaagaccatccagcaacaccttggacaactgaacatgcttcacaggcgctccggcctcccgcgccccagcgactcgaacgccgtgagcctcgtcatgcgccgcatcaggaaggaaaacgtcgatgccggcgaaagggcaaagcaggccctcgcgttcgagaggaccgatttcgaccaggtccgcagcctgatggagaacagcgacaggtgccaggacattaggaacctggcgttcctcggaattgcatacaacacgctcctcaggatcgcggaaattgcccgcattcgcgtgaaggacattagccgcaccgacggcggcaggatgcttatccacattggcaggaccaagacgctcgtttccaccgcaggcgtcgaaaaggccctcagcctcggagtgaccaagctcgtcgaacgctggatctccgtgtccggcgtcgcggacgacccaaacaactacctcttctgccgcgtccgcaagaacggggtggctgcccctagcgccaccagccaactcagcacgagggccttggaaggtattttcgaggccacccaccgcctgatctacggcgcgaaggatgacagcggtcaacgctacctcgcatggtccgggcactccgcccgcgttggagctgctagggacatggcccgcgccggtgtttccatccccgaaatcatgcaggcgggtggatggacgaacgtgaacattgtcatgaactacattcgcaaccttgacagcgagacgggcgcaatggttcgcctcctggaagatggtgactgaggtacccaacctagacttgtccatcttctggattggccaacttaattaatgtatgaaataaaaggatgcacacatagtgacatgctaatcactataatgtgggcatcaaagttgtgtgttatgtgtaattactagttatctgaataaaagagaaagagatcatccatatttcttatcctaaatgaatgtcacgtgtctttataattctttgatgaaccagatgcatttcattaaccaaatccatatacatataaatattaatcatatataattaatatcaattgggttagcaaaacaaatctagtctaggtgtgttttgcgatccgatcgaggccggccacactgatagtttaaactgaaggcgggaaacgacaatctgatcatgagcggagaattaagggagtcacgttatgacccccgccgatgacgcgggacaagccgttttacgtttggaactgacagaaccgcaacgattgaaggagccactcagccgcgggtttctggagtttaatgagctaagcacatacgtcagaaaccattattgcgcgttcaaaagtcgcctaaggtcactatcagctagcaaatatttcttgtcaaaaatgctccactgacgttccataaattcccctcggtatccaattagagtctcatattcactctcccggcggatctcgactctagaggatcgctcaggaaggccgctgagatagagccatggcggccaatgcgggcggcggtggagcgggaggaggcagcggcagcggcagcgtggctgcgccggcggtgtgccgccccagcggctcgcggtggacgccgacgccggagcagatcaggatgctgaaggagctctactacggctgcggcatccggtcgcccagctcggagcagatccagcgcatcaccgccatgctgcggcagcacggcaagatcgagggcaagaacgtcttctactggttccagaaccacaaggcccgcgagcgccagaagcgccgcctcaccagcctcgacgtcaacgtgcccgccgccggcgcggccgacgccaccaccagccaactcggcgtcctctcgctgtcgtcgccgccgccttcaggcgcggcgcctccctcgcccaccctcggcttctacgccgccggcaatggcggcggatcggctgtgctgctggacacgagttccgactggggcagcagcggcgctgctatggccaccgagacatgcttcctgcaggactacatgggcgtgacggacacgggcagctcgtcgcagtggccacgcttctcgtcgtcggacacgataatggcggcggccgcggcgcgggcggcgacgacgcgggcgcccgagacgctccctctcttcccgacctgcggcgacgacggcggcagcggtagcagcagctacttgccgttctggggtgccgcgtccacaactgccggcgccacttcttccgttgcgatccaacagcaacaccagctgcaggagcagtacagcttttacagcaacagcaacagcacccagctggccggcaccggcaaccaagacgtatcggcaacagcagcagcagccgccgccctggagctgagcctcagctcatggtgctccccttaccctgctgcagggagtatgtgagagcaacgcgagctgccactgctcttcactgatgtctctggaatggaaggaggaggaagtgagaacagatcattcgacaaagcagcattagtccgttgatcggtggaagaccactcgtcagtgttgagttgaatgtttgatcaataaaatacggcaatgctgtaagggttgttttttatgccattgataatacactgtactgttcagttgttgaactctatttcttagccatgccaagtgcttttcttattttgaataacattacagcaaaaagttgaaagacaaaaaaaaaaacccccgaacagagtgctttgggtcccaagcttctttagactgtgttcggcgttccccctaaatttctccccctatatctcactcacttgtcacatcagcgttctctttccccctatatctccacgctctacagcagttccacctatatcaaacctctataccccaccacaacaatattatatactttcatcttcaactaactcatgtaccttccaatttttttctactaataattatttacgtgcacagaaacttagcaaggagagagagagcgggaatttaaatgctcggcgttaggcttttagtccgctaggtggctagaccgaggttaggacgctagttcactaggggcctagtggtgttttaagacgtcacggtcacccggtccgggcctagaaggccagcttcaagtttgtacaaaaaagcaggctccggccagaatggcccggaccgaagcttgcatgcctgcagtgcagcgtgacccggtcgtgcccctctctagagataatgagcattgcatgtctaagttataaaaaattaccacatattttttttgtcacacttgtttgaagtgcagtttatctatctttatacatatatttaaactttactctacgaataatataatctatagtactacaataatatcagtgttttagagaatcatataaatgaacagttagacatggtctaaaggacaattgagtattttgacaacaggactctacagttttatctttttagtgtgcatgtgttctcctttttttttgcaaatagcttcacctatataatacttcatccattttattagtacatccatttagggtttagggttaatggtttttatagactaatttttttagtacatctattttattctattttagcctctaaattaagaaaactaaaactctattttagtttttttatttaataatttagatataaaatagaataaaataaagtgactaaaaattaaacaaataccctttaagaaattaaaaaaactaaggaaacatttttcttgtttcgagtagataatgccagcctgttaaacgccgtcgacgagtctaacggacaccaaccagcgaaccagcagcgtcgcgtcgggccaagcgaagcagacggcacggcatctctgtcgctgcctctggacccctctcgagagttccgctccaccgttggacttgctccgctgtcggcatccagaaattgcgtggcggagcggcagacgtgagccggcacggcaggcggcctcctcctcctctcacggcaccggcagctacgggggattcctttcccaccgctccttcgctttcccttcctcgcccgccgtaataaatagacaccccctccacaccctctttccccaacctcgtgttgttcggagcgcacacacacacaaccagatctcccccaaatccacccgtcggcacctccgcttcaaggtacgccgctcgtcctcccccccccccctctctaccttctctagatcggcgttccggtccatgcatggttagggcccggtagttctacttctgttcatgtttgtgttagatccgtgtttgtgttagatccgtgctgctagcgttcgtacacggatgcgacctgtacgtcagacacgttctgattgctaacttgccagtgtttctctttggggaatcctgggatggctctagccgttccgcagacgggatcgatttcatgattttttttgtttcgttgcatagggtttggtttgcccttttcctttatttcaatatatgccgtgcacttgtttgtcgggtcatcttttcatgcttttttttgtcttggttgtgatgatgtggtctggttgggcggtcgttctagatcggagtagaattctgtttcaaactacctggtggatttattaattttggatctgtatgtgtgtgccatacatattcatagttacgaattgaagatgatggatggaaatatcgatctaggataggtatacatgttgatgcgggttttactgatgcatatacagagatgctttttgttcgcttggttgtgatgatgtggtgtggttgggcggtcgttcattcgttctagatcggagtagaatactgtttcaaactacctggtgtatttattaattttggaactgtatgtgtgtgtcatacatcttcatagttacgagtttaagatggatggaaatatcgatctaggataggtatacatgttgatgtgggttttactgatgcatatacatgatggcatatgcagcatctattcatatgctctaaccttgagtacctatctattataataaacaagtatgttttataattattttgatcttgatatacttggatgatggcatatgcagcagctatatgtggatttttttagccctgccttcatacgctatttatttgcttggtactgtttcttttgtcgatgctcaccctgttgtttggtgttacttctgcaggtcgactttaacttagcctaggatccatggccactgtgaacaactggctcgctttctccctctccccgcaggagctgccgccctcccagacgacggactccacactcatctcggccgccaccgccgaccatgtctccggcgatgtctgcttcaacatcccccaagattggagcatgaggggatcagagctttcggcgctcgtcgcggagccgaagctggaggacttcctcggcggcatctccttctccgagcagcatcacaaggccaactgcaacatgatacccagcactagcagcacagtttgctacgcgagctcaggtgctagcaccggctaccatcaccagctgtaccaccagcccaccagctcagcgctccacttcgcggactccgtaatggtggcttcctcggccggtgtccacgacggcggtgccatgctcagcgcggccgccgctaacggtgtcgctggcgctgccagtgccaacggcggcggcatcgggctgtccatgattaagaactggctgcggagccaaccggcgcccatgcagccgagggtggcggcggctgagggcgcgcaggggctctctttgtccatgaacatggcggggacgacccaaggcgctgctggcatgccacttctcgctggagagcgcgcacgggcgcccgagagtgtatcgacgtcagcacagggtggagccgtcgtcgtcacggcgccgaaggaggatagcggtggcagcggtgttgccggcgctctagtagccgtgagcacggacacgggtggcagcggcggcgcgtcggctgacaacacggcaaggaagacggtggacacgttcgggcagcgcacgtcgatttaccgtggcgtgacaaggcatagatggactgggagatatgaggcacatctttgggataacagttgcagaagggaagggcaaactcgtaagggtcgtcaagtctatttaggtggctatgataaagaggagaaagctgctagggcttatgatcttgctgctctgaagtactggggtgccacaacaacaacaaattttccagtgagtaactacgaaaaggagctcgaggacatgaagcacatgacaaggcaggagtttgtagcgtctctgagaaggaagagcagtggtttctccagaggtgcatccatttacaggggagtgactaggcatcaccaacatggaagatggcaagcacggattggacgagttgcagggaacaaggatctttacttgggcaccttcagcacccaggaggaggcagcggaggcgtacgacatcgcggcgatcaagttccgcggcctcaacgccgtcaccaacttcgacatgagccgctacgacgtgaagagcatcctggacagcagcgccctccccatcggcagcgccgccaagcgcctcaaggaggccgaggccgcagcgtccgcgcagcaccaccacgccggcgtggtgagctacgacgtcggccgcatcgcctcgcagctcggcgacggcggagccctggcggcggcgtacggcgcgcactaccacggcgccgcctggccgaccatcgcgttccagccgggcgccgccagcacaggcctgtaccacccgtacgcgcagcagccaatgcgcggcggcgggtggtgcaagcaggagcaggaccacgcggtgatcgcggccgcgcacagcctgcaggacctccaccacctgaacctgggcgcggccggcgcgcacgactttttctcggcagggcagcaggccgccgccgctgcgatgcacggcctgggtagcatcgacagtgcgtcgctcgagcacagcaccggctccaactccgtcgtctacaacggcggggtcggcgacagcaacggcgccagcgccgtcggcggcagtggcggtggctacatgatgccgatgagcgctgccggagcaaccactacatcggcaatggtgagccacgagcaggtgcatgcacgggcctacgacgaagccaagcaggctgctcagatggggtacgagagctacctggtgaacgcggagaacaatggtggcggaaggatgtctgcatgggggactgtcgtgtctgcagccgcggcggcagcagcaagcagcaacgacaacatggccgccgacgtcgggcatggcggcgcgcagctcttcagtgtctggaacgacacttaagcgtacctagtggtacctgacatcttatagtctgcaacctctcgtgtctgaattcctatctttatcaagtgttattgcttccacgactataggacagctttcgtcgaaagcttttgctcatgtgatctcgaaggattcatctagtctgatttttcgtgacttgtatcggttttattggattcatccaacatatatcaataaaaaatgagttgtgtttcctttcttcctagttcagttaaaattatttccctcctgcgcttgtgctgtaattgtctgtgtacctgttgtttgtgactgtgttagttcccttggatatgatttcgtatttgatatgtacatggagatagcttagcttcattattggagtatgaagttagtatgacatagtcactctcctggaaaattgacactgcaaaccatatttttattctgaaccacaaatcctagtcagtccgctggcatatgccgtccgtttgctgaatccagaacgtgggtttggagatgtacggctgagatgcctctatgcgaaggggatttcgtggtgaaacgagatgggagtagagcaacgcccgtggaagatgcttcaaacttccacacttttgagcaacgatcggcagtagtaaggtagacgatttcaagatcaaagcatatgaagataaacaacatcaacaacaaaatttgttggggttctatagagagaaacagagctacatacatacactgttttgtatctaccatctgagatgatgaaaagatgaaaaactaaagaatgccccggcgccaacgccaggacacgccgcgcgcgcgtcacccgagccatctcttgacccagccggcgctgtatatttacacacgttgcagcatcgatcaccacctgttcgatcgcgtcgccgtcaccggcgcgccgcgacttattgaactagtctagggcgcggctaacaacctagcttagattgccttgtctaaacccttaggctaacgcgccactctagacgtgcgcacgataacttcgtatagcatacattatacgaagttataacagcggaccgggttaccgaattcctgcccttaaggccaattgttcaagattcattcaacaattgaaacatctcccatgattaaatcagtataaggttgctatggtcttgcttgacaaagtttttttttgagggaatttcaactaaatttttgagtgaaactatcaaatactgattttaaaaaatttttataaaaggaagcgcagagataaaaggccatctatgctacaaaagtacccaaaaatgtaatcctaaagtatgaattgcattttttttttgtttggacgaaaggaaaggagtattaccacaagaatgatatcatcttcatatttagatcttttttgggtaaagcttgagattctctaaatatagagaaatcagaagaaaaaaaaaccgtgttttggtggttttgatttctagcctccacaataactttgacggcgtcgacaagtctaacggacaccaagcagcgaaccaccagcgccgagccaagcgaagcagacggccgagacgttgacaccttcggcgcggcatctctcgagagttccgctccggcgctccacctccaccgctggcggtttcttattccgttccgttccgcctcctgctctgctcctctccacaccacacggcacgaaaccgttacggcaccggcagcacccagcacgggagaggggattcctttcccaccgttccttccctttccgccccgccgctataaatagccagccccatccccagcttttttccccaatctcatctcctctctcctgttgttcggagcacacgcacaatccgatcgatccccaaatccccttcgtctctcctcgcgagcctcgtggatcccagcttcaaggtacggcgatcgatcatcccccctccttctctctaccttcttttctctagactacatcggatggcgatccatggttagggcctgctagtttcccttcctgttttgtcgatggctgcgaggcacaatagatctgatggcgttatgacggctaacttgtcatgttgttgcgatttatagtccctttaggagatcagtttaatttctcggatggttcgagatcggtggtccatggttagtaccctaagatccgcgctgttagggttcgtagatggaggcgacctgttctgattgttaacttgtcagtacctgggaaatcctgggatggttctagctcgtccgcagatgagatcgatttcatgatcctctgtatcttgtttcgttgcctaggttccgtctaatctatccgtggtatgatgtagatgttttgatcgtgctaactacgtcttgtaaagttaattgtcaggtcataatttttagcatgcctttttttttgtttggttttgtctaattgggctgtcgttctagatcagagtagaagactgttccaaactacctgctggatttattgaacttggatctgtatgtgtgtcacatatcttcataaattcatgattaagatggattgaaatatcttttatctttttggtatggatagttctatatgttggtgtggctttgttagatgtatacatgcttagatacatgaagcaacgtgctgctactgtttagtaattgctgttcatttgtctaataaacagataaggatatgtatttatgttgctgttggttttgctggtactttgttggatacaaatgcttcaatacagaaaacagcatgctgctacgatttaccatttatctaatcttatcatatgtctaatctaataaacaaacatgcttttaaattatcttcatatgcttggatgatggcatacacagcggctatgtgtggttttttaaatacccagcatcatgggcatgcatgacactgctttaatatgctttttatttgcttgagactgtttcttttgtttatactgaccctttagttcggtgactcttctgcaggtcgactttaacttagcctaggatccatggcccagtccaagcacggcctgaccaaggagatgaccatgaagtaccgcatggagggctgcgtggacggccacaagttcgtgatcaccggcgagggcatcggctaccccttcaagggcaagcaggccatcaacctgtgcgtggtggagggcggccccttgcccttcgccgaggacatcttgtccgccgccttcatgtacggcaaccgcgtgttcaccgagtacccccaggacatcgtcgactacttcaagaactcctgccccgccggctacacctgggaccgctccttcctgttcgaggacggcgccgtgtgcatctgcaacgccgacatcaccgtgagcgtggaggagaactgcatgtaccacgagtccaagttctacggcgtgaacttccccgccgacggccccgtgatgaagaagatgaccgacaactgggagccctcctgcgagaagatcatccccgtgcccaagcagggcatcttgaagggcgacgtgagcatgtacctgctgctgaaggacggtggccgcttgcgctgccagttcgacaccgtgtacaaggccaagtccgtgccccgcaagatgcccgactggcacttcatccagcacaagctgacccgcgaggaccgcagcgacgccaagaaccagaagtggcacctgaccgagcacgccatcgcctccggctccgccttgccctccggactcagatctcgatagggtaccaatggccagttaacagatccagctgctgctgttctagggttcacaagtctgcctatttgtcttccccaatggagctatggttgtctggtctggtccttggtcgtgtcccgtttcattgtgtactatttacctgtaatgtgtatccttaagtctggtttgatggtgtctgaaacgttttgctgtggtagagcagcatggaagaactataatgaataagtgatccctaatcattgtgtccaaattttgcttctgctatacccttttgtgctgtttcttatgttttgcttaaaaatttgatctgacaaacaaatttgtctaaattatgctcttgttctgactgtgtactgtacacatttgtattgctaccggtttggcacatagttttctctttgattgcagatcaaacccttctgattgcagattgcttggctatggctgatgtgctcactgttcttctttagcttgtatattgctgatggtggcttggctacggctgaaaaagttgctgctgcgccgacttggcaactgttgctccagtaatgctttgtcctctcttcctagccgccgacttggcacttggcagctgttgctcctgtaatgcgttgttatctcttatctcttgagatgtactatgattttgaggctgtttgacttgtgccagattgccagtgctgatgctatattatctcaggtttttatgctagtatatgttttactgtgtgctgcctgtgtcgagttacgtaatctattgaaccgctatgcgtgttgatgccctgttgttgcttgccagattgatgcccctgttgcttgcagcttgcaagctgtagtgaaatcctaaaattcgaaaccaaatctattctgaacttttgaagatctgtgatgtccggaagaaaagattcaaacagataaacgggactctccagaatctataaaataaatgatcgacaaacgctttgctttggtaggcttcctagttagttagcggaccgggatccgacggcgtcttcaccgccccgccgccgcccgagccggacttgtcgctgccgccgccgctgctcatcttgcgcgcttgtgtccctccctcagtccctgcgttcgcggatcgcgggcgggtgcgacccgtttggactccggccggtagccttcgtgccgacctcgctcggtccaccggtttgtcggggacccacatgtcagtgaaggtacgcgtccacgtccacagaccctactaccccagacgagtccaaatcgctgttccctcacactctcgtgtaccagcgcgcggcggaaagcacctttccaacaaccgccgacacgtcggtcccacgtcggcatgctccaccggtcagtgtttggcgtgtacggctcccggcgacgaacgagtgtggcctaagctttcctactcccatcccatctgagccacacatctctctcacgccacgcgcacaaaacagccaggctcccacgcgcatcaaccggctctccctttccgtgccactcgcccccaagccccaaaccctcgccgccgcctccgagacagccgccgccacctaggccatggccaccgccgccgccgcgtctaccgcgctcactggcgccactaccgctgcgcccaaggcgaggcgccgggcgcacctcctggccacccgccgcgccctcgccgcgcccatcaggtgctcagcggcgtcacccgccatgccgatggctcccccggccaccccgctccggccgtggggccccaccgagccccgcaagggtgctgacatcctcgtcgagtccctcgagcgctgcggcgtccgcgacgtcttcgcctaccccggcggcgcgtcgatggagatccaccaggcactcacccgctcccccgtcatcgccaaccacctcttccgccacgagcaaggggaggcctttgccgcctccggctacgcgcgctcctcgggccgcgtcggcgtctgcatcgccacctccggccccggcgccaccaacctagtctccgcgctcgccgacgcgctgctcgattccgtcccgatggtcgccatcacgggacaggtggcgcgacgcatgattggcaccgacgccttccaggagacgcccatcgtcgaggtcacgcgctccatcaccaagcacaactacctggtcctcgacgtcgacgacatcccccgcgtcgtgcaggaggctttcttcctcgcctcctctggtcgaccagggccggtgcttgtcgacatccccaaggacatccagcagcagatggcggtgcctgtctgggacaagcccatgagtctgcctgggtacattgcgcgccttcccaagccccctgcgactgagttgcttgagcaggtgctgcgtcttgttggtgaatcgcggcgccctgttctttatgtgggcggtggctgcgcagcatctggtgaggagttgcgacgctttgtggagctgactggaatcccggtcacaactactcttatgggcctcggcaacttccccagcgacgacccactgtctctgcgcatgctaggtatgcatgggacggtgtatgcaaattatgcagtggataaggccgatctgttgcttgcacttggtgtgcggtttgatgatcgcgtgacagggaagattgaggcttttgcaagcagggctaagattgtgcacgttgatattgatccggctgagattggcaagaacaagcagccacatgtgtccatctgtgcagatgttaagcttgctttgcagggcatgaatgctcttcttgaaggaagcacatcaaagaagagctttgactttggctcatggaacgatgagttggatcagcagaagagggaattcccccttgggtataaaacatctaatgaggagatccagccacaatatgctattcaggttcttgatgagctgacgaaaggcgaggccatcatcggcacaggtgttgggcagcaccagatgtgggcggcacagtactacacttacaagcggccaaggcagtggttgtcttcagctggtcttggggctatgggatttggtttgccggctgctgctggtgcttctgtggcaaacccaggtgtcactgttgttgacatcgatggagatggtagctttctcatgaacgttcaggagctagctatgatccgaattgagaacctcccagtgaaggtctttgtgctaaacaaccagcacctggggatggtggtgcagttggaggacaggttctataaggccaacagagcgcacacatacttgggaaacccagagaatgaaagtgagatatatccagatttcgtgacgatcgccaaagggttcaacattccagccgtccgtgtgacaaagaagaacgaagtccgcgcagcgataaagaagatgctcgagactccagggccgtacctcttggatataatcgtcccacaccaggagcatgtgttgcctatgatccctagtggtggggctttcaaggatatgatcctggatggtgatggcaggactgtgtactgacttcgaataggtacccggggatcctctagtgccgtgggtcgtttaagctgccgctgtacctgtgtcgtctggtgccttctggtgtacctgggaggttgtcgtctatcaagtatctgtggttggtgtcatgagtcagtgagtcccaatactgttcgtgtcctgtgtgcattatacccaaaactgttatgggcaaatcatgaataagcttgatgttcgaacttaaaagtctctgctcaatatggtattatggttgtttttgttcgtctcctaatatttgcctgggatcaaattttattggctggtgttcatttgacctccatgttcttgctaggctccattttttactctacagccataatatgtttgattgtttggtttgttctttgttgtacacctggttctgtcgagcttagttttcgacactggcttacagcttaacatgttgctattttattgggttctgattgctattttattgggttctgattgctagtttttgctgaatccaaaaaccatgttatttatttaagcgatccaggttattattatgatggtggctaagtttttttttttccaagggtaaattttctggattctccagtgtttctgtggccgaattcaatcactagagtcgacctgcaaagcttcggtccgggcctagaaggcccgcgccacttacgcttgattccgatgacttcgtaggttcctagctcaagccgctcgtgtccaagcgtcacttacgattagctaatgattacggcatctaggaccgactagctagctagctaagagctcggtaccgagctcgaattcattccgattaatcgtggcctcttgctcttcaggatgaagagctatgtttaaacgtgcaagcgctactagacaattcagtacattaaaaacgtccgcaatgtgttattaagttgtctaagcgtcaatttgtttacaccacaatatatcctgcca

SEQ ID NO: 28 - DNA, 13440 bp, synthetic construct
  misc_feature 1..13440: note = PHP93932
  source 1..13440: mol_type = other DNA
gtttacccgccaatatatcctgtcaaacactgcggccgcacttgaccgcggatggagccggagctgtggtgaggccatcgacgggaggtgggggagaacacagtctcagtgttctttgtgagtccgcaaggtttttagcttttctgtattaattaaggttgctgttggctgtagaatacggtcgtggaagagctgtatcggtagctactacgtaagctattatatactggaagtctggagctcgtcgatctccggtcgtcttcctccatttctcctcgtcttgctttgactgctgctaccatttgcttctgttttctgatgaagcatgccatgtcggccaccagtgtttgtgtggtttttgcagggaatggctttcaagtgctgtgattgaatggccctcgtcgtcctcggctgagctcacatggacgcgtcatgtgagtgagatatatgatcatatgatgagtggggttcgggtgagtgcgtacttgaagtaggatcccgctttcactcattcattcattggcctttaaaccgggaaattttcgcgaggagatggagggaagcaagcagggtgacgagtgcagagtgccgcgagcgctttgtcaaaaggcaccgccgtaggcaaaaaaatcaatggccctgactgactcgatggtagtactactgtagagactagagagggttgctccccatatcttcgtgtgacttttactccagcattgcatttccgtcattgagacgttaattaatagcagctttcgggacagatgactgtggccatgtttcgtcacggccgcttcgtgccagctgggggtactatagtactgtgattttgttagtaaaaactttcattaggccaccattgacgaccgggccttcgcttttgctgcgctaattaaccatttcccggcgaccgaagggaacatgaacatgccccgacacatgagggcatgaggactagtgttctccctgtcgttcgttgacttgactagtgatagtttaaacgctcttcaactggaagagcggttactaccggttcactagctagctgctaatcgagctagttaccctatgaggtgacatgaagcgctcacggttactatgacggttagcttcacgactgttggtggcagtagcgtacgacttagctatagttccggacttacccttaagataacttcgtatagcatacattatacgaagttatgggcccacgcgtgaagagcggttaccagagctggtcacctttgtccaccaagatggaactgtcttcggccagaatggccatctggattcagcaggcctagaaggccatttatcgctatcaactttgtatagaaaagttgggccgagctcggtacggccagaatggcccggaccgggttaccaagcggccgcatcgagcagctggcttgtggggaccagacaaaaaaggaatggtgcagaattgttaggcgcacctaccaaaagcatctttgcctttattgcaaagataaagcagattcctctagtacaagtggggaacaaaataacgtggaaaagagctgtcctgacagcccactcactaatgcgtatgacgaacgcagtgacgaccacaaaactcgagcaacgagatcatgagccaatcaaagaggagtgatgtagacctaaagcaataatggagccatgacgtaagggcttacgcccatacgaaataattaaaggctgatgtgacctgtcggtctctcagaacctttactttttatgtttggcgtgtatttttaaatttccacggcaatgacgatgtgaccgtcgacccactaaaacattgctttgtcaaaagctaaaaaagatgatgcccgacagccacttgtgtgaagcatgagaagccggtccctccactaagaaaattagtgaagcatcttccagtggtccctccactcacagctcaatcagtgagcaacaggacgaaggaaatgacgtaagccatgacgtctaatcccagggcccggtgaccaatcgcggaccgaagcttgcatgcctgcaggccggctttaattcgtaacgagcagtttataccgttttgcgctgcattcaccttcgtgagtccggaccccggaagacaggaactgtagcctttttccctttgctagcatgaatatgaatagaataacacgaatttaacatcaattcagctcatattggaacaatctacgcctaaaatttagtggaacacgttttgctcattttccttgaaaagcaacagtgaagcaacatcggtaaaggttcttttggttgcctctaacggtctaacctgaggattcagttataatctggaacatgacagaaacagagcctcgcacccgttttgggaccaaaaccacatgatcgatctccaagaagattattttggacaatatttttccagccacaggcaatccgaagaccacaaatcagaggcactccaaatgcagcccatccattggaccatacagataagacccggataaggcagagcccatcgtgaccgtcaaatagatcacgtccggtctacggccgtccgatctgccacccagagatagcaccgggatttcctataagcacttttcctatttgtagcccgtgacgagcccagcgccacacaccaacctcagcacaccaaggagagtacgtggaggagcagccggatccatggcggccaatgcgggcggcggtggagcgggaggaggcagcggcagcggcagcgtggctgcgccggcggtgtgccgccccagcggctcgcggtggacgccgacgccggagcagatcaggatgctgaaggagctctactacggctgcggcatccggtcgcccagctcggagcagatccagcgcatcaccgccatgctgcggcagcacggcaagatcgagggcaagaacgtcttctactggttccagaaccacaaggcccgcgagcgccagaagcgccgcctcaccagcctcgacgtcaacgtgcccgccgccggcgcggccgacgccaccaccagccaactcggcgtcctctcgctgtcgtcgccgccgccttcaggcgcggcgcctccctcgcccaccctcggcttctacgccgccggcaatggcggcggatcggctgtgctgctggacacgagttccgactggggcagcagcggcgctgctatggccaccgagacatgcttcctgcaggactacatgggcgtgacggacacgggcagctcgtcgcagtggccacgcttctcgtcgtcggacacgataatggcggcggccgcggcgcgggcggcgacgacgcgggcgcccgagacgctccctctcttcccgacctgcggcgacgacggcggcagcggtagcagcagctacttgccgttctggggtgccgcgtccacaactgccggcgccacttcttccgttgcgatccaacagcaacaccagctgcaggagcagtacagcttttacagcaacagcaacagcacccagctggccggcaccggcaaccaagacgtatcggcaacagcagcagcagccgccgccctggagctgagcctcagctcatggtgctccccttaccctgctgcagggagtatgtgagagcaacgcgagctgccactgctcttcactgatgtctctggaatggaaggaggaggaagtgagaacagatcaattcgacaaagcagcattagtccgttgatcggtggaagaccactcgtcagtgttgagttgaatgtttgatcaataaaatacggcaatgctgtaagggttgttttttatgccattgataatacactgtactgttcagttgttgaactctatttcttagccatgccaagtgcttttcttattttgaataacattacagcaaaaagttgaaagacaaaaaaaaaaacccccgaacagagtgctttgggtcccaagcttctttagactgtgttcggcgttccccctaaatttctccccctatatctcactcacttgtcacatcagcgttctctttccccctatatctccacgctctacagcagttccacctatatcaaacctctataccccaccacaacaatattatatactttcatcttcaactaactcatgtaccttccaatttttttctactaataattatttacgtgcacagaaacttagcaaggagagagagagcgggaatttaaatgctcggcgttaggcttttagtccgctaggtggctagaccgaggttaggacgctagttcactaggggcctagtggtgttttaagggttaccgcacaaaatacataaaactagattagaaaaggaagagaatacgccaaattgcagcttaatcaattagacgatttagtcctgtttttacgaaacaattgtttaagataacatggccttatacttggagtttggcatgtcttatgctatgttgcaaacaggcccggtcttgacatttcgggggccctaagagaaaatttatatagaggtcctatacgaaaatttgagtctgttattttttcaacttttaaataatatatgaaaaataaaaaattgatgatttacataattttattcaaaatgatatgactggaaatattgttacagtattttatgagtcgtaaaattatataaattatgtaatatacatttgttttgacttttgagagagtatttttacttttaatttgtcaaactagcctaaaccttaaaatacacagtaaaccaaatctaaatacattagatcaaattttctgaaaataaagttcagcaaactaaactaggattaatcaatgtaggttattagggtcgacccttcggtaggctagaattaagcaacgcgataggcacaggtgtacaacacctttcgtccttcccacgtcaataaagtatttgtcatcaagcagacggttgcgcgacctcaaagagatgattgctagaaaataaagagacgcaacaaaagaatgaaaatatagatttatctataacttatatgcatttgatataagatagataaatgggagccctacgaaccttgaggctctgagcagtcgcatatcctgcacacccttggcgccggccctggttgcaaatatgcaattgtgtccttatccgcgactggtcacgaggctaggattgatcgaaagctgccgatgagaaatggcaagggcggcatgctgtggccttttttttacggtctgtcaggacaactgaaaagttacaaatttatagtggttgtaaacagcaacacgttaaaaagtcgattatcagtttcacagaaagaggtcgttaaaaccgccagcaagcttgtttcactatcagtctgtcgctaagacaatctctttcaccaaaaatacaatttgctttcttgccgttgcttcaagtgaaaatctgagctaaaaaagagagaggctgtctgaagaaaaatccataaccaacgcaaaatcccgggcgcccaatcagccttctccgcggagattcctagcctcagccagagctacctcatctgcgtgaggctccggtggcgccaagtgttccggcatcccggacgcaccaatggcatccgagcaacagatcttttctgcaacaacgcttcgcgtcgcggcggtgtttccctccatctgctctgctctttaaatacctccgtcgtctcctcgtctccacagcatctcaagtcttcacactcctcgccatcacataaaaccagtgcaagcagaagcagcgcatccacaaccaagcactcccatcatcatgcatgcagcaggctgtgctgtggacctgatcgagtttcaattgatccaagcaagcaagagggatgggagtccttggttgtggagggggtggaggcgccaccgcccaccggccaccgctgcggatatctaggtgttcggatgcacgtgagcgcgcactggttccagtttgtaccatgatgtaaattacttaccgtaccagggttcaatcggcaaggaagaattgttgtgttcactgtcttgggcagtctcttggtccaatatgaatcaacttacacagcatctccaaaaacttctaaaattactagctgaatgcccgtgcgttgcaacgggaatatataataccagtatactacgataacttatatacaaaatgtatgttatatcgttatgagaaaatgtttcataaccaatttatgattctggtcatacataaattttgttatttatagtctatctgtttcaccactacattgcaaccatcagattaagacccgtcgtcaagtaggaattccagaaatcaacgcacggtaactaaatcctcgcgctaagctgggtcagtctagaaggccgatctcccgggataacttcgtatagcatacattatacgaagttatgaattccggaccgggttaccgaattcctgcccttaaggccaattgttcaagattcattcaacaattgaaacatctcccatgattaaatcagtataaggttgctatggtcttgcttgacaaagtttttttttgagggaatttcaactaaatttttgagtgaaactatcaaatactgattttaaaaaatttttataaaaggaagcgcagagataaaaggccatctatgctacaaaagtacccaaaaatgtaatcctaaagtatgaattgcattttttttttgtttggacgaaaggaaaggagtattaccacaagaatgatatcatcttcatatttagatcttttttgggtaaagcttgagattctctaaatatagagaaatcagaagaaaaaaaaaccgtgttttggtggttttgatttctagcctccacaataactttgacggcgtcgacaagtctaacggacaccaagcagcgaaccaccagcgccgagccaagcgaagcagacggccgagacgttgacaccttcggcgcggcatctctcgagagttccgctccggcgctccacctccaccgctggcggtttcttattccgttccgttccgcctcctgctctgctcctctccacaccacacggcacgaaaccgttacggcaccggcagcacccagcacgggagaggggattcctttcccaccgttccttccctttccgccccgccgctataaatagccagccccatccccagcttttttccccaatctcatctcctctctcctgttgttcggagcacacgcacaatccgatcgatccccaaatccccttcgtctctcctcgcgagcctcgtggatcccagcttcaaggtacggcgatcgatcatcccccctccttctctctaccttcttttctctagactacatcggatggcgatccatggttagggcctgctagtttcccttcctgttttgtcgatggctgcgaggcacaatagatctgatggcgttatgacggctaacttgtcatgttgttgcgatttatagtccctttaggagatcagtttaatttctcggatggttcgagatcggtggtccatggttagtaccctaagatccgcgctgttagggttcgtagatggaggcgacctgttctgattgttaacttgtcagtacctgggaaatcctgggatggttctagctcgtccgcagatgagatcgatttcatgatcctctgtatcttgtttcgttgcctaggttccgtctaatctatccgtggtatgatgtagatgttttgatcgtgctaactacgtcttgtaaagttaattgtcaggtcataatttttagcatgcctttttttttgtttggttttgtctaattgggctgtcgttctagatcagagtagaagactgttccaaactacctgctggatttattgaacttggatctgtatgtgtgtcacatatcttcataaattcatgattaagatggattgaaatatcttttatctttttggtatggatagttctatatgttggtgtggctttgttagatgtatacatgcttagatacatgaagcaacgtgctgctactgtttagtaattgctgttcatttgtctaataaacagataaggatatgtatttatgttgctgttggttttgctggtactttgttggatacaaatgcttcaatacagaaaacagcatgctgctacgatttaccatttatctaatcttatcatatgtctaatctaataaacaaacatgcttttaaattatcttcatatgcttggatgatggcatacacagcggctatgtgtggttttttaaatacccagcatcatgggcatgcatgacactgctttaatatgctttttatttgcttgagactgtttcttttgtttatactgaccctttagttcggtgactcttctgcaggtcgactttaacttagcctaggatccatggcccagtccaagcacggcctgaccaaggagatgaccatgaagtaccgcatggagggctgcgtggacggccacaagttcgtgatcaccggcgagggcatcggctaccccttcaagggcaagcaggccatcaacctgtgcgtggtggagggcggccccttgcccttcgccgaggacatcttgtccgccgccttcatgtacggcaaccgcgtgttcaccgagtacccccaggacatcgtcgactacttcaagaactcctgccccgccggctacacctgggaccgctccttcctgttcgaggacggcgccgtgtgcatctgcaacgccgacatcaccgtgagcgtggaggagaactgcatgtaccacgagtccaagttctacggcgtgaacttccccgccgacggccccgtgatgaagaagatgaccgacaactgggagccctcctgcgagaagatcatccccgtgcccaagcagggcatcttgaagggcgacgtgagcatgtacctgctgctgaaggacggtggccgcttgcgctgccagttcgacaccgtgtacaaggccaagtccgtgccccgcaagatgcccgactggcacttcatccagcacaagctgacccgcgaggaccgcagcgacgccaagaaccagaagtggcacctgaccgagcacgccatcgcctccggctccgccttgccctccggactcagatctcgatagggtaccaatggccagttaacagatccagctgctgctgttctagggttcacaagtctgcctatttgtcttccccaatggagctatggttgtctggtctggtccttggtcgtgtcccgtttcattgtgtactatttacctgtaatgtgtatccttaagtctggtttgatggtgtctgaaacgttttgctgtggtagagcagcatggaagaactataatgaataagtgatccctaatcattgtgtccaaattttgcttctgctatacccttttgtgctgtttcttatgttttgcttaaaaatttgatctgacaaacaaatttgtctaaattatgctcttgttctgactgtgtactgtacacatttgtattgctaccggtttggcacatagttttctctttgattgcagatcaaacccttctgattgcagattgcttggctatggctgatgtgctcactgttcttctttagcttgtatattgctgatggtggcttggctacggctgaaaaagttgctgctgcgccgacttggcaactgttgctccagtaatgctttgtcctctcttcctagccgccgacttggcacttggcagctgttgctcctgtaatgcgttgttatctcttatctcttgagatgtactatgattttgaggctgtttgacttgtgccagattgccagtgctgatgctatattatctcaggtttttatgctagtatatgttttactgtgtgctgcctgtgtcgagttacgtaatctattgaaccgctatgcgtgttgatgccctgttgttgcttgccagattgatgcccctgttgcttgcagcttgcaagctgtagtgaaatcctaaaattcgaaaccaaatctattctgaacttttgaagatctgtgatgtccggaagaaaagattcaaacagataaacgggactctccagaatctataaaataaatgatcgacaaacgctttgctttggtaggcttcctagttagttagcggaccgggatccgacggcgtcttcaccgccccgccgccgcccgagccggacttgtcgctgccgccgccgctgctcatcttgcgcgcttgtgtccctccctcagtccctgcgttcgcggatcgcgggcgggtgcgacccgtttggactccggccggtagccttcgtgccgacctcgctcggtccaccggtttgtcggggacccacatgtcagtgaaggtacgcgtccacgtccacagaccctactaccccagacgagtccaaatcgctgttccctcacactctcgtgtaccagcgcgcggcggaaagcacctttccaacaaccgccgacacgtcggtcccacgtcggcatgctccaccggtcagtgtttggcgtgtacggctcccggcgacgaacgagtgtggcctaagctttcctactcccatcccatctgagccacacatctctctcacgccacgcgcacaaaacagccaggctcccacgcgcatcaaccggctctccctttccgtgccactcgcccccaagccccaaaccctcgccgccgcctccgagacagccgccgccacctaggccatggccaccgccgccgccgcgtctaccgcgctcactggcgccactaccgctgcgcccaaggcgaggcgccgggcgcacctcctggccacccgccgcgccctcgccgcgcccatcaggtgctcagcggcgtcacccgccatgccgatggctcccccggccaccccgctccggccgtggggccccaccgagccccgcaagggtgctgacatcctcgtcgagtccctcgagcgctgcggcgtccgcgacgtcttcgcctaccccggcggcgcgtcgatggagatccaccaggcactcacccgctcccccgtcatcgccaaccacctcttccgccacgagcaaggggaggcctttgccgcctccggctacgcgcgctcctcgggccgcgtcggcgtctgcatcgccacctccggccccggcgccaccaacctagtctccgcgctcgccgacgcgctgctcgattccgtcccgatggtcgccatcacgggacaggtggcgcgacgcatgattggcaccgacgccttccaggagacgcccatcgtcgaggtcacgcgctccatcaccaagcacaactacctggtcctcgacgtcgacgacatcccccgcgtcgtgcaggaggctttcttcctcgcctcctctggtcgaccagggccggtgcttgtcgacatccccaaggacatccagcagcagatggcggtgcctgtctgggacaagcccatgagtctgcctgggtacattgcgcgccttcccaagccccctgcgactgagttgcttgagcaggtgctgcgtcttgttggtgaatcgcggcgccctgttctttatgtgggcggtggctgcgcagcatctggtgaggagttgcgacgctttgtggagctgactggaatcccggtcacaactactcttatgggcctcggcaacttccccagcgacgacccactgtctctgcgcatgctaggtatgcatgggacggtgtatgcaaattatgcagtggataaggccgatctgttgcttgcacttggtgtgcggtttgatgatcgcgtgacagggaagattgaggcttttgcaagcagggctaagattgtgcacgttgatattgatccggctgagattggcaagaacaagcagccacatgtgtccatctgtgcagatgttaagcttgctttgcagggcatgaatgctcttcttgaaggaagcacatcaaagaagagctttgactttggctcatggaacgatgagttggatcagcagaagagggaattcccccttgggtataaaacatctaatgaggagatccagccacaatatgctattcaggttcttgatgagctgacgaaaggcgaggccatcatcggcacaggtgttgggcagcaccagatgtgggcggcacagtactacacttacaagcggccaaggcagtggttgtcttcagctggtcttggggctatgggatttggtttgccggctgctgctggtgcttctgtggcaaacccaggtgtcactgttgttgacatcgatggagatggtagctttctcatgaacgttcaggagctagctatgatccgaattgagaacctcccagtgaaggtctttgtgctaaacaaccagcacctggggatggtggtgcagttggaggacaggttctataaggccaacagagcgcacacatacttgggaaacccagagaatgaaagtgagatatatccagatttcgtgacgatcgccaaagggttcaacattccagccgtccgtgtgacaaagaagaacgaagtccgcgcagcgataaagaagatgctcgagactccagggccgtacctcttggatataatcgtcccacaccaggagcatgtgttgcctatgatccctagtggtggggctttcaaggatatgatcctggatggtgatggcaggactgtgtactgacttcgaataggtacccggggatcctctagtgccgtgggtcgtttaagctgccgctgtacctgtgtcgtctggtgccttctggtgtacctgggaggttgtcgtctatcaagtatctgtggttggtgtcatgagtcagtgagtcccaatactgttcgtgtcctgtgtgcattatacccaaaactgttatgggcaaatcatgaataagcttgatgttcgaacttaaaagtctctgctcaatatggtattatggttgtttttgttcgtctcctaatatttgcctgggatcaaattttattggctggtgttcatttgacctccatgttcttgctaggctccattttttactctacagccataatatgtttgattgtttggtttgttctttgttgtacacctggttctgtcgagcttagttttcgacactggcttacagcttaacatgttgctattttattgggttctgattgctattttattgggttctgattgctagtttttgctgaatccaaaaaccatgttatttatttaagcgatccaggttattattatgatggtggctaagtttttttttttccaagggtaaattttctggattctccagtgtttctgtggccgaattcaatcactagagtcgacctgcaaagcttcggtccgggcctagaaggcccgcgccacttacgcttgattccgatgacttcgtaggttcctagctcaagccgctcgtgtccaagcgtcacttacgattagctaatgattacggcatctaggaccgactagctagctagctaagagctcggtaccgagctcgaattcattccgattaatcgtggcctcttgctcttcaggatgaagagctatgtttaaacgtgcaagcgctactagacaattcagtacattaaaaacgtccgcaatgtgttattaagttgtctaagcgtcaatttgtttacaccacaatatatcctgcca

SEQ ID NO: 29 - DNA, 15992 bp, synthetic construct
  misc_feature 1..15992: note = PHP93933
  source 1..15992: mol_type = other DNA
gtttacccgccaatatatcctgtcaaacactgatagttttaaactgaaggcgggaaacgacaatctgatcatgagcggagaattaagggagtcacgttatgacccccgccgatgacgcgggacaagccgttttacgtttggaactgacagaaccgcaacgttgaaggagccactcagcaagctggtacgattgtaatacgactcactatagggcgaattgagcgctgtttaaacgctcttcaactggaagagcggttacgctgtttaaacgctcttcaactggaagagcggttactaccggttcactagctagctgctaatcgagctagttaccctatgaggtgacatgaagcgctcacggttactatgacggttagcttcacgactgttggtggcagtagcgtacgacttagctatagttccggacttacccttaagcgatttaaatcctgaggcctgcaacactgatagtttaaactgaaggcgggaaacgacaatctgatcatgagcggagaattaagggagtcacgttatgacccccgccgatgacgcgggacaagccgttttacgtttggaactgacagaaccgcaacgattgaaggagccactcagccgcgggtttctggagtttaatgagctaagcacatacgtcagaaaccattattgcgcgttcaaaagtcgcctaaggtcactatcagctagcaaatatttcttgtcaaaaatgctccactgacgttccataaattcccctcggtatccaattagagtctcatattcactcccatggcggccaatgcgggcggcggtggagcgggaggaggcagcggcagcggcagcgtggctgcgccggcggtgtgccgccccagcggctcgcggtggacgccgacgccggagcagatcaggatgctgaaggagctctactacggctgcggcatccggtcgcccagctcggagcagatccagcgcatcaccgccatgctgcggcagcacggcaagatcgagggcaagaacgtcttctactggttccagaaccacaaggcccgcgagcgccagaagcgccgcctcaccagcctcgacgtcaacgtgcccgccgccggcgcggccgacgccaccaccagccaactcggcgtcctctcgctgtcgtcgccgccgccttcaggcgcggcgcctccctcgcccaccctcggcttctacgccgccggcaatggcggcggatcggctgtgctgctggacacgagttccgactggggcagcagcggcgctgctatggccaccgagacatgcttcctgcaggactacatgggcgtgacggacacgggcagctcgtcgcagtggccacgcttctcgtcgtcggacacgataatggcggcggccgcggcgcgggcggcgacgacgcgggcgcccgagacgctccctctcttcccgacctgcggcgacgacggcggcagcggtagcagcagctacttgccgttctggggtgccgcgtccacaactgccggcgccacttcttccgttgcgatccaacagcaacaccagctgcaggagcagtacagcttttacagcaacagcaacagcacccagctggccggcaccggcaaccaagacgtatcggcaacagcagcagcagccgccgccctggagctgagcctcagctcatggtgctccccttaccctgctgcagggagtatgtgagagcaacgcgagctgccactgctcttcactgatgtctctggaatggaaggaggaggaagtgagaacagatcattcgacaaagcagcattagtccgttgatcggtggaagaccactcgtcagtgttgagttgaatgtttgatcaataaaatacggcaatgctgtaagggttgttttttatgccattgataatacactgtactgttcagttgttgaactctatttcttagccatgccaagtgcttttcttattttgaataacattacagcaaaaagttgaaagacaaaaaaaaaaacccccgaacagagtgctttgggtcccaagcttctttagactgtgttcggcgttccccctaaatttctccccctatatctcactcacttgtcacatcagcgttctctttccccctatatctccacgctctacagcagttccacctatatcaaacctctataccccaccacaacaatattatatactttcatcttcaactaactcatgtaccttccaatttttttctactaataattatttacgtgcacagaaacttagcaaggagagagagagcgggaatttaaatgctcggcgttaggcttttagtccgctaggtggctagaccgaggttaggacgctagttcactaggggcctagtggtgttttaagacgtcacggtcaccgcggccgcatcgagcagctggcttgtggggaccagacaaaaaaggaatggtgcagaattgttaggcgcacctaccaaaagcatctttgcctttattgcaaagataaagcagattcctctagtacaagtggggaacaaaataacgtggaaaagagctgtcctgacagcccactcactaatgcgtatgacgaacgcagtgacgaccacaaaactcgagcaacgagatcatgagccaatcaaagaggagtgatgtagacctaaagcaataatggagccatgacgtaagggcttacgcccatacgaaataattaaaggctgatgtgacctgtcggtctctcagaacctttactttttatgtttggcgtgtatttttaaatttccacggcaatgacgatgtgaccgtcgacccactaaaacattgctttgtcaaaagctaaaaaagatgatgcccgacagccacttgtgtgaagcatgagaagccggtccctccactaagaaaattagtgaagcatcttccagtggtccctccactcacagctcaatcagtgagcaacaggacgaaggaaatgacgtaagccatgacgtctaatcccattcgaaacgcgtggaccgaagcttgcatgcctgcagtgcagcgtgacccggtcgtgcccctctctagagataatgagcattgcatgtctaagttataaaaaattaccacatattttttttgtcacacttgtttgaagtgcagtttatctatctttatacatatatttaaactttactctacgaataatataatctatagtactacaataatatcagtgttttagagaatcatataaatgaacagttagacatggtctaaaggacaattgagtattttgacaacaggactctacagttttatctttttagtgtgcatgtgttctcctttttttttgcaaatagcttcacctatataatacttcatccattttattagtacatccatttagggtttagggttaatggtttttatagactaatttttttagtacatctattttattctattttagcctctaaattaagaaaactaaaactctattttagtttttttatttaataatttagatataaaatagaataaaataaagtgactaaaaattaaacaaataccctttaagaaattaaaaaaactaaggaaacatttttcttgtttcgagtagataatgccagcctgttaaacgccgtcgacgagtctaacggacaccaaccagcgaaccagcagcgtcgcgtcgggccaagcgaagcagacggcacggcatctctgtcgctgcctctggacccctctcgagagttccgctccaccgttggacttgctccgctgtcggcatccagaaattgcgtggcggagcggcagacgtgagccggcacggcaggcggcctcctcctcctctcacggcaccggcagctacgggggattcctttcccaccgctccttcgctttcccttcctcgcccgccgtaataaatagacaccccctccacaccctctttccccaacctcgtgttgttcggagcgcacacacacacaaccagatctcccccaaatccacccgtcggcacctccgcttcaaggtacgccgctcgtcctcccccccccccctctctaccttctctagatcggcgttccggtccatgcatggttagggcccggtagttctacttctgttcatgtttgtgttagatccgtgtttgtgttagatccgtgctgctagcgttcgtacacggatgcgacctgtacgtcagacacgttctgattgctaacttgccagtgtttctctttggggaatcctgggatggctctagccgttccgcagacgggatcgatttcatgattttttttgtttcgttgcatagggtttggtttgcccttttcctttatttcaatatatgccgtgcacttgtttgtcgggtcatcttttcatgcttttttttgtcttggttgtgatgatgtggtctggttgggcggtcgttctagatcggagtagaattctgtttcaaactacctggtggatttattaattttggatctgtatgtgtgtgccatacatattcatagttacgaattgaagatgatggatggaaatatcgatctaggataggtatacatgttgatgcgggttttactgatgcatatacagagatgctttttgttcgcttggttgtgatgatgtggtgtggttgggcggtcgttcattcgttctagatcggagtagaatactgtttcaaactacctggtgtatttattaattttggaactgtatgtgtgtgtcatacatcttcatagttacgagtttaagatggatggaaatatcgatctaggataggtatacatgttgatgtgggttttactgatgcatatacatgatggcatatgcagcatctattcatatgctctaaccttgagtacctatctattataataaacaagtatgttttataattattttgatcttgatatacttggatgatggcatatgcagcagctatatgtggatttttttagccctgccttcatacgctatttatttgcttggtactgtttcttttgtcgatgctcaccctgttgtttggtgttacttctgcaggtcgactttaacttagcctaggatccatggccactgtgaacaactggctcgctttctccctctccccgcaggagctgccgccctcccagacgacggactccacactcatctcggccgccaccgccgaccatgtctccggcgatgtctgcttcaacatcccccaagattggagcatgaggggatcagagctttcggcgctcgtcgcggagccgaagctggaggacttcctcggcggcatctccttctccgagcagcatcacaaggccaactgcaacatgatacccagcactagcagcacagtttgctacgcgagctcaggtgctagcaccggctaccatcaccagctgtaccaccagcccaccagctcagcgctccacttcgcggactccgtaatggtggcttcctcggccggtgtccacgacggcggtgccatgctcagcgcggccgccgctaacggtgtcgctggcgctgccagtgccaacggcggcggcatcgggctgtccatgattaagaactggctgcggagccaaccggcgcccatgcagccgagggtggcggcggctgagggcgcgcaggggctctctttgtccatgaacatggcggggacgacccaaggcgctgctggcatgccacttctcgctggagagcgcgcacgggcgcccgagagtgtatcgacgtcagcacagggtggagccgtcgtcgtcacggcgccgaaggaggatagcggtggcagcggtgttgccggcgctctagtagccgtgagcacggacacgggtggcagcggcggcgcgtcggctgacaacacggcaaggaagacggtggacacgttcgggcagcgcacgtcgatttaccgtggcgtgacaaggcatagatggactgggagatatgaggcacatctttgggataacagttgcagaagggaagggcaaactcgtaagggtcgtcaagtctatttaggtggctatgataaagaggagaaagctgctagggcttatgatcttgctgctctgaagtactggggtgccacaacaacaacaaattttccagtgagtaactacgaaaaggagctcgaggacatgaagcacatgacaaggcaggagtttgtagcgtctctgagaaggaagagcagtggtttctccagaggtgcatccatttacaggggagtgactaggcatcaccaacatggaagatggcaagcacggattggacgagttgcagggaacaaggatctttacttgggcaccttcagcacccaggaggaggcagcggaggcgtacgacatcgcggcgatcaagttccgcggcctcaacgccgtcaccaacttcgacatgagccgctacgacgtgaagagcatcctggacagcagcgccctccccatcggcagcgccgccaagcgcctcaaggaggccgaggccgcagcgtccgcgcagcaccaccacgccggcgtggtgagctacgacgtcggccgcatcgcctcgcagctcggcgacggcggagccctggcggcggcgtacggcgcgcactaccacggcgccgcctggccgaccatcgcgttccagccgggcgccgccagcacaggcctgtaccacccgtacgcgcagcagccaatgcgcggcggcgggtggtgcaagcaggagcaggaccacgcggtgatcgcggccgcgcacagcctgcaggacctccaccacctgaacctgggcgcggccggcgcgcacgactttttctcggcagggcagcaggccgccgccgctgcgatgcacggcctgggtagcatcgacagtgcgtcgctcgagcacagcaccggctccaactccgtcgtctacaacggcggggtcggcgacagcaacggcgccagcgccgtcggcggcagtggcggtggctacatgatgccgatgagcgctgccggagcaaccactacatcggcaatggtgagccacgagcaggtgcatgcacgggcctacgacgaagccaagcaggctgctcagatggggtacgagagctacctggtgaacgcggagaacaatggtggcggaaggatgtctgcatgggggactgtcgtgtctgcagccgcggcggcagcagcaagcagcaacgacaacatggccgccgacgtcgggcatggcggcgcgcagctcttcagtgtctggaacgacacttaagcgtacctagtggtacctgacatcttatagtctgcaacctctcgtgtctgaattcctatctttatcaagtgttattgcttccacgactataggacagctttcgtcgaaagcttttgctcatgtgatctcgaaggattcatctagtctgatttttcgtgacttgtatcggttttattggattcatccaacatatatcaataaaaaatgagttgtgtttcctttcttcctagttcagttaaaattatttccctcctgcgcttgtgctgtaattgtctgtgtacctgttgtttgtgactgtgttagttcccttggatatgatttcgtatttgatatgtacatggagatagcttagcttcattattggagtatgaagttagtatgacatagtcactctcctggaaaattgacactgcaaaccatatttttattctgaaccacaaatcctagtcagtccgctggcatatgccgtccgtttgctgaatccagaacgtgggtttggagatgtacggctgagatgcctctatgcgaaggggatttcgtggtgaaacgagatgggagtagagcaacgcccgtggaagatgcttcaaacttccacacttttgagcaacgatcggcagtagtaaggtagacgatttcaagatcaaagcatatgaagataaacaacatcaacaacaaaatttgttggggttctatagagagaaacagagctacatacatacactgttttgtatctaccatctgagatgatgaaaagatgaaaaactaaagaatgccccggcgccaacgccaggacacgccgcgcgcgcgtcacccgagccatctcttgacccagccggcgctgtatatttacacacgttgcagcatcgatcaccacctgttcgatcgcgtcgccgtcaccggcgcgccgcgacttattgaactagtctagggcgcggctaacaacctagcttagattgccttgtctaaacccttaggctaacgcgccactctagaaggccgatctccccgggtgatcagctgcccttaaggccaattgttcaagattcattcaacaattgaaacatctcccatgattaaatcagtataaggttgctatggtcttgcttgacaaagtttttttttgagggaatttcaactaaatttttgagtgaaactatcaaatactgattttaaaaaatttttataaaaggaagcgcagagataaaaggccatctatgctacaaaagtacccaaaaatgtaatcctaaagtatgaattgcattttttttttgtttggacgaaaggaaaggagtattaccacaagaatgatatcatcttcatatttagatcttttttgggtaaagcttgagattctctaaatatagagaaatcagaagaaaaaaaaaccgtgttttggtggttttgatttctagcctccacaataactttgacggcgtcgacaagtctaacggacaccaagcagcgaaccaccagcgccgagccaagcgaagcagacggccgagacgttgacaccttcggcgcggcatctctcgagagttccgctccggcgctccacctccaccgctggcggtttcttattccgttccgttccgcctcctgctctgctcctctccacaccacacggcacgaaaccgttacggcaccggcagcacccagcacgggagaggggattcctttcccaccgttccttccctttccgccccgccgctataaatagccagccccatccccagcttttttccccaatctcatctcctctctcctgttgttcggagcacacgcacaatccgatcgatccccaaatccccttcgtctctcctcgcgagcctcgtggatcccagcttcaaggtacggcgatcgatcatcccccctccttctctctaccttcttttctctagactacatcggatggcgatccatggttagggcctgctagtttcccttcctgttttgtcgatggctgcgaggcacaatagatctgatggcgttatgacggctaacttgtcatgttgttgcgatttatagtccctttaggagatcagtttaatttctcggatggttcgagatcggtggtccatggttagtaccctaagatccgcgctgttagggttcgtagatggaggcgacctgttctgattgttaacttgtcagtacctgggaaatcctgggatggttctagctcgtccgcagatgagatcgatttcatgatcctctgtatcttgtttcgttgcctaggttccgtctaatctatccgtggtatgatgtagatgttttgatcgtgctaactacgtcttgtaaagttaattgtcaggtcataatttttagcatgcctttttttttgtttggttttgtctaattgggctgtcgttctagatcagagtagaagactgttccaaactacctgctggatttattgaacttggatctgtatgtgtgtcacatatcttcataaattcatgattaagatggattgaaatatcttttatctttttggtatggatagttctatatgttggtgtggctttgttagatgtatacatgcttagatacatgaagcaacgtgctgctactgtttagtaattgctgttcatttgtctaataaacagataaggatatgtatttatgttgctgttggttttgctggtactttgttggatacaaatgcttcaatacagaaaacagcatgctgctacgatttaccatttatctaatcttatcatatgtctaatctaataaacaaacatgcttttaaattatcttcatatgcttggatgatggcatacacagcggctatgtgtggttttttaaatacccagcatcatgggcatgcatgacactgctttaatatgctttttatttgcttgagactgtttcttttgtttatactgaccctttagttcggtgactcttctgcaggtcgactttaacttagcctaggatccatggcccagtccaagcacggcctgaccaaggagatgaccatgaagtaccgcatggagggctgcgtggacggccacaagttcgtgatcaccggcgagggcatcggctaccccttcaagggcaagcaggccatcaacctgtgcgtggtggagggcggccccttgcccttcgccgaggacatcttgtccgccgccttcatgtacggcaaccgcgtgttcaccgagtacccccaggacatcgtcgactacttcaagaactcctgccccgccggctacacctgggaccgctccttcctgttcgaggacggcgccgtgtgcatctgcaacgccgacatcaccgtgagcgtggaggagaactgcatgtaccacgagtccaagttctacggcgtgaacttccccgccgacggccccgtgatgaagaagatgaccgacaactgggagccctcctgcgagaagatcatccccgtgcccaagcagggcatcttgaagggcgacgtgagcatgtacctgctgctgaaggacggtggccgcttgcgctgccagttcgacaccgtgtacaaggccaagtccgtgccccgcaagatgcccgactggcacttcatccagcacaagctgacccgcgaggaccgcagcgacgccaagaaccagaagtggcacctgaccgagcacgccatcgcctccggctccgccttgccctccggactcagatctcgatagggtaccaatggccagttaacagatccagctgctgctgttctagggttcacaagtctgcctatttgtcttccccaatggagctatggttgtctggtctggtccttggtcgtgtcccgtttcattgtgtactatttacctgtaatgtgtatccttaagtctggtttgatggtgtctgaaacgttttgctgtggtagagcagcatggaagaactataatgaataagtgatccctaatcattgtgtccaaattttgcttctgctatacccttttgtgctgtttcttatgttttgcttaaaaatttgatctgacaaacaaatttgtctaaattatgctcttgttctgactgtgtactgtacacatttgtattgctaccggtttggcacatagttttctctttgattgcagatcaaacccttctgattgcagattgcttggctatggctgatgtgctcactgttcttctttagcttgtatattgctgatggtggcttggctacggctgaaaaagttgctgctgcgccgacttggcaactgttgctccagtaatgctttgtcctctcttcctagccgccgacttggcacttggcagctgttgctcctgtaatgcgttgttatctcttatctcttgagatgtactatgattttgaggctgtttgacttgtgccagattgccagtgctgatgctatattatctcaggtttttatgctagtatatgttttactgtgtgctgcctgtgtcgagttacgtaatctattgaaccgctatgcgtgttgatgccctgttgttgcttgccagattgatgcccctgttgcttgcagcttgcaagctgtagtgaaatcctaaaattcgaaaccaaatctattctgaacttttgaagatctgtgatgtccggaagaaaagattcaaacagataaacgggactctccagaatctataaaataaatgatcgacaaacgctttgctttggtaggcttcctagttagttagcggaccgaagcttcggtccgggcctagaaggccagcttcggccgcccctcggtaccctgggatctgcccttactttaacgcctctaaccaacacccctttatctttataaggaacaataaacagaatttgccccactgttctaaatcacctaataatatccccagctaaaaacaataaaggtttcctagaattaagacaagcatgactgttcctccaggagggtttggaacattgttgcagtcttgcagatacgggcgaagggtgagaaacagagcggagggctggaggtgacctcggtagtcgacgccggagttgagcttgacaacgacggggcggcccctgatggacttgaggaagtccgatggcgtcttcaccgtcccgccggcgcccgaggcgggcctgtcgctgccgccgccgccgctgctcatcttgcgcgctgtgcccccggcggtgtccctgtgttgcggatcgcgggtgggccaggtggatgcgagggcgacccgtttggactccggccggagccgccggatccctggtcggtgtcagtgccgtttactctgggccccacgtgtcagtaccgtctgtagatgacaacaacccgtcgtccacagtcatgtccaaaatatcctttcttcttttttttcgattcggatatctatcttccttttttttttccaaaaatcttcttgacgcaccagcgcgcacgtttgtggtaaacgccgacacgtcggtcccacgtcgatagaccccacccaccagtgagtagcgtgtacgtattcgggggtgacggacgtgtcgccgtcgtcttgctagtcccattcccatctgagccacacatctctgaacaaaaaaaaggagggaggcctccacgcacatccccctccgtgccacccgccccaaaccctcgcgccgcctccgagacagccgccgcaaccatggccaccgccgccgccgcgtctaccgcgctcactggcgccactaccgctgcgcccaaggcgaggcgccgggcgcacctcctggccacccgccgcgccctcgccgcgcccatcaggtgctcagcggcgtcacccgccatgccgatggctcccccggccaccccgctccggccgtggggccccaccgagccccgcaagggtgctgacatcctcgtcgagtccctcgagcgctgcggcgtccgcgacgtcttcgcctaccccggcggcgcgtccatggagatccaccaggcactcacccgctcccccgtcatcgccaaccacctcttccgccacgagcaaggggaggcctttgccgcctccggctacgcgcgctcctcgggccgcgtcggcgtctgcatcgccacctccggccccggcgccaccaacctagtctccgcgctcgccgacgcgctgctcgattccgtccccatggtcgccatcacgggacaggtggcgcgacgcatgattggcaccgacgccttccaggagacgcccatcgtcgaggtcacccgctccatcaccaagcacaactacctggtcctcgacgtcgacgacatcccccgcgtcgtgcaggaggctttcttcctcgcctcctctggtcgaccagggccggtgcttgtcgacatccccaaggacatccagcagcagatggcggtgcctgtctgggacaagcccatgagtctgcctgggtacattgcgcgccttcccaagccccctgcgactgagttgcttgagcaggtgctgcgtcttgttggtgaatcgcggcgccctgttctttatgtgggcggtggctgcgcagcatctggtgaggagttgcgacgctttgtggagctgactggaatcccggtcacaactactcttatgggcctcggcaacttccccagcgacgacccactgtctctgcgcatgctaggtatgcatgggacggtgtatgcaaattatgcagtggataaggccgatctgttgcttgcacttggtgtgcggtttgatgatcgcgtgacagggaagattgaggcttttgcaagcagggctaagattgtgcacgttgatattgatccggctgagattggcaagaacaagcagccacatgtgtccatctgtgcagatgttaagcttgctttgcagggcatgaatgctcttcttgaaggaagcacatcaaagaagagctttgactttggctcatggaacgatgagttggatcagcagaagagggaattcccccttgggtataaaacatctaatgaggagatccagccacaatatgctattcaggttcttgatgagctgacgaaaggcgaggccatcatcggcacaggtgttgggcagcaccagatgtgggcggcacagtactacacttacaagcggccaaggcagtggttgtcttcagctggtcttggggctatgggatttggtttgccggctgctgctggtgcttctgtggcaaacccaggtgtcactgttgttgacatcgatggagatggtagctttctcatgaacgttcaggagctagctatgatccgaattgagaacctcccagtgaaggtctttgtgctaaacaaccagcacctggggatggtggtgcagttggaggacaggttctataaggccaacagagcgcacacatacttgggaaacccagagaatgaaagtgagatatatccagatttcgtgacgatcgccaaagggttcaacattccagcggtccgtgtgacaaagaagaacgaagtccgcgcagcgataaagaagatgctcgagactccagggccgtacctcttggatataatcgtcccacaccaggagcatgtgttgcctatgatccctagtggtggggctttcaaggatatgatcctggatggtgatggcaggactgtgtactgactagctagtcagttaacagatctgccagatcctcggtgtacaaataacccgtcttatcctatgagacgggccggcgtcagtgtgttctggaggaatttttatgtcagagcctttttctttgtgtgcttgatgtagatgccaagggaagcttattggctgttgaagcttgatgcaaaataaattatggaactctgttttttgtttatctaataataactagcaaatatgcttccattgcattgaaactaacagccttttgtgtttccaagttttattttgtgacaatgtcatctatttcaattagttgtggaatcggaaacttgcaggactaacttggaaactccaatccctcagcatcctggactttttcctggtgtaatccatgtagatattattttaatcatcattttagttctggaggtttttccatctccggttttgctcccctttcttcaaaaaaaaaaaaaaaatgccgtaggcgccgcaacgcccacctgttgttcaaactcatgggcacgagtggctcgaagattttatacaacaattgctgtagtttcaccgttgctggtgaagaagcatttttttaaaaaaatatagtggtattcattttaattagtttagttgtgcagcgagcaaaatttggacatgctctgctcggaatctgatcgacctagacacagattagcagcagtagctttgtcatctgttccaagagttgcgatctgatagaagaaaaaaaaaccttcccttcaatgtaaaaccgaaactaacaagaaagaagcacagtgccgtttaggcaagtatggagtacgtattaagcatgtagaaggccatgcatgaaccactaacaagaaagaagcgcagtgccattcaggcaagcataagcatgtagattggcatgcatgaacaactaacagtagatcgtctctggtctgattagaagttttttgggaagccaagaaatcatgtacaactggttccatctcaaattccgtggcaaaaagaggcctaagcaacataaagcttgctcgagccagggtgcttcctgagctgattccgatgacttcgtaggttcctagctcaagccgctcgtgtccaagcgtcacttacgattagctaatgattacggcatctaggaccgactagctaactaactagtacgccgactagctagctaaggtaccgagctcgaattcattccgattaatcgtggcctcttgctcttcaggatgaagagctatgtttaaacgtgcaagcgctactagacaattcagtacattaaaaacgtccgcaatgtgttattaagttgtctaagcgtcaatttgtttacaccacaatatatcctgcca

SEQ ID NO: 30 - DNA, 20933 bp, synthetic construct
  misc_feature 1..20933: note = PHP94331
  source 1..20933: mol_type = other DNA
gtttacccgccaatatatcctgtcaaacactgcggccgcacttgaccgcggatggagccggagctgtggtgaggccatcgacgggaggtgggggagaacacagtctcagtgttctttgtgagtccgcaaggtttttagcttttctgtattaattaaggttgctgttggctgtagaatacggtcgtggaagagctgtatcggtagctactacgtaagctattatatactggaagtctggagctcgtcgatctccggtcgtcttcctccatttctcctcgtcttgctttgactgctgctaccatttgcttctgttttctgatgaagcatgccatgtcggccaccagtgtttgtgtggtttttgcagggaatggctttcaagtgctgtgattgaatggccctcgtcgtcctcggctgagctcacatggacgcgtcatgtgagtgagatatatgatcatatgatgagtggggttcgggtgagtgcgtacttgaagtaggatcccgctttcactcattcattcattggcctttaaaccgggaaattttcgcgaggagatggagggaagcaagcagggtgacgagtgcagagtgccgcgagcgctttgtcaaaaggcaccgccgtaggcaaaaaaatcaatggccctgactgactcgatggtagtactactgtagagactagagagggttgctccccatatcttcgtgtgacttttactccagcattgcatttccgtcattgagacgttaattaatagcagctttcgggacagatgactgtggccatgtttcgtcacggccgcttcgtgccagctgggggtactatagtactgtgattttgttagtaaaaactttcattaggccaccattgacgaccgggccttcgcttttgctgcgctaattaaccatttcccggcgaccgaagggaacatgaacatgccccgacacatgagggcatgaggactagtgttctccctgtcgttcgttgacttgactagtgatagtttaaacgctcttcaactggaagagcggttactaccggttcactagctagctgctaatcgagctagttaccctatgaggtgacatgaagcgctcacggttactatgacggttagcttcacgactgttggtggcagtagcgtacgacttagctatagttccggacttacctagctaataacttcgtatagcatacattatacgaagttatggttaccgaattcgagctcggtaccctggttcacaaactcaatacaacacacagtggagtagggtattacgctccggcggcccgaaccactctaaatccttgtgtcctcgtgtgctcttccaccattaatgactgtaattgcagggacacgaagagttgtagcgcttttgccaacaagatccgctatatgctagtagagtggaacctgcacagcaacaagcatccaataatctgagaataagaattatgtgtggtgatggttctcatctctgcaactcgccattttcgcgagagaaccaaatccaagttggtgaagatcatgatttgggctcatgggctggcatagtagctattacctttgcaattgtggttcgaatctatccgatattctccttttcagggagagctaatgcttatgcttattgggtattttggtttgacactgcttcacgcccaaaaaaaggcaactatgtctgagttggatatggcccaaaaaaaggcagctatgtctgagttggatatggaagtcttctttcgtttagggtgaagtaagaccaagctcatgagcttattatcttaggtcggaacaaattagttgataggcatggcacatttatcaaattataatgattttaacagaaaagcaacacctctttttcagcagcaccagctttgcaagctgcaattgacactccaagcatagtatttgctccaaactcagcctgcatttcgcacaatatcatatctatttccatttggataaaatatattttccagaaatatgggaacagaatcaagatacagaaaaaagttgtggtagtagtggtaagtggaaacacaagtacagtgaaaagatagcattatttctgaacagtcaaattaaccgaaataagtagtatcacatactgcccctaaattgactacacccaatgtaaagaattgcttgagcatattgagccatcagttgtttgtttgtgtaacggatttgacaatgcagagttcaggagcaaaaaaccgcaaaggagagaaagagggaaaggatctcctagtatcccaccttgtggcgcgccctgtcaagtgcatgatggcctggtcgatctgcgtctgctgctgcggttccatcccaacgagtgcctccgacaccttgtcgttgatcacccgcaccgcgtaggcgacccccctggcgaggaacttccgcctctcggaggccccggccgcgtcggcggcggcgccctcgagcgcgcccacgctagccgtagatgctcggtgcacggccttgttggtgtgcaactcgacctcaacggccggtgcgctacgcccgtcaaggatctggcgcgcccgcaccctcgtgatcacggtgggcgcctcccgcctcatgtggccgacgatgaaaagcgccgggttaggggccttggcgcgcaccgccgtattcagggcctcctcgctcttgcgcgagagcaggtgcttccccaggtactcctgcactgacaaggctgccacagcggtggaatttgtcctcacgacttcgccacgtcgtcctcacctccctggcttcccacgactccgccgtatcgaggtgctcggtgggtcgtcttaatccgaagtccgaactaggaagacgagacagagaggtctgaggaatgggcctcgtttgatgttgagctgaattatttttccagcataagcccaggtcttggtccatgaacaaaattactagaaacccagcccagtactacgatctaaaagagggactgccactggatagctctctctagcattctccacgctccaatacagcggcgtcgtgtctatccgggtctatccgcgaacacgtgagaactctccagaaactgctttctcctccacttcatctctctcgctttccctctataaaaagaccccttctaggaattgagggagacagcaagcaccaagcagcgatccgaagctcaatcaattcactcaaacctcttccccaaatcttcgattagatcttcgttgacaagaagactagaaccgaacctgacatgtccaacctgctcacggttcaccagaaccttccggctcttccagtggacgcgacgtccgatgaagtcaggaagaacctcatggacatgttccgcgacaggcaagcgttcagcgagcacacctggaagatgctgctctccgtctgccgctcctgggctgcatggtgcaagctgaacaacaggaagtggttccccgctgagcccgaggacgtgagggattaccttctgtacctgcaagcgcgaggtttgtttctgcttctacctttgatatatatataataattatcattaattagtagtaatataatatttcaaatatttttttcaaaataaaagaatgtagtatatagcaattgcttttctgtagtttataagtgtgtatattttaatttataacttttctaatatatgaccaaaacatggtgatgcctaggtctggcagtgaagaccatccagcaacaccttggacaactgaacatgcttcacaggcgctccggcctcccgcgccccagcgactcgaacgccgtgagcctcgtcatgcgccgcatcaggaaggaaaacgtcgatgccggcgaaagggcaaagcaggccctcgcgttcgagaggaccgatttcgaccaggtccgcagcctgatggagaacagcgacaggtgccaggacattaggaacctggcgttcctcggaattgcatacaacacgctcctcaggatcgcggaaattgcccgcattcgcgtgaaggacattagccgcaccgacggcggcaggatgcttatccacattggcaggaccaagacgctcgtttccaccgcaggcgtcgaaaaggccctcagcctcggagtgaccaagctcgtcgaacgctggatctccgtgtccggcgtcgcggacgacccaaacaactacctcttctgccgcgtccgcaagaacggggtggctgcccctagcgccaccagccaactcagcacgagggccttggaaggtattttcgaggccacccaccgcctgatctacggcgcgaaggatgacagcggtcaacgctacctcgcatggtccgggcactccgcccgcgttggagctgctagggacatggcccgcgccggtgtttccatccccgaaatcatgcaggcgggtggatggacgaacgtgaacattgtcatgaactacattcgcaaccttgacagcgagacgggcgcaatggttcgcctcctggaagatggtgactgaggtacccaacctagacttgtccatcttctggattggccaacttaattaatgtatgaaataaaaggatgcacacatagtgacatgctaatcactataatgtgggcatcaaagttgtgtgttatgtgtaattactagttatctgaataaaagagaaagagatcatccatatttcttatcctaaatgaatgtcacgtgtctttataattctttgatgaaccagatgcatttcattaaccaaatccatatacatataaatattaatcatatataattaatatcaattgggttagcaaaacaaatctagtctaggtgtgttttgcgatccgatcgaggccggccacactgatagtttaaactgaaggcgggaaacgacaatctgatcatgagcggagaattaagggagtcacgttatgacccccgccgatgacgcgggacaagccgttttacgtttggaactgacagaaccgcaacgattgaaggagccactcagccgcgggtttctggagtttaatgagctaagcacatacgtcagaaaccattattgcgcgttcaaaagtcgcctaaggtcactatcagctagcaaatatttcttgtcaaaaatgctccactgacgttccataaattcccctcggtatccaattagagtctcatattcactctcccggcggatctcgactctagaggatcgctcaggaaggccgctgagatagagccatggcggccaatgcgggcggcggtggagcgggaggaggcagcggcagcggcagcgtggctgcgccggcggtgtgccgccccagcggctcgcggtggacgccgacgccggagcagatcaggatgctgaaggagctctactacggctgcggcatccggtcgcccagctcggagcagatccagcgcatcaccgccatgctgcggcagcacggcaagatcgagggcaagaacgtcttctactggttccagaaccacaaggcccgcgagcgccagaagcgccgcctcaccagcctcgacgtcaacgtgcccgccgccggcgcggccgacgccaccaccagccaactcggcgtcctctcgctgtcgtcgccgccgccttcaggcgcggcgcctccctcgcccaccctcggcttctacgccgccggcaatggcggcggatcggctgtgctgctggacacgagttccgactggggcagcagcggcgctgctatggccaccgagacatgcttcctgcaggactacatgggcgtgacggacacgggcagctcgtcgcagtggccacgcttctcgtcgtcggacacgataatggcggcggccgcggcgcgggcggcgacgacgcgggcgcccgagacgctccctctcttcccgacctgcggcgacgacggcggcagcggtagcagcagctacttgccgttctggggtgccgcgtccacaactgccggcgccacttcttccgttgcgatccaacagcaacaccagctgcaggagcagtacagcttttacagcaacagcaacagcacccagctggccggcaccggcaaccaagacgtatcggcaacagcagcagcagccgccgccctggagctgagcctcagctcatggtgctccccttaccctgctgcagggagtatgtgagagcaacgcgagctgccactgctcttcactgatgtctctggaatggaaggaggaggaagtgagaacagatcattcgacaaagcagcattagtccgttgatcggtggaagaccactcgtcagtgttgagttgaatgtttgatcaataaaatacggcaatgctgtaagggttgttttttatgccattgataatacactgtactgttcagttgttgaactctatttcttagccatgccaagtgcttttcttattttgaataacattacagcaaaaagttgaaagacaaaaaaaaaaacccccgaacagagtgctttgggtcccaagcttctttagactgtgttcggcgttccccctaaatttctccccctatatctcactcacttgtcacatcagcgttctctttccccctatatctccacgctctacagcagttccacctatatcaaacctctataccccaccacaacaatattatatactttcatcttcaactaactcatgtaccttccaatttttttctactaataattatttacgtgcacagaaacttagcaaggagagagagagcgggaatttaaatgctcggcgttaggcttttagtccgctaggtggctagaccgaggttaggacgctagttcactaggggcctagtggtgttttaagacgtcacggtcacccggtccgggcctagaaggccagcttcaagtttgtacaaaaaagcaggctccggccagaatggcccggaccgaagcttgcatgcctgcagtgcagcgtgacccggtcgtgcccctctctagagataatgagcattgcatgtctaagttataaaaaattaccacatattttttttgtcacacttgtttgaagtgcagtttatctatctttatacatatatttaaactttactctacgaataatataatctatagtactacaataatatcagtgttttagagaatcatataaatgaacagttagacatggtctaaaggacaattgagtattttgacaacaggactctacagttttatctttttagtgtgcatgtgttctcctttttttttgcaaatagcttcacctatataatacttcatccattttattagtacatccatttagggtttagggttaatggtttttatagactaatttttttagtacatctattttattctattttagcctctaaattaagaaaactaaaactctattttagtttttttatttaataatttagatataaaatagaataaaataaagtgactaaaaattaaacaaataccctttaagaaattaaaaaaactaaggaaacatttttcttgtttcgagtagataatgccagcctgttaaacgccgtcgacgagtctaacggacaccaaccagcgaaccagcagcgtcgcgtcgggccaagcgaagcagacggcacggcatctctgtcgctgcctctggacccctctcgagagttccgctccaccgttggacttgctccgctgtcggcatccagaaattgcgtggcggagcggcagacgtgagccggcacggcaggcggcctcctcctcctctcacggcaccggcagctacgggggattcctttcccaccgctccttcgctttcccttcctcgcccgccgtaataaatagacaccccctccacaccctctttccccaacctcgtgttgttcggagcgcacacacacacaaccagatctcccccaaatccacccgtcggcacctccgcttcaaggtacgccgctcgtcctcccccccccccctctctaccttctctagatcggcgttccggtccatgcatggttagggcccggtagttctacttctgttcatgtttgtgttagatccgtgtttgtgttagatccgtgctgctagcgttcgtacacggatgcgacctgtacgtcagacacgttctgattgctaacttgccagtgtttctctttggggaatcctgggatggctctagccgttccgcagacgggatcgatttcatgattttttttgtttcgttgcatagggtttggtttgcccttttcctttatttcaatatatgccgtgcacttgtttgtcgggtcatcttttcatgcttttttttgtcttggttgtgatgatgtggtctggttgggcggtcgttctagatcggagtagaattctgtttcaaactacctggtggatttattaattttggatctgtatgtgtgtgccatacatattcatagttacgaattgaagatgatggatggaaatatcgatctaggataggtatacatgttgatgcgggttttactgatgcatatacagagatgctttttgttcgcttggttgtgatgatgtggtgtggttgggcggtcgttcattcgttctagatcggagtagaatactgtttcaaactacctggtgtatttattaattttggaactgtatgtgtgtgtcatacatcttcatagttacgagtttaagatggatggaaatatcgatctaggataggtatacatgttgatgtgggttttactgatgcatatacatgatggcatatgcagcatctattcatatgctctaaccttgagtacctatctattataataaacaagtatgttttataattattttgatcttgatatacttggatgatggcatatgcagcagctatatgtggatttttttagcactgccttcatacgctatttatttgcttggtactgtttcttttgtcgatgctcaccctgttgtttggtgttacttctgcaggtcgactttaacttagcctaggatccatggccactgtgaacaactggctcgctttctccctctccccgcaggagctgccgccctcccagacgacggactccacactcatctcggccgccaccgccgaccatgtctccggcgatgtctgcttcaacatcccccaagattggagcatgaggggatcagagctttcggcgctcgtcgcggagccgaagctggaggacttcctcggcggcatctccttctccgagcagcatcacaaggccaactgcaacatgatacccagcactagcagcacagtttgctacgcgagctcaggtgctagcaccggctaccatcaccagctgtaccaccagcccaccagctcagcgctccacttcgcggactccgtaatggtggcttcctcggccggtgtccacgacggcggtgccatgctcagcgcggccgccgctaacggtgtcgctggcgctgccagtgccaacggcggcggcatcgggctgtccatgattaagaactggctgcggagccaaccggcgcccatgcagccgagggtggcggcggctgagggcgcgcaggggctctctttgtccatgaacatggcggggacgacccaaggcgctgctggcatgccacttctcgctggagagcgcgcacgggcgcccgagagtgtatcgacgtcagcacagggtggagccgtcgtcgtcacggcgccgaaggaggatagcggtggcagcggtgttgccggcgctctagtagccgtgagcacggacacgggtggcagcggcggcgcgtcggctgacaacacggcaaggaagacggtggacacgttcgggcagcgcacgtcgatttaccgtggcgtgacaaggcatagatggactgggagatatgaggcacatctttgggataacagttgcagaagggaagggcaaactcgtaagggtcgtcaagtctatttaggtggctatgataaagaggagaaagctgctagggcttatgatcttgctgctctgaagtactggggtgccacaacaacaacaaattttccagtgagtaactacgaaaaggagctcgaggacatgaagcacatgacaaggcaggagtttgtagcgtctctgagaaggaagagcagtggtttctccagaggtgcatccatttacaggggagtgactaggcatcaccaacatggaagatggcaagcacggattggacgagttgcagggaacaaggatctttacttgggcaccttcagcacccaggaggaggcagcggaggcgtacgacatcgcggcgatcaagttccgcggcctcaacgccgtcaccaacttcgacatgagccgctacgacgtgaagagcatcctggacagcagcgccctccccatcggcagcgccgccaagcgcctcaaggaggccgaggccgcagcgtccgcgcagcaccaccacgccggcgtggtgagctacgacgtcggccgcatcgcctcgcagctcggcgacggcggagccctggcggcggcgtacggcgcgcactaccacggcgccgcctggccgaccatcgcgttccagccgggcgccgccagcacaggcctgtaccacccgtacgcgcagcagccaatgcgcggcggcgggtggtgcaagcaggagcaggaccacgcggtgatcgcggccgcgcacagcctgcaggacctccaccacctgaacctgggcgcggccggcgcgcacgactttttctcggcagggcagcaggccgccgccgctgcgatgcacggcctgggtagcatcgacagtgcgtcgctcgagcacagcaccggctccaactccgtcgtctacaacggcggggtcggcgacagcaacggcgccagcgccgtcggcggcagtggcggtggctacatgatgccgatgagcgctgccggagcaaccactacatcggcaatggtgagccacgagcaggtgcatgcacgggcctacgacgaagccaagcaggctgctcagatggggtacgagagctacctggtgaacgcggagaacaatggtggcggaaggatgtctgcatgggggactgtcgtgtctgcagccgcggcggcagcagcaagcagcaacgacaacatggccgccgacgtcgggcatggcggcgcgcagctcttcagtgtctggaacgacacttaatattggtaccgtcatgggtcgtttaagctgccgatgtgcctgcgtcgtctggtgccctctctccatatggaggttgtcaaagtatctgctgttcgtgtcatgagtcgtgtcagtgttggtttaataatggaccggttgtgttgtgtgtgcgtactacccagaactatgacaaatcatgaataagtttgatgtttgaaattaaagcctgtgctcattatgttctgtctttcagttgtctcctaatatttgcctgcaggtactggctatctaccgtttcttacttaggaggtgtttgaatgcactaaaactaatagttagtggctaaaattagttaaaacatccaaacaccatagctaatagttgaactattagctatttttggaaaattagttaatagtgaggtagttatttgttagctagctaattcaactaacaatttttagccaactaacaattagtttcagtgcattcaaacacccccttaatgttaaggtggttctatctaccgtctcctaatatatggttgattgttcggtttgttgctatgctattgggttctgattgctgctagttcttgctgaatccagaagttctcgtagtatagctcagattcatattatttatttgagtgataagtgatccaggttattactatgttagctaggttttttttacaaggataaattatctgtgatcataattcttatgaaagctttatgtttcctggaggcagtggcatgcaatgcatgacagcaacttgatcacaccagctgaggtagatacggtaacaaggttcttaaatctgttcaccaaatcattggagaacacacatacacattcttgccagtcttggttagagaaatttcatgacaaaatgccaaagctgtcttgactcttcacttttggccatgagtcgtgacgcgacttattgaactagtctagggcgcggctaacaacctagcttagattgccttgtctaaacccttaggctaacgcgccactctagaaggccgatctactgcgcagccggctttaattcgtaacgagcagtttataccgttttgcgctgcattcaccttcgtgagtccggaccccggaagacaggaactgtagcctttttccctttgctagcatgaatatgaatagaataacacgaatttaacatcaattcagctcatattggaacaatctacgcctaaaatttagtggaacacgttttgctcattttccttgaaaagcaacagtgaagcaacatcggtaaaggttcttttggttgcctctaacggtctaacctgaggattcagttataatctggaacatgacagaaacagagcctcgcacccgttttgggaccaaaaccacatgatcgatctccaagaagattattttggacaatatttttccagccacaggcaatccgaagaccacaaatcagaggcactccaaatgcagcccatccattggaccatacagataagacccggataaggcagagcccatcgtgaccgtcaaatagatcacgtccggtctacggccgtccgatctgccacccagagatagcaccgggatttcctataagcacttttcctatttgtagcccgtgacgagcccagcgccacacaccaacctcagcacaccaaggagagtacgtggaggagcagccccatggtccacaaccaagcactcccatcatcatgcatgcagcaggctgtgctgtggacctgatcgagtttcaattgatccaagcaagcaagagggatgggagtccttggttgtggactagacttgtccatcttctggattggccaacttaattaatgtatgaaataaaaggatgcacacatagtgacatgctaatcactataatgtgggcatcaaagttgtgtgttatgtgtaattactagttatctgaataaaagagaaagagatcatccatatttcttatcctaaatgaatgtcacgtgtctttataattctttgatgaaccagatgcatttcattaaccaaatccatatacatataaatattaatcatatataattaatatcaattgggttagcaaaacaaatctagtctaggtgtgttttgcattaagacccgtcgtcaagtaggaattccagaaatcaacgcacggtaactaaatcctcgcgctaagctgggtcagtctagaaggccgatctcccgggataacttcgtatagcatacattatacgaagttatgaattccggaccgggttaccgaattcctgcccttaaggccaattgttcaagattcattcaacaattgaaacatctcccatgattaaatcagtataaggttgctatggtcttgcttgacaaagtttttttttgagggaatttcaactaaatttttgagtgaaactatcaaatactgattttaaaaaatttttataaaaggaagcgcagagataaaaggccatctatgctacaaaagtacccaaaaatgtaatcctaaagtatgaattgcattttttttttgtttggacgaaaggaaaggagtattaccacaagaatgatatcatcttcatatttagatcttttttgggtaaagcttgagattctctaaatatagagaaatcagaagaaaaaaaaaccgtgttttggtggttttgatttctagcctccacaataactttgacggcgtcgacaagtctaacggacaccaagcagcgaaccaccagcgccgagccaagcgaagcagacggccgagacgttgacaccttcggcgcggcatctctcgagagttccgctccggcgctccacctccaccgctggcggtttcttattccgttccgttccgcctcctgctctgctcctctccacaccacacggcacgaaaccgttacggcaccggcagcacccagcacgggagaggggattcctttcccaccgttccttccctttccgccccgccgctataaatagccagccccatccccagcttttttccccaatctcatctcctctctcctgttgttcggagcacacgcacaatccgatcgatccccaaatccccttcgtctctcctcgcgagcctcgtggatcccagcttcaaggtacggcgatcgatcatcccccctccttctctctaccttcttttctctagactacatcggatggcgatccatggttagggcctgctagtttcccttcctgttttgtcgatggctgcgaggcacaatagatctgatggcgttatgacggctaacttgtcatgttgttgcgatttatagtccctttaggagatcagtttaatttctcggatggttcgagatcggtggtccatggttagtaccctaagatccgcgctgttagggttcgtagatggaggcgacctgttctgattgttaacttgtcagtacctgggaaatcctgggatggttctagctcgtccgcagatgagatcgatttcatgatcctctgtatcttgtttcgttgcctaggttccgtctaatctatccgtggtatgatgtagatgttttgatcgtgctaactacgtcttgtaaagttaattgtcaggtcataatttttagcatgcctttttttttgtttggttttgtctaattgggctgtcgttctagatcagagtagaagactgttccaaactacctgctggatttattgaacttggatctgtatgtgtgtcacatatcttcataaattcatgattaagatggattgaaatatcttttatctttttggtatggatagttctatatgttggtgtggctttgttagatgtatacatgcttagatacatgaagcaacgtgctgctactgtttagtaattgctgttcatttgtctaataaacagataaggatatgtatttatgttgctgttggttttgctggtactttgttggatacaaatgcttcaatacagaaaacagcatgctgctacgatttaccatttatctaatcttatcatatgtctaatctaataaacaaacatgcttttaaattatcttcatatgcttggatgatggcatacacagcggctatgtgtggttttttaaatacccagcatcatgggcatgcatgacactgctttaatatgctttttatttgcttgagactgtttcttttgtttatactgaccctttagttcggtgactcttctgcaggtcgactttaacttagcctaggatccatggcccagtccaagcacggcctgaccaaggagatgaccatgaagtaccgcatggagggctgcgtggacggccacaagttcgtgatcaccggcgagggcatcggctaccccttcaagggcaagcaggccatcaacctgtgcgtggtggagggcggccccttgcccttcgccgaggacatcttgtccgccgccttcatgtacggcaaccgcgtgttcaccgagtacccccaggacatcgtcgactacttcaagaactcctgccccgccggctacacctgggaccgctccttcctgttcgaggacggcgccgtgtgcatctgcaacgccgacatcaccgtgagcgtggaggagaactgcatgtaccacgagtccaagttctacggcgtgaacttccccgccgacggccccgtgatgaagaagatgaccgacaactgggagccctcctgcgagaagatcatccccgtgcccaagcagggcatcttgaagggcgacgtgagcatgtacctgctgctgaaggacggtggccgcttgcgctgccagttcgacaccgtgtacaaggccaagtccgtgccccgcaagatgcccgactggcacttcatccagcacaagctgacccgcgaggaccgcagcgacgccaagaaccagaagtggcacctgaccgagcacgccatcgcctccggctccgccttgccctccggactcagatctcgatagggtaccaatggccagttaacagatccagctgctgctgttctagggttcacaagtctgcctatttgtcttccccaatggagctatggttgtctggtctggtccttggtcgtgtcccgtttcattgtgtactatttacctgtaatgtgtatccttaagtctggtttgatggtgtctgaaacgttttgctgtggtagagcagcatggaagaactataatgaataagtgatccctaatcattgtgtccaaattttgcttctgctatacccttttgtgctgtttcttatgttttgcttaaaaatttgatctgacaaacaaatttgtctaaattatgctcttgttctgactgtgtactgtacacatttgtattgctaccggtttggcacatagttttctctttgattgcagatcaaacccttctgattgcagattgcttggctatggctgatgtgctcactgttcttctttagcttgtatattgctgatggtggcttggctacggctgaaaaagttgctgctgcgccgacttggcaactgttgctccagtaatgctttgtcctctcttcctagccgccgacttggcacttggcagctgttgctcctgtaatgcgttgttatctcttatctcttgagatgtactatgattttgaggctgtttgacttgtgccagattgccagtgctgatgctatattatctcaggtttttatgctagtatatgttttactgtgtgctgcctgtgtcgagttacgtaatctattgaaccgctatgcgtgttgatgccctgttgttgcttgccagattgatgcccctgttgcttgcagcttgcaagctgtagtgaaatcctaaaattcgaaaccaaatctattctgaacttttgaagatctgtgatgtccggaagaaaagattcaaacagataaacgggactctccagaatctataaaataaatgatcgacaaacgctttgctttggtaggcttcctagttagttagcggaccgggatccgacggcgtcttcaccgccccgccgccgcccgagccggacttgtcgctgccgccgccgctgctcatcttgcgcgcttgtgtccctccctcagtccctgcgttcgcggatcgcgggcgggtgcgacccgtttggactccggccggtagccttcgtgccgacctcgctcggtccaccggtttgtcggggacccacatgtcagtgaaggtacgcgtccacgtccacagaccctactaccccagacgagtccaaatcgctgttccctcacactctcgtgtaccagcgcgcggcggaaagcacctttccaacaaccgccgacacgtcggtcccacgtcggcatgctccaccggtcagtgtttggcgtgtacggctcccggcgacgaacgagtgtggcctaagctttcctactcccatcccatctgagccacacatctctctcacgccacgcgcacaaaacagccaggctcccacgcgcatcaaccggctctccctttccgtgccactcgcccccaagccccaaaccctcgccgccgcctccgagacagccgccgccacctaggccatggccaccgccgccgccgcgtctaccgcgctcactggcgccactaccgctgcgcccaaggcgaggcgccgggcgcacctcctggccacccgccgcgccctcgccgcgcccatcaggtgctcagcggcgtcacccgccatgccgatggctcccccggccaccccgctccggccgtggggccccaccgagccccgcaagggtgctgacatcctcgtcgagtccctcgagcgctgcggcgtccgcgacgtcttcgcctaccccggcggcgcgtcgatggagatccaccaggcactcacccgctcccccgtcatcgccaaccacctcttccgccacgagcaaggggaggcctttgccgcctccggctacgcgcgctcctcgggccgcgtcggcgtctgcatcgccacctccggccccggcgccaccaacctagtctccgcgctcgccgacgcgctgctcgattccgtcccgatggtcgccatcacgggacaggtggcgcgacgcatgattggcaccgacgccttccaggagacgcccatcgtcgaggtcacgcgctccatcaccaagcacaactacctggtcctcgacgtcgacgacatcccccgcgtcgtgcaggaggctttcttcctcgcctcctctggtcgaccagggccggtgcttgtcgacatccccaaggacatccagcagcagatggcggtgcctgtctgggacaagcccatgagtctgcctgggtacattgcgcgccttcccaagccccctgcgactgagttgcttgagcaggtgctgcgtcttgttggtgaatcgcggcgccctgttctttatgtgggcggtggctgcgcagcatctggtgaggagttgcgacgctttgtggagctgactggaatcccggtcacaactactcttatgggcctcggcaacttccccagcgacgacccactgtctctgcgcatgctaggtatgcatgggacggtgtatgcaaattatgcagtggataaggccgatctgttgcttgcacttggtgtgcggtttgatgatcgcgtgacagggaagattgaggcttttgcaagcagggctaagattgtgcacgttgatattgatccggctgagattggcaagaacaagcagccacatgtgtccatctgtgcagatgttaagcttgctttgcagggcatgaatgctcttcttgaaggaagcacatcaaagaagagctttgactttggctcatggaacgatgagttggatcagcagaagagggaattcccccttgggtataaaacatctaatgaggagatccagccacaatatgctattcaggttcttgatgagctgacgaaaggcgaggccatcatcggcacaggtgttgggcagcaccagatgtgggcggcacagtactacacttacaagcggccaaggcagtggttgtcttcagctggtcttggggctatgggatttggtttgccggctgctgctggtgcttctgtggcaaacccaggtgtcactgttgttgacatcgatggagatggtagctttctcatgaacgttcaggagctagctatgatccgaattgagaacctcccagtgaaggtctttgtgctaaacaaccagcacctggggatggtggtgcagttggaggacaggttctataaggccaacagagcgcacacatacttgggaaacccagagaatgaaagtgagatatatccagatttcgtgacgatcgccaaagggttcaacattccagccgtccgtgtgacaaagaagaacgaagtccgcgcagcgataaagaagatgctcgagactccagggccgtacctcttggatataatcgtcccacaccaggagcatgtgttgcctatgatccctagtggtggggctttcaaggatatgatcctggatggtgatggcaggactgtgtactgacttcgaataggtacccggggatcctctagtgccgtgggtcgtttaagctgccgctgtacctgtgtcgtctggtgccttctggtgtacctgggaggttgtcgtctatcaagtatctgtggttggtgtcatgagtcagtgagtcccaatactgttcgtgtcctgtgtgcattatacccaaaactgttatgggcaaatcatgaataagcttgatgttcgaacttaaaagtctctgctcaatatggtattatggttgtttttgttcgtctcctaatatttgcctgggatcaaattttattggctggtgttcatttgacctccatgttcttgctaggctccattttttactctacagccataatatgtttgattgtttggtttgttctttgttgtacacctggttctgtcgagcttagttttcgacactggcttacagcttaacatgttgctattttattgggttctgattgctattttattgggttctgattgctagtttttgctgaatccaaaaaccatgttatttatttaagcgatccaggttattattatgatggtggctaagtttttttttttccaagggtaaattttctggattctccagtgtttctgtggccgaattcaatcactagagtcgacctgcaaagcttcggtccgggcctagaaggcccgcgccacttacgcttgattccgatgacttcgtaggttcctagctcaagccgctcgtgtccaagcgtcacttacgattagctaatgattacggcatctaggaccgactagttcttatgtgcttctagtctccaaatgtggttgatagttattttgctctaagatcaacagtaatgaagtataaatcatcgttgtggtgtgctactcggttaattgagcattaacacacacaaacatgacgaggatggtataatctccaaaaatgtgtactttgttaggtgggaccctatagccttgattaatgtgctatgttaggcatgcctggaaacgtgtgacgcatatgttttgtgaacctgttgatattatatgtgcttttatattaccatattttattaaaatactaatatttattactagtaagatataacattctatctagcttaaaaactaaccataaatattccataataactagatttaccaaactaatatactaaatatacataataaatacaaaattaacaagacaataatcaatatttatgagcttaatatatttagacattatggttggtcgacgataatcatgctaacttttcgtaattgcttgattgaaatatgcttagaataatgcctctttgttctacatggcaaatagggaccattatggtgtaacaccctgggaaccacaaacaccccgaaatgctactaaactacacaactaaccttcatatataaaatttcgacagcatctcctttgaaaatttgcatagacgtggaagcaacagagtataaacagatctgcgtttaaacgtgcaagcgctactagacaattcagtacattaaaaacgtccgcaatgtgttattaagttgtctaagcgtcaatttgtttacaccacaatatatcctgcca

SEQ ID NO: 31 - DNA, 22397 bp, synthetic construct
  misc_feature 1..22397: note = PHP94332
  source 1..22397: mol_type = other DNA
gtttacccgccaatatatcctgtcaaacactgcggccgcacttgaccgcggatggagccggagctgtggtgaggccatcgacgggaggtgggggagaacacagtctcagtgttctttgtgagtccgcaaggtttttagcttttctgtattaattaaggttgctgttggctgtagaatacggtcgtggaagagctgtatcggtagctactacgtaagctattatatactggaagtctggagctcgtcgatctccggtcgtcttcctccatttctcctcgtcttgctttgactgctgctaccatttgcttctgttttctgatgaagcatgccatgtcggccaccagtgtttgtgtggtttttgcagggaatggctttcaagtgctgtgattgaatggccctcgtcgtcctcggctgagctcacatggacgcgtcatgtgagtgagatatatgatcatatgatgagtggggttcgggtgagtgcgtacttgaagtaggatcccgctttcactcattcattcattggcctttaaaccgggaaattttcgcgaggagatggagggaagcaagcagggtgacgagtgcagagtgccgcgagcgctttgtcaaaaggcaccgccgtaggcaaaaaaatcaatggccctgactgactcgatggtagtactactgtagagactagagagggttgctccccatatcttcgtgtgacttttactccagcattgcatttccgtcattgagacgttaattaatagcagctttcgggacagatgactgtggccatgtttcgtcacggccgcttcgtgccagctgggggtactatagtactgtgattttgttagtaaaaactttcattaggccaccattgacgaccgggccttcgcttttgctgcgctaattaaccatttcccggcgaccgaagggaacatgaacatgccccgacacatgagggcatgaggactagtgttctccctgtcgttcgttgacttgactagtgatagtttaaacgctcttcaactggaagagcggttactaccggttcactagctagctgctaatcgagctagttaccctatgaggtgacatgaagcgctcacggttactatgacggttagcttcacgactgttggtggcagtagcgtacgacttagctatagttccggacttacctagctaataacttcgtatagcatacattatacgaagttatggttaccgaattcgagctcggtaccctggttcacaaactcaatacaacacacagtggagtagggtattacgctccggcggcccgaaccactctaaatccttgtgtcctcgtgtgctcttccaccattaatgactgtaattgcagggacacgaagagttgtagcgcttttgccaacaagatccgctatatgctagtagagtggaacctgcacagcaacaagcatccaataatctgagaataagaattatgtgtggtgatggttctcatctctgcaactcgccattttcgcgagagaaccaaatccaagttggtgaagatcatgatttgggctcatgggctggcatagtagctattacctttgcaattgtggttcgaatctatccgatattctccttttcagggagagctaatgcttatgcttattgggtattttggtttgacactgcttcacgcccaaaaaaaggcaactatgtctgagttggatatggcccaaaaaaaggcagctatgtctgagttggatatggaagtcttctttcgtttagggtgaagtaagaccaagctcatgagcttattatcttaggtcggaacaaattagttgataggcatggcacatttatcaaattataatgattttaacagaaaagcaacacctctttttcagcagcaccagctttgcaagctgcaattgacactccaagcatagtatttgctccaaactcagcctgcatttcgcacaatatcatatctatttccatttggataaaatatattttccagaaatatgggaacagaatcaagatacagaaaaaagttgtggtagtagtggtaagtggaaacacaagtacagtgaaaagatagcattatttctgaacagtcaaattaaccgaaataagtagtatcacatactgcccctaaattgactacacccaatgtaaagaattgcttgagcatattgagccatcagttgtttgtttgtgtaacggatttgacaatgcagagttcaggagcaaaaaaccgcaaaggagagaaagagggaaaggatctcctagtatcccaccttgtggcgcgccctgtcaagtgcatgatggcctggtcgatctgcgtctgctgctgcggttccatcccaacgagtgcctccgacaccttgtcgttgatcacccgcaccgcgtaggcgacccccctggcgaggaacttccgcctctcggaggccccggccgcgtcggcggcggcgccctcgagcgcgcccacgctagccgtagatgctcggtgcacggccttgttggtgtgcaactcgacctcaacggccggtgcgctacgcccgtcaaggatctggcgcgcccgcaccctcgtgatcacggtgggcgcctcccgcctcatgtggccgacgatgaaaagcgccgggttaggggccttggcgcgcaccgccgtattcagggcctcctcgctcttgcgcgagagcaggtgcttccccaggtactcctgcactgacaaggctgccacagcggtggaatttgtcctcacgacttcgccacgtcgtcctcacctccctggcttcccacgactccgccgtatcgaggtgctcggtgggtcgtcttaatccgaagtccgaactaggaagacgagacagagaggtctgaggaatgggcctcgtttgatgttgagctgaattatttttccagcataagcccaggtcttggtccatgaacaaaattactagaaacccagcccagtactacgatctaaaagagggactgccactggatagctctctctagcattctccacgctccaatacagcggcgtcgtgtctatccgggtctatccgcgaacacgtgagaactctccagaaactgctttctcctccacttcatctctctcgctttccctctataaaaagaccccttctaggaattgagggagacagcaagcaccaagcagcgatccgaagctcaatcaattcactcaaacctcttccccaaatcttcgattagatcttcgttgacaagaagactagaaccgaacctgacatgtccaacctgctcacggttcaccagaaccttccggctcttccagtggacgcgacgtccgatgaagtcaggaagaacctcatggacatgttccgcgacaggcaagcgttcagcgagcacacctggaagatgctgctctccgtctgccgctcctgggctgcatggtgcaagctgaacaacaggaagtggttccccgctgagcccgaggacgtgagggattaccttctgtacctgcaagcgcgaggtttgtttctgcttctacctttgatatatatataataattatcattaattagtagtaatataatatttcaaatatttttttcaaaataaaagaatgtagtatatagcaattgcttttctgtagtttataagtgtgtatattttaatttataacttttctaatatatgaccaaaacatggtgatgcctaggtctggcagtgaagaccatccagcaacaccttggacaactgaacatgcttcacaggcgctccggcctcccgcgccccagcgactcgaacgccgtgagcctcgtcatgcgccgcatcaggaaggaaaacgtcgatgccggcgaaagggcaaagcaggccctcgcgttcgagaggaccgatttcgaccaggtccgcagcctgatggagaacagcgacaggtgccaggacattaggaacctggcgttcctcggaattgcatacaacacgctcctcaggatcgcggaaattgcccgcattcgcgtgaaggacattagccgcaccgacggcggcaggatgcttatccacattggcaggaccaagacgctcgtttccaccgcaggcgtcgaaaaggccctcagcctcggagtgaccaagctcgtcgaacgctggatctccgtgtccggcgtcgcggacgacccaaacaactacctcttctgccgcgtccgcaagaacggggtggctgcccctagcgccaccagccaactcagcacgagggccttggaaggtattttcgaggccacccaccgcctgatctacggcgcgaaggatgacagcggtcaacgctacctcgcatggtccgggcactccgcccgcgttggagctgctagggacatggcccgcgccggtgtttccatccccgaaatcatgcaggcgggtggatggacgaacgtgaacattgtcatgaactacattcgcaaccttgacagcgagacgggcgcaatggttcgcctcctggaagatggtgactgaggtacccaacctagacttgtccatcttctggattggccaacttaattaatgtatgaaataaaaggatgcacacatagtgacatgctaatcactataatgtgggcatcaaagttgtgtgttatgtgtaattactagttatctgaataaaagagaaagagatcatccatatttcttatcctaaatgaatgtcacgtgtctttataattctttgatgaaccagatgcatttcattaaccaaatccatatacatataaatattaatcatatataattaatatcaattgggttagcaaaacaaatctagtctaggtgtgttttgcgatccgatcgaggccggccacactgatagtttaaactgaaggcgggaaacgacaatctgatcatgagcggagaattaagggagtcacgttatgacccccgccgatgacgcgggacaagccgttttacgtttggaactgacagaaccgcaacgattgaaggagccactcagccgcgggtttctggagtttaatgagctaagcacatacgtcagaaaccattattgcgcgttcaaaagtcgcctaaggtcactatcagctagcaaatatttcttgtcaaaaatgctccactgacgttccataaattcccctcggtatccaattagagtctcatattcactctcccggcggatctcgactctagaggatcgctcaggaaggccgctgagatagagccatggcggccaatgcgggcggcggtggagcgggaggaggcagcggcagcggcagcgtggctgcgccggcggtgtgccgccccagcggctcgcggtggacgccgacgccggagcagatcaggatgctgaaggagctctactacggctgcggcatccggtcgcccagctcggagcagatccagcgcatcaccgccatgctgcggcagcacggcaagatcgagggcaagaacgtcttctactggttccagaaccacaaggcccgcgagcgccagaagcgccgcctcaccagcctcgacgtcaacgtgcccgccgccggcgcggccgacgccaccaccagccaactcggcgtcctctcgctgtcgtcgccgccgccttcaggcgcggcgcctccctcgcccaccctcggcttctacgccgccggcaatggcggcggatcggctgtgctgctggacacgagttccgactggggcagcagcggcgctgctatggccaccgagacatgcttcctgcaggactacatgggcgtgacggacacgggcagctcgtcgcagtggccacgcttctcgtcgtcggacacgataatggcggcggccgcggcgcgggcggcgacgacgcgggcgcccgagacgctccctctcttcccgacctgcggcgacgacggcggcagcggtagcagcagctacttgccgttctggggtgccgcgtccacaactgccggcgccacttcttccgttgcgatccaacagcaacaccagctgcaggagcagtacagcttttacagcaacagcaacagcacccagctggccggcaccggcaaccaagacgtatcggcaacagcagcagcagccgccgccctggagctgagcctcagctcatggtgctccccttaccctgctgcagggagtatgtgagagcaacgcgagctgccactgctcttcactgatgtctctggaatggaaggaggaggaagtgagaacagatcattcgacaaagcagcattagtccgttgatcggtggaagaccactcgtcagtgttgagttgaatgtttgatcaataaaatacggcaatgctgtaagggttgttttttatgccattgataatacactgtactgttcagttgttgaactctatttcttagccatgccaagtgcttttcttattttgaataacattacagcaaaaagttgaaagacaaaaaaaaaaacccccgaacagagtgctttgggtcccaagcttctttagactgtgttcggcgttccccctaaatttctccccctatatctcactcacttgtcacatcagcgttctctttccccctatatctccacgctctacagcagttccacctatatcaaacctctataccccaccacaacaatattatatactttcatcttcaactaactcatgtaccttccaatttttttctactaataattatttacgtgcacagaaacttagcaaggagagagagagcgggaatttaaatgctcggcgttaggcttttagtccgctaggtggctagaccgaggttaggacgctagttcactaggggcctagtggtgttttaagacgtcacggtcacccggtccgggcctagaaggccagcttcaagtttgtacaaaaaagcaggctccggccagaatggcccggaccgaagcttgcatgcctgcagtgcagcgtgacccggtcgtgcccctctctagagataatgagcattgcatgtctaagttataaaaaattaccacatattttttttgtcacacttgtttgaagtgcagtttatctatctttatacatatatttaaactttactctacgaataatataatctatagtactacaataatatcagtgttttagagaatcatataaatgaacagttagacatggtctaaaggacaattgagtattttgacaacaggactctacagttttatctttttagtgtgcatgtgttctcctttttttttgcaaatagcttcacctatataatacttcatccattttattagtacatccatttagggtttagggttaatggtttttatagactaatttttttagtacatctattttattctattttagcctctaaattaagaaaactaaaactctattttagtttttttatttaataatttagatataaaatagaataaaataaagtgactaaaaattaaacaaataccctttaagaaattaaaaaaactaaggaaacatttttcttgtttcgagtagataatgccagcctgttaaacgccgtcgacgagtctaacggacaccaaccagcgaaccagcagcgtcgcgtcgggccaagcgaagcagacggcacggcatctctgtcgctgcctctggacccctctcgagagttccgctccaccgttggacttgctccgctgtcggcatccagaaattgcgtggcggagcggcagacgtgagccggcacggcaggcggcctcctcctcctctcacggcaccggcagctacgggggattcctttcccaccgctccttcgctttcccttcctcgcccgccgtaataaatagacaccccctccacaccctctttccccaacctcgtgttgttcggagcgcacacacacacaaccagatctcccccaaatccacccgtcggcacctccgcttcaaggtacgccgctcgtcctcccccccccccctctctaccttctctagatcggcgttccggtccatgcatggttagggcccggtagttctacttctgttcatgtttgtgttagatccgtgtttgtgttagatccgtgctgctagcgttcgtacacggatgcgacctgtacgtcagacacgttctgattgctaacttgccagtgtttctctttggggaatcctgggatggctctagccgttccgcagacgggatcgatttcatgattttttttgtttcgttgcatagggtttggtttgcccttttcctttatttcaatatatgccgtgcacttgtttgtcgggtcatcttttcatgcttttttttgtcttggttgtgatgatgtggtctggttgggcggtcgttctagatcggagtagaattctgtttcaaactacctggtggatttattaattttggatctgtatgtgtgtgccatacatattcatagttacgaattgaagatgatggatggaaatatcgatctaggataggtatacatgttgatgcgggttttactgatgcatatacagagatgctttttgttcgcttggttgtgatgatgtggtgtggttgggcggtcgttcattcgttctagatcggagtagaatactgtttcaaactacctggtgtatttattaattttggaactgtatgtgtgtgtcatacatcttcatagttacgagtttaagatggatggaaatatcgatctaggataggtatacatgttgatgtgggttttactgatgcatatacatgatggcatatgcagcatctattcatatgctctaaccttgagtacctatctattataataaacaagtatgttttataattattttgatcttgatatacttggatgatggcatatgcagcagctatatgtggatttttttagcactgccttcatacgctatttatttgcttggtactgtttcttttgtcgatgctcaccctgttgtttggtgttacttctgcaggtcgactttaacttagcctaggatccatggccactgtgaacaactggctcgctttctccctctccccgcaggagctgccgccctcccagacgacggactccacactcatctcggccgccaccgccgaccatgtctccggcgatgtctgcttcaacatcccccaagattggagcatgaggggatcagagctttcggcgctcgtcgcggagccgaagctggaggacttcctcggcggcatctccttctccgagcagcatcacaaggccaactgcaacatgatacccagcactagcagcacagtttgctacgcgagctcaggtgctagcaccggctaccatcaccagctgtaccaccagcccaccagctcagcgctccacttcgcggactccgtaatggtggcttcctcggccggtgtccacgacggcggtgccatgctcagcgcggccgccgctaacggtgtcgctggcgctgccagtgccaacggcggcggcatcgggctgtccatgattaagaactggctgcggagccaaccggcgcccatgcagccgagggtggcggcggctgagggcgcgcaggggctctctttgtccatgaacatggcggggacgacccaaggcgctgctggcatgccacttctcgctggagagcgcgcacgggcgcccgagagtgtatcgacgtcagcacagggtggagccgtcgtcgtcacggcgccgaaggaggatagcggtggcagcggtgttgccggcgctctagtagccgtgagcacggacacgggtggcagcggcggcgcgtcggctgacaacacggcaaggaagacggtggacacgttcgggcagcgcacgtcgatttaccgtggcgtgacaaggcatagatggactgggagatatgaggcacatctttgggataacagttgcagaagggaagggcaaactcgtaagggtcgtcaagtctatttaggtggctatgataaagaggagaaagctgctagggcttatgatcttgctgctctgaagtactggggtgccacaacaacaacaaattttccagtgagtaactacgaaaaggagctcgaggacatgaagcacatgacaaggcaggagtttgtagcgtctctgagaaggaagagcagtggtttctccagaggtgcatccatttacaggggagtgactaggcatcaccaacatggaagatggcaagcacggattggacgagttgcagggaacaaggatctttacttgggcaccttcagcacccaggaggaggcagcggaggcgtacgacatcgcggcgatcaagttccgcggcctcaacgccgtcaccaacttcgacatgagccgctacgacgtgaagagcatcctggacagcagcgccctccccatcggcagcgccgccaagcgcctcaaggaggccgaggccgcagcgtccgcgcagcaccaccacgccggcgtggtgagctacgacgtcggccgcatcgcctcgcagctcggcgacggcggagccctggcggcggcgtacggcgcgcactaccacggcgccgcctggccgaccatcgcgttccagccgggcgccgccagcacaggcctgtaccacccgtacgcgcagcagccaatgcgcggcggcgggtggtgcaagcaggagcaggaccacgcggtgatcgcggccgcgcacagcctgcaggacctccaccacctgaacctgggcgcggccggcgcgcacgactttttctcggcagggcagcaggccgccgccgctgcgatgcacggcctgggtagcatcgacagtgcgtcgctcgagcacagcaccggctccaactccgtcgtctacaacggcggggtcggcgacagcaacggcgccagcgccgtcggcggcagtggcggtggctacatgatgccgatgagcgctgccggagcaaccactacatcggcaatggtgagccacgagcaggtgcatgcacgggcctacgacgaagccaagcaggctgctcagatggggtacgagagctacctggtgaacgcggagaacaatggtggcggaaggatgtctgcatgggggactgtcgtgtctgcagccgcggcggcagcagcaagcagcaacgacaacatggccgccgacgtcgggcatggcggcgcgcagctcttcagtgtctggaacgacacttaatattggtaccgtcatgggtcgtttaagctgccgatgtgcctgcgtcgtctggtgccctctctccatatggaggttgtcaaagtatctgctgttcgtgtcatgagtcgtgtcagtgttggtttaataatggaccggttgtgttgtgtgtgcgtactacccagaactatgacaaatcatgaataagtttgatgtttgaaattaaagcctgtgctcattatgttctgtctttcagttgtctcctaatatttgcctgcaggtactggctatctaccgtttcttacttaggaggtgtttgaatgcactaaaactaatagttagtggctaaaattagttaaaacatccaaacaccatagctaatagttgaactattagctatttttggaaaattagttaatagtgaggtagttatttgttagctagctaattcaactaacaatttttagccaactaacaattagtttcagtgcattcaaacacccccttaatgttaaggtggttctatctaccgtctcctaatatatggttgattgttcggtttgttgctatgctattgggttctgattgctgctagttcttgctgaatccagaagttctcgtagtatagctcagattcatattatttatttgagtgataagtgatccaggttattactatgttagctaggttttttttacaaggataaattatctgtgatcataattcttatgaaagctttatgtttcctggaggcagtggcatgcaatgcatgacagcaacttgatcacaccagctgaggtagatacggtaacaaggttcttaaatctgttcaccaaatcattggagaacacacatacacattcttgccagtcttggttagagaaatttcatgacaaaatgccaaagctgtcttgactcttcacttttggccatgagtcgtgacgcgacttattgaactagtctagggcgcggctaacaacctagcttagattgccttgtctaaacccttaggctaacgcgccactctagaaggccgatctaagcttgcatgcctgcagtgcagcgtgacccggtcgtgcccctctctagagataatgagcattgcatgtctaagttataaaaaattaccacatattttttttgtcacacttgtttgaagtgcagtttatctatctttatacatatatttaaactttactctacgaataatataatctatagtactacaataatatcagtgttttagagaatcatataaatgaacagttagacatggtctaaaggacaattgagtattttgacaacaggactctacagttttatctttttagtgtgcatgtgttctcctttttttttgcaaatagcttcacctatataatacttcatccattttattagtacatccatttagggtttagggttaatggtttttatagactaatttttttagtacatctattttattctattttagcctctaaattaagaaaactaaaactctattttagtttttttatttaataatttagatataaaatagaataaaataaagtgactaaaaattaaacaaataccctttaagaaattaaaaaaactaaggaaacatttttcttgtttcgagtagataatgccagcctgttaaacgccgtcgacgagtctaacggacaccaaccagcgaaccagcagcgtcgcgtcgggccaagcgaagcagacggcacggcatctctgtcgctgcctctggacccctctcgagagttccgctccaccgttggacttgctccgctgtcggcatccagaaattgcgtggcggagcggcagacgtgagccggcacggcaggcggcctcctcctcctctcacggcaccggcagctacgggggattcctttcccaccgctccttcgctttcccttcctcgcccgccgtaataaatagacaccccctccacaccctctttccccaacctcgtgttgttcggagcgcacacacacacaaccagatctcccccaaatccacccgtcggcacctccgcttcaaggtacgccgctcgtcctcccccccccccctctctaccttctctagatcggcgttccggtccatgcatggttagggcccggtagttctacttctgttcatgtttgtgttagatccgtgtttgtgttagatccgtgctgctagcgttcgtacacggatgcgacctgtacgtcagacacgttctgattgctaacttgccagtgtttctctttggggaatcctgggatggctctagccgttccgcagacgggatcgatttcatgattttttttgtttcgttgcatagggtttggtttgcccttttcctttatttcaatatatgccgtgcacttgtttgtcgggtcatcttttcatgcttttttttgtcttggttgtgatgatgtggtctggttgggcggtcgttctagatcggagtagaattctgtttcaaactacctggtggatttattaattttggatctgtatgtgtgtgccatacatattcatagttacgaattgaagatgatggatggaaatatcgatctaggataggtatacatgttgatgcgggttttactgatgcatatacagagatgctttttgttcgcttggttgtgatgatgtggtgtggttgggcggtcgttcattcgttctagatcggagtagaatactgtttcaaactacctggtgtatttattaattttggaactgtatgtgtgtgtcatacatcttcatagttacgagtttaagatggatggaaatatcgatctaggataggtatacatgttgatgtgggttttactgatgcatatacatgatggcatatgcagcatctattcatatgctctaaccttgagtacctatctattataataaacaagtatgttttataattattttgatcttgatatacttggatgatggcatatgcagcagctatatgtggatttttttagccctgccttcatacgctatttatttgcttggtactgtttcttttgtcgatgctcaccctgttgtttggtgttacttctgcaggtcgactttaacttagcctaggatccgtcccccagatttgctaggacaccgccgtacccacaccccggatcagttaatatcgtagacataatggccctccctgccatctccacaaccaagcactcccatcatcatgcatgcagcaggctgtgctgtggacctgatcgagtttcaattgatccaagcaagcaagagggatgggagtccttggttgtggactagacttgtccatcttctggattggccaacttaattaatgtatgaaataaaaggatgcacacatagtgacatgctaatcactataatgtgggcatcaaagttgtgtgttatgtgtaattactagttatctgaataaaagagaaagagatcatccatatttcttatcctaaatgaatgtcacgtgtctttataattctttgatgaaccagatgcatttcattaaccaaatccatatacatataaatattaatcatatataattaatatcaattgggttagcaaaacaaatctagtctaggtgtgttttgcattaagacccgtcgtcaagtaggaattccagaaatcaacgcacggtaactaaatcctcgcgctaagctgggtcagtctagaaggccgatctcccgggataacttcgtatagcatacattatacgaagttatgaattccggaccgggttaccgaattcctgcccttaaggccaattgttcaagattcattcaacaattgaaacatctcccatgattaaatcagtataaggttgctatggtcttgcttgacaaagtttttttttgagggaatttcaactaaatttttgagtgaaactatcaaatactgattttaaaaaatttttataaaaggaagcgcagagataaaaggccatctatgctacaaaagtacccaaaaatgtaatcctaaagtatgaattgcattttttttttgtttggacgaaaggaaaggagtattaccacaagaatgatatcatcttcatatttagatcttttttgggtaaagcttgagattctctaaatatagagaaatcagaagaaaaaaaaaccgtgttttggtggttttgatttctagcctccacaataactttgacggcgtcgacaagtctaacggacaccaagcagcgaaccaccagcgccgagccaagcgaagcagacggccgagacgttgacaccttcggcgcggcatctctcgagagttccgctccggcgctccacctccaccgctggcggtttcttattccgttccgttccgcctcctgctctgctcctctccacaccacacggcacgaaaccgttacggcaccggcagcacccagcacgggagaggggattcctttcccaccgttccttccctttccgccccgccgctataaatagccagccccatccccagcttttttccccaatctcatctcctctctcctgttgttcggagcacacgcacaatccgatcgatccccaaatccccttcgtctctcctcgcgagcctcgtggatcccagcttcaaggtacggcgatcgatcatcccccctccttctctctaccttcttttctctagactacatcggatggcgatccatggttagggcctgctagtttcccttcctgttttgtcgatggctgcgaggcacaatagatctgatggcgttatgacggctaacttgtcatgttgttgcgatttatagtccctttaggagatcagtttaatttctcggatggttcgagatcggtggtccatggttagtaccctaagatccgcgctgttagggttcgtagatggaggcgacctgttctgattgttaacttgtcagtacctgggaaatcctgggatggttctagctcgtccgcagatgagatcgatttcatgatcctctgtatcttgtttcgttgcctaggttccgtctaatctatccgtggtatgatgtagatgttttgatcgtgctaactacgtcttgtaaagttaattgtcaggtcataatttttagcatgcctttttttttgtttggttttgtctaattgggctgtcgttctagatcagagtagaagactgttccaaactacctgctggatttattgaacttggatctgtatgtgtgtcacatatcttcataaattcatgattaagatggattgaaatatcttttatctttttggtatggatagttctatatgttggtgtggctttgttagatgtatacatgcttagatacatgaagcaacgtgctgctactgtttagtaattgctgttcatttgtctaataaacagataaggatatgtatttatgttgctgttggttttgctggtactttgttggatacaaatgcttcaatacagaaaacagcatgctgctacgatttaccatttatctaatcttatcatatgtctaatctaataaacaaacatgcttttaaattatcttcatatgcttggatgatggcatacacagcggctatgtgtggttttttaaatacccagcatcatgggcatgcatgacactgctttaatatgctttttatttgcttgagactgtttcttttgtttatactgaccctttagttcggtgactcttctgcaggtcgactttaacttagcctaggatccatggcccagtccaagcacggcctgaccaaggagatgaccatgaagtaccgcatggagggctgcgtggacggccacaagttcgtgatcaccggcgagggcatcggctaccccttcaagggcaagcaggccatcaacctgtgcgtggtggagggcggccccttgcccttcgccgaggacatcttgtccgccgccttcatgtacggcaaccgcgtgttcaccgagtacccccaggacatcgtcgactacttcaagaactcctgccccgccggctacacctgggaccgctccttcctgttcgaggacggcgccgtgtgcatctgcaacgccgacatcaccgtgagcgtggaggagaactgcatgtaccacgagtccaagttctacggcgtgaacttccccgccgacggccccgtgatgaagaagatgaccgacaactgggagccctcctgcgagaagatcatccccgtgcccaagcagggcatcttgaagggcgacgtgagcatgtacctgctgctgaaggacggtggccgcttgcgctgccagttcgacaccgtgtacaaggccaagtccgtgccccgcaagatgcccgactggcacttcatccagcacaagctgacccgcgaggaccgcagcgacgccaagaaccagaagtggcacctgaccgagcacgccatcgcctccggctccgccttgccctccggactcagatctcgatagggtaccaatggccagttaacagatccagctgctgctgttctagggttcacaagtctgcctatttgtcttccccaatggagctatggttgtctggtctggtccttggtcgtgtcccgtttcattgtgtactatttacctgtaatgtgtatccttaagtctggtttgatggtgtctgaaacgttttgctgtggtagagcagcatggaagaactataatgaataagtgatccctaatcattgtgtccaaattttgcttctgctatacccttttgtgctgtttcttatgttttgcttaaaaatttgatctgacaaacaaatttgtctaaattatgctcttgttctgactgtgtactgtacacatttgtattgctaccggtttggcacatagttttctctttgattgcagatcaaacccttctgattgcagattgcttggctatggctgatgtgctcactgttcttctttagcttgtatattgctgatggtggcttggctacggctgaaaaagttgctgctgcgccgacttggcaactgttgctccagtaatgctttgtcctctcttcctagccgccgacttggcacttggcagctgttgctcctgtaatgcgttgttatctcttatctcttgagatgtactatgattttgaggctgtttgacttgtgccagattgccagtgctgatgctatattatctcaggtttttatgctagtatatgttttactgtgtgctgcctgtgtcgagttacgtaatctattgaaccgctatgcgtgttgatgccctgttgttgcttgccagattgatgcccctgttgcttgcagcttgcaagctgtagtgaaatcctaaaattcgaaaccaaatctattctgaacttttgaagatctgtgatgtccggaagaaaagattcaaacagataaacgggactctccagaatctataaaataaatgatcgacaaacgctttgctttggtaggcttcctagttagttagcggaccgggatccgacggcgtcttcaccgccccgccgccgcccgagccggacttgtcgctgccgccgccgctgctcatcttgcgcgcttgtgtccctccctcagtccctgcgttcgcggatcgcgggcgggtgcgacccgtttggactccggccggtagccttcgtgccgacctcgctcggtccaccggtttgtcggggacccacatgtcagtgaaggtacgcgtccacgtccacagaccctactaccccagacgagtccaaatcgctgttccctcacactctcgtgtaccagcgcgcggcggaaagcacctttccaacaaccgccgacacgtcggtcccacgtcggcatgctccaccggtcagtgtttggcgtgtacggctcccggcgacgaacgagtgtggcctaagctttcctactcccatcccatctgagccacacatctctctcacgccacgcgcacaaaacagccaggctcccacgcgcatcaaccggctctccctttccgtgccactcgcccccaagccccaaaccctcgccgccgcctccgagacagccgccgccacctaggccatggccaccgccgccgccgcgtctaccgcgctcactggcgccactaccgctgcgcccaaggcgaggcgccgggcgcacctcctggccacccgccgcgccctcgccgcgcccatcaggtgctcagcggcgtcacccgccatgccgatggctcccccggccaccccgctccggccgtggggccccaccgagccccgcaagggtgctgacatcctcgtcgagtccctcgagcgctgcggcgtccgcgacgtcttcgcctaccccggcggcgcgtcgatggagatccaccaggcactcacccgctcccccgtcatcgccaaccacctcttccgccacgagcaaggggaggcctttgccgcctccggctacgcgcgctcctcgggccgcgtcggcgtctgcatcgccacctccggccccggcgccaccaacctagtctccgcgctcgccgacgcgctgctcgattccgtcccgatggtcgccatcacgggacaggtggcgcgacgcatgattggcaccgacgccttccaggagacgcccatcgtcgaggtcacgcgctccatcaccaagcacaactacctggtcctcgacgtcgacgacatcccccgcgtcgtgcaggaggctttcttcctcgcctcctctggtcgaccagggccggtgcttgtcgacatccccaaggacatccagcagcagatggcggtgcctgtctgggacaagcccatgagtctgcctgggtacattgcgcgccttcccaagccccctgcgactgagttgcttgagcaggtgctgcgtcttgttggtgaatcgcggcgccctgttctttatgtgggcggtggctgcgcagcatctggtgaggagttgcgacgctttgtggagctgactggaatcccggtcacaactactcttatgggcctcggcaacttccccagcgacgacccactgtctctgcgcatgctaggtatgcatgggacggtgtatgcaaattatgcagtggataaggccgatctgttgcttgcacttggtgtgcggtttgatgatcgcgtgacagggaagattgaggcttttgcaagcagggctaagattgtgcacgttgatattgatccggctgagattggcaagaacaagcagccacatgtgtccatctgtgcagatgttaagcttgctttgcagggcatgaatgctcttcttgaaggaagcacatcaaagaagagctttgactttggctcatggaacgatgagttggatcagcagaagagggaattcccccttgggtataaaacatctaatgaggagatccagccacaatatgctattcaggttcttgatgagctgacgaaaggcgaggccatcatcggcacaggtgttgggcagcaccagatgtgggcggcacagtactacacttacaagcggccaaggcagtggttgtcttcagctggtcttggggctatgggatttggtttgccggctgctgctggtgcttctgtggcaaacccaggtgtcactgttgttgacatcgatggagatggtagctttctcatgaacgttcaggagctagctatgatccgaattgagaacctcccagtgaaggtctttgtgctaaacaaccagcacctggggatggtggtgcagttggaggacaggttctataaggccaacagagcgcacacatacttgggaaacccagagaatgaaagtgagatatatccagatttcgtgacgatcgccaaagggttcaacattccagccgtccgtgtgacaaagaagaacgaagtccgcgcagcgataaagaagatgctcgagactccagggccgtacctcttggatataatcgtcccacaccaggagcatgtgttgcctatgatccctagtggtggggctttcaaggatatgatcctggatggtgatggcaggactgtgtactgacttcgaataggtacccggggatcctctagtgccgtgggtcgtttaagctgccgctgtacctgtgtcgtctggtgccttctggtgtacctgggaggttgtcgtctatcaagtatctgtggttggtgtcatgagtcagtgagtcccaatactgttcgtgtcctgtgtgcattatacccaaaactgttatgggcaaatcatgaataagcttgatgttcgaacttaaaagtctctgctcaatatggtattatggttgtttttgttcgtctcctaatatttgcctgggatcaaattttattggctggtgttcatttgacctccatgttcttgctaggctccattttttactctacagccataatatgtttgattgtttggtttgttctttgttgtacacctggttctgtcgagcttagttttcgacactggcttacagcttaacatgttgctattttattgggttctgattgctattttattgggttctgattgctagtttttgctgaatccaaaaaccatgttatttatttaagcgatccaggttattattatgatggtggctaagtttttttttttccaagggtaaattttctggattctccagtgtttctgtggccgaattcaatcactagagtcgacctgcaaagcttcggtccgggcctagaaggcccgcgccacttacgcttgattccgatgacttcgtaggttcctagctcaagccgctcgtgtccaagcgtcacttacgattagctaatgattacggcatctaggaccgactagttcttatgtgcttctagtctccaaatgtggttgatagttattttgctctaagatcaacagtaatgaagtataaatcatcgttgtggtgtgctactcggttaattgagcattaacacacacaaacatgacgaggatggtataatctccaaaaatgtgtactttgttaggtgggaccctatagccttgattaatgtgctatgttaggcatgcctggaaacgtgtgacgcatatgttttgtgaacctgttgatattatatgtgcttttatattaccatattttattaaaatactaatatttattactagtaagatataacattctatctagcttaaaaactaaccataaatattccataataactagatttaccaaactaatatactaaatatacataataaatacaaaattaacaagacaataatcaatatttatgagcttaatatatttagacattatggttggtcgacgataatcatgctaacttttcgtaattgcttgattgaaatatgcttagaataatgcctctttgttctacatggcaaatagggaccattatggtgtaacaccctgggaaccacaaacaccccgaaatgctactaaactacacaactaaccttcatatataaaatttcgacagcatctcctttgaaaatttgcatagacgtggaagcaacagagtataaacagatctgcgtttaaacgtgcaagcgctactagacaattcagtacattaaaaacgtccgcaatgtgttattaagttgtctaagcgtcaatttgtttacaccacaatatatcctgcca

SEQ ID NO: 32 - DNA, 16455 bp, synthetic construct
  misc_feature 1..16455: note = PHP94636
  source 1..16455: mol_type = other DNA
gtttacccgccaatatatcctgtcaaacactgcggccgcacttgaccgcggatggagccggagctgtggtgaggccatcgacgggaggtgggggagaacacagtctcagtgttctttgtgagtccgcaaggtttttagcttttctgtattaattaaggttgctgttggctgtagaatacggtcgtggaagagctgtatcggtagctactacgtaagctattatatactggaagtctggagctcgtcgatctccggtcgtcttcctccatttctcctcgtcttgctttgactgctgctaccatttgcttctgttttctgatgaagcatgccatgtcggccaccagtgtttgtgtggtttttgcagggaatggctttcaagtgctgtgattgaatggccctcgtcgtcctcggctgagctcacatggacgcgtcatgtgagtgagatatatgatcatatgatgagtggggttcgggtgagtgcgtacttgaagtaggatcccgctttcactcattcattcattggcctttaaaccgggaaattttcgcgaggagatggagggaagcaagcagggtgacgagtgcagagtgccgcgagcgctttgtcaaaaggcaccgccgtaggcaaaaaaatcaatggccctgactgactcgatggtagtactactgtagagactagagagggttgctccccatatcttcgtgtgacttttactccagcattgcatttccgtcattgagacgttaattaatagcagctttcgggacagatgactgtggccatgtttcgtcacggccgcttcgtgccagctgggggtactatagtactgtgattttgttagtaaaaactttcattaggccaccattgacgaccgggccttcgcttttgctgcgctaattaaccatttcccggcgaccgaagggaacatgaacatgccccgacacatgagggcatgaggactagtgttctccctgtcgttcgttgacttgactagtgatagtttaaacgctcttcaactggaagagcggttactaccggttcactagctagctgctaatcgagctagttaccctatgaggtgacatgaagcgctcacggttactatgacggttagcttcacgactgttggtggcagtagcgtacgacttagctatagttccggacttacccttaagataacttcgtatagcatacattatacgaagttatgggcccacgcgtgaagagcggttaccagagctggtcacctttgtccaccaagatggaactgtcttcggccagaatggccatctggattcagcaggcctagaaggccatttatcgctatcaactttgtatagaaaagttgggccgaattcgagctcggtacggccagaatggcccggaccgggttaccaagcggccgcgaattcaagcttccttttgtctcccttttgtctcccttttgtctcccttttgtctcccttttgtctcccttttgtctcccttttgtctcccttttgtctcgaggacatctccactgacgtaagggatgacgcacaatcccactatccttcgcaagacccttcctctatataaggaagttcatttcatttggagaggaggatcccatggcggccaatgcgggcggcggtggagcgggaggaggcagcggcagcggcagcgtggctgcgccggcggtgtgccgccccagcggctcgcggtggacgccgacgccggagcagatcaggatgctgaaggagctctactacggctgcggcatccggtcgcccagctcggagcagatccagcgcatcaccgccatgctgcggcagcacggcaagatcgagggcaagaacgtcttctactggttccagaaccacaaggcccgcgagcgccagaagcgccgcctcaccagcctcgacgtcaacgtgcccgccgccggcgcggccgacgccaccaccagccaactcggcgtcctctcgctgtcgtcgccgccgccttcaggcgcggcgcctccctcgcccaccctcggcttctacgccgccggcaatggcggcggatcggctgtgctgctggacacgagttccgactggggcagcagcggcgctgctatggccaccgagacatgcttcctgcaggactacatgggcgtgacggacacgggcagctcgtcgcagtggccacgcttctcgtcgtcggacacgataatggcggcggccgcggcgcgggcggcgacgacgcgggcgcccgagacgctccctctcttcccgacctgcggcgacgacggcggcagcggtagcagcagctacttgccgttctggggtgccgcgtccacaactgccggcgccacttcttccgttgcgatccaacagcaacaccagctgcaggagcagtacagcttttacagcaacagcaacagcacccagctggccggcaccggcaaccaagacgtatcggcaacagcagcagcagccgccgccctggagctgagcctcagctcatggtgctccccttaccctgctgcagggagtatgtgagagcaacgcgagctgccactgctcttcactgatgtctctggaatggaaggaggaggaagtgagcatagcgttggtgcgttgctgtcaagggcgaattgtaccacatggttaacctagacttgtccatcttctggattggccaacttaattaatgtatgaaataaaaggatgcacacatagtgacatgctaatcactataatgtgggcatcaaagttgtgtgttatgtgtaattactagttatctgaataaaagagaaagagatcatccatatttcttatcctaaatgaatgtcacgtgtctttataattctttgatgaaccagatgcatttcattaaccaaatccatatacatataaatattaatcatatataattaatatcaattgggttagcaaaacaaatctagtctaggtgtgttttgcgaatgcggccgccaccgcggtggagctcgaattccggtccgggcctagaaggccagcttcaagtttgtacaaaaaagcaggctccggccagaatggcccggaccgggttaccgaattcttaccctagctccctgcggctgttacgcggtcccccatcaatcttctgttcttgcggttgtagcctgtgtaacagtgctagagtatgtatgataaataggttttaagtctgcttacatgacattttttattgtggaagagacatataaaaattagagagagtggttctcatgcaacggcggacggcccggtgctaaaagagcttcaagacaaaataatgaaacaggaagagagtagatttatctaagagccaactttattatatgaatgtgtttattgttggctttagatgatatggtaaggagttagagctaataatagataggctctattattattattattaattaaactcgctctaaggaggaaagtgggaggaagggacgaggacgaagactactggaagcatcgtgcatggatgatggatgtggtgtctcttaatgtaggtggccggaggatgtacgtgttaattgcgcgataagcactcagatccaaccgcaaactacctccacactgacacactgatagagagaaagagagacctccgacgactgccgccgcagatgagccacgtacgtatacgacgtctgccggccggctcaggctgccgccatcaccctgctcgaaagtcgcgttaggcggcgccagctacataggagtatctagtctagccagttagtatactactactgcgctgatgatgaattaactctgcatagatactgtacttgcctccctccaacacccaaccacctcctgctcggctcttaataacttggacacggatcgatgccatccaaggaagaacacgacgacgacgacggaacatccaccatgcaagcttgcatccatacgccgatacgcgtgcatccatccatccaccattatttccattttccaccgatcacacgtacacaggcctatttaaggagcgacatcccactgcaactctcctcactctatcagtgatagagtctctagcaaagcacttgccatctaccgaccgccgcattccaaacagcccgacgagctagcagagcggcaggcacctccctcctcaaggaacccatggccactgtgaacaactggctcgctttctccctctccccgcaggagctgccgccctcccagacgacggactccacactcatctcggccgccaccgccgaccatgtctccggcgatgtctgcttcaacatcccccaagattggagcatgaggggatcagagctttcggcgctcgtcgcggagccgaagctggaggacttcctcggcggcatctccttctccgagcagcatcacaaggccaactgcaacatgatacccagcactagcagcacagtttgctacgcgagctcaggtgctagcaccggctaccatcaccagctgtaccaccagcccaccagctcagcgctccacttcgcggactccgtaatggtggcttcctcggccggtgtccacgacggcggtgccatgctcagcgcggccgccgctaacggtgtcgctggcgctgccagtgccaacggcggcggcatcgggctgtccatgattaagaactggctgcggagccaaccggcgcccatgcagccgagggtggcggcggctgagggcgcgcaggggctctctttgtccatgaacatggcggggacgacccaaggcgctgctggcatgccacttctcgctggagagcgcgcacgggcgcccgagagtgtatcgacgtcagcacagggtggagccgtcgtcgtcacggcgccgaaggaggatagcggtggcagcggtgttgccggcgctctagtagccgtgagcacggacacgggtggcagcggcggcgcgtcggctgacaacacggcaaggaagacggtggacacgttcgggcagcgcacgtcgatttaccgtggcgtgacaaggcatagatggactgggagatatgaggcacatctttgggataacagttgcagaagggaagggcaaactcgtaagggtcgtcaagtctatttaggtggctatgataaagaggagaaagctgctagggcttatgatcttgctgctctgaagtactggggtgccacaacaacaacaaattttccagtgagtaactacgaaaaggagctcgaggacatgaagcacatgacaaggcaggagtttgtagcgtctctgagaaggaagagcagtggtttctccagaggtgcatccatttacaggggagtgactaggcatcaccaacatggaagatggcaagcacggattggacgagttgcagggaacaaggatctttacttgggcaccttcagcacccaggaggaggcagcggaggcgtacgacatcgcggcgatcaagttccgcggcctcaacgccgtcaccaacttcgacatgagccgctacgacgtgaagagcatcctggacagcagcgccctccccatcggcagcgccgccaagcgcctcaaggaggccgaggccgcagcgtccgcgcagcaccaccacgccggcgtggtgagctacgacgtcggccgcatcgcctcgcagctcggcgacggcggagccctggcggcggcgtacggcgcgcactaccacggcgccgcctggccgaccatcgcgttccagccgggcgccgccagcacaggcctgtaccacccgtacgcgcagcagccaatgcgcggcggcgggtggtgcaagcaggagcaggaccacgcggtgatcgcggccgcgcacagcctgcaggacctccaccacctgaacctgggcgcggccggcgcgcacgactttttctcggcagggcagcaggccgccgccgctgcgatgcacggcctgggtagcatcgacagtgcgtcgctcgagcacagcaccggctccaactccgtcgtctacaacggcggggtcggcgacagcaacggcgccagcgccgtcggcggcagtggcggtggctacatgatgccgatgagcgctgccggagcaaccactacatcggcaatggtgagccacgagcaggtgcatgcacgggcctacgacgaagccaagcaggctgctcagatggggtacgagagctacctggtgaacgcggagaacaatggtggcggaaggatgtctgcatgggggactgtcgtgtctgcagccgcggcggcagcagcaagcagcaacgacaacatggccgccgacgtcgggcatggcggcgcgcagctcttcagtgtctggaacgacacttaagcgtacctagtggtacctgacatcttatagtctgcaacctctcgtgtctgaattcctatctttatcaagtgttattgcttccacgactataggacagctttcgtcgaaagcttttgctcatgtgatctcgaaggattcatctagtctgatttttcgtgacttgtatcggttttattggattcatccaacatatatcaataaaaaatgagttgtgtttcctttcttcctagttcagttaaaattatttccctcctgcgcttgtgctgtaattgtctgtgtacctgttgtttgtgactgtgttagttcccttggatatgatttcgtatttgatatgtacatggagatagcttagcttcattattggagtatgaagttagtatgacatagtcactctcctggaaaattgacactgcaaaccatatttttattctgaaccacaaatcctagtcagtccgctggcatatgccgtccgtttgctgaatccagaacgtgggtttggagatgtacggctgagatgcctctatgcgaaggggatttcgtggtgaaacgagatgggagtagagcaacgcccgtggaagatgcttcaaacttccacacttttgagcaacgatcggcagtagtaaggtagacgatttcaagatcaaagcatatgaagataaacaacatcaacaacaaaatttgttggggttctatagagagaaacagagctacatacatacactgttttgtatctaccatctgagatgatgaaaagatgaaaaactaaagaatgccccggcgccaacgccaggacacgccgcgcgcgcgtcacccgagccatctcttgacccagccggcgctgtatatttacacacgttgcagcatcgatcaccacctgttcgatcgcgtcgccgtcaccggtaccgagctcgaattccggtccgggcctagaaggccgatctcccgggcacccagctttcttgtacaaagtggccgttaacggatcggccagatccctatagtattttaaaattgcattaacaaacatgtcctaattggtactcctgagatactataccctcctgttttaaaatagttggcattatcgaattatcattttactctttaatgttttctcttcttttaatatattttatgaattttaatgtattttaaaatgttatgcagttcgctctggacttttctgctgcgcctacacttgggtgtactgggcctaaattcagcctgaccgaccgcctgcattgaataatggatgagcaccggtaaaatccgcgtacccaactttcgagaagaaccgagacgtggcgggccgggccaccgacgcacggcaccagcgactgcacacgtcccgccggcgtacgtgtacgtgctgttccctcactggccgcccaatccactcatgcatgcccacgtacacccctgccgtggcgcgcccagatcctaatcctttcgccgttctgcacttctgctgcctataaatggcggcatcgaccgtcacctgcttcaccaccggcgagccacatcgagaacacgatcgagcacacaagcacgaagactcgtttaggagaaaccacaaaccaccaagccgtgcaagcaccaagcttggtcacccggtccgggcctagaaggccagcttcaagtttgtacaaaaaagcaggcttcgaaggagatagaaccgatccaccatgtccaacctgctcacggttcaccagaaccttccggctcttccagtggacgcgacgtccgatgaagtcaggaagaacctcatggacatgttccgcgacaggcaagcgttcagcgagcacacctggaagatgctgctctccgtctgccgctcctgggctgcatggtgcaagctgaacaacaggaagtggttccccgctgagcccgaggacgtgagggattaccttctgtacctgcaagcgcgaggtttgtttctgcttctacctttgatatatatataataattatcattaattagtagtaatataatatttcaaatatttttttcaaaataaaagaatgtagtatatagcaattgcttttctgtagtttataagtgtgtatattttaatttataacttttctaatatatgaccaaaacatggtgatgcctaggtctggcagtgaagaccatccagcaacaccttggacaactgaacatgcttcacaggcgctccggcctcccgcgccccagcgactcgaacgccgtgagcctcgtcatgcgccgcatcaggaaggaaaacgtcgatgccggcgaaagggcaaagcaggccctcgcgttcgagaggaccgatttcgaccaggtccgcagcctgatggagaacagcgacaggtgccaggacattaggaacctggcgttcctcggaattgcatacaacacgctcctcaggatcgcggaaattgcccgcattcgcgtgaaggacattagccgcaccgacggcggcaggatgcttatccacattggcaggaccaagacgctcgtttccaccgcaggcgtcgaaaaggccctcagcctcggagtgaccaagctcgtcgaacgctggatctccgtgtccggcgtcgcggacgacccaaacaactacctcttctgccgcgtccgcaagaacggggtggctgcccctagcgccaccagccaactcagcacgagggccttggaaggtattttcgaggccacccaccgcctgatctacggcgcgaaggatgacagcggtcaacgctacctcgcatggtccgggcactccgcccgcgttggagctgctagggacatggcccgcgccggtgtttccatccccgaaatcatgcaggcgggtggatggacgaacgtgaacattgtcatgaactacattcgcaaccttgacagcgagacgggcgcaatggttcgcctcctggaagatggtgactgagctagacccagctttcttgtacaaagtggccgttaacggatccagacttgtccatcttctggattggccaacttaattaatgtatgaaataaaaggatgcacacatagtgacatgctaatcactataatgtgggcatcaaagttgtgtgttatgtgtaattactagttatctgaataaaagagaaagagatcatccatatttcttatcctaaatgaatgtcacgtgtctttataattctttgatgaaccagatgcatttcattaaccaaatccatatacatataaatattaatcatatataattaatatcaattgggttagcaaaacaaatctagtctaggtgtgttttgcgaatgcggccgccaccgcggtggagctcgaattccggtccgggcctagaaggccagcttcggccgccccgggcaactttattatacaaagttgatagataaatcagatatctggttcctaaggacccggcggaccgattaaactgattcggtccgacgcgttacctaataacttcgtatagcatacattatacgaagttattagctaactaactagtaagcttggtcacccggtccgtcaatattctgattccgatgacttcgtaggttcctagctcaagccgctcgtgtccaagcgtcacttacgattagctaatgattacggcatctaggaccgactagtggcgcgccgactagctagctaaggtacgacttagctatagttccggacttaccggcgccgctagcctgcagtgcagcgtgacccggtcgtgcccctctctagagataatgagcattgcatgtctaagttataaaaaattaccacatattttttttgtcacacttgtttgaagtgcagtttatctatctttatacatatatttaaactttactctacgaataatataatctatagtactacaataatatcagtgttttagagaatcatataaatgaacagttagacatggtctaaaggacaattgagtattttgacaacaggactctacagttttatctttttagtgtgcatgtgttctcctttttttttgcaaatagcttcacctatataatacttcatccattttattagtacatccatttagggtttagggttaatggtttttatagactaatttttttagtacatctattttattctattttagcctctaaattaagaaaactaaaactctattttagtttttttatttaataatttagatataaaatagaataaaataaagtgactaaaaattaaacaaataccctttaagaaattaaaaaaactaaggaaacatttttcttgtttcgagtagataatgccagcctgttaaacgccgtcgacgagtctaacggacaccaaccagcgaaccagcagcgtcgcgtcgggccaagcgaagcagacggcacggcatctctgtcgctgcctctggacccctctcgagagttccgctccaccgttggacttgctccgctgtcggcatccagaaattgcgtggcggagcggcagacgtgagccggcacggcaggcggcctcctcctcctctcacggcaccggcagctacgggggattcctttcccaccgctccttcgctttcccttcctcgcccgccgtaataaatagacaccccctccacaccctctttccccaacctcgtgttgttcggagcgcacacacacacaaccagatctcccccaaatccacccgtcggcacctccgcttcaaggtacgccgctcgtcctcccccccccccctctctaccttctctagatcggcgttccggtccatgcatggttagggcccggtagttctacttctgttcatgtttgtgttagatccgtgtttgtgttagatccgtgctgctagcgttcgtacacggatgcgacctgtacgtcagacacgttctgattgctaacttgccagtgtttctctttggggaatcctgggatggctctagccgttccgcagacgggatcgatttcatgattttttttgtttcgttgcatagggtttggtttgcccttttcctttatttcaatatatgccgtgcacttgtttgtcgggtcatcttttcatgcttttttttgtcttggttgtgatgatgtggtctggttgggcggtcgttctagatcggagtagaattctgtttcaaactacctggtggatttattaattttggatctgtatgtgtgtgccatacatattcatagttacgaattgaagatgatggatggaaatatcgatctaggataggtatacatgttgatgcgggttttactgatgcatatacagagatgctttttgttcgcttggttgtgatgatgtggtgtggttgggcggtcgttcattcgttctagatcggagtagaatactgtttcaaactacctggtgtatttattaattttggaactgtatgtgtgtgtcatacatcttcatagttacgagtttaagatggatggaaatatcgatctaggataggtatacatgttgatgtgggttttactgatgcatatacatgatggcatatgcagcatctattcatatgctctaaccttgagtacctatctattataataaacaagtatgttttataattattttgatcttgatatacttggatgatggcatatgcagcagctatatgtggatttttttagccctgccttcatacgctatttatttgcttggtactgtttcttttgtcgatgctcaccctgttgtttggtgttacttctgcaggtcgactctagaggatcaattcgctagcgaagttcctattccgaagttcctattctctagaaagtataggaacttcagatccaccgggatccaccatggttgaacaagatggattgcacgcaggttctccggccgcttgggtggagaggctattcggctatgactgggcacaacagacaatcggctgctctgatgccgccgtgttccggctgtcagcgcaggggcgcccggttctttttgtcaagaccgacctgtccggtgccctgaatgaactgcaggacgaggcagcgcggctatcgtggctggccacgacgggcgttccttgcgcagctgtgctcgacgttgtcactgaagcgggaagggactggctgctattgggcgaagtgccggggcaggatctcctgtcatctcaccttgctcctgccgagaaagtatccatcatggctgatgcaatgcggcggctgcatacgcttgatccggctacctgcccattcgaccaccaagcgaaacatcgcatcgagcgagcacgtactcggatggaagccggtcttgtcgatcaggatgatctggacgaagagcatcaggggctcgcgccagccgaactgttcgccaggctcaaggcgcgcatgcccgacggcgatgatctcgtcgtgacccatggcgatgcctgcttgccgaatatcatggtggaaaatggccgcttttctggattcatcgactgtggccggctgggtgtggcggaccgctatcaggacatagcgttggctacccgtgatattgctgaagagcttggcggcgaatgggctgaccgcttcctcgtgctttacggtatcgccgctcccgattcgcagcgcatcgccttctatcgccttcttgacgagttcttctgaggatccaccatggttaacctagacttgtccatcttctggattggccaacttaattaatgtatgaaataaaaggatgcacacatagtgacatgctaatcactataatgtgggcatcaaagttgtgtgttatgtgtaattactagttatctgaataaaagagaaagagatcatccatatttcttatcctaaatgaatgtcacgtgtctttataattctttgatgaaccagatgcatttcattaaccaaatccatatacatataaatattaatcatatataattaatatcaattgggttagcaaaacaaatctagtctaggtgtgttttgcaagcttgcatgcctgcagtgcagcgtgacccggtcgtgcccctctctagagataatgagcattgcatgtctaagttataaaaaattaccacatattttttttgtcacacttgtttgaagtgcagtttatctatctttatacatatatttaaactttactctacgaataatataatctatagtactacaataatatcagtgttttagagaatcatataaatgaacagttagacatggtctaaaggacaattgagtattttgacaacaggactctacagttttatctttttagtgtgcatgtgttctcctttttttttgcaaatagcttcacctatataatacttcatccattttattagtacatccatttagggtttagggttaatggtttttatagactaatttttttagtacatctattttattctattttagcctctaaattaagaaaactaaaactctattttagtttttttatttaataatttagatataaaatagaataaaataaagtgactaaaaattaaacaaataccctttaagaaattaaaaaaactaaggaaacatttttcttgtttcgagtagataatgccagcctgttaaacgccgtcgacgagtctaacggacaccaaccagcgaaccagcagcgtcgcgtcgggccaagcgaagcagacggcacggcatctctgtcgctgcctctggacccctctcgagagttccgctccaccgttggacttgctccgctgtcggcatccagaaattgcgtggcggagcggcagacgtgagccggcacggcaggcggcctcctcctcctctcacggcaccggcagctacgggggattcctttcccaccgctccttcgctttcccttcctcgcccgccgtaataaatagacaccccctccacaccctctttccccaacctcgtgttgttcggagcgcacacacacacaaccagatctcccccaaatccacccgtcggcacctccgcttcaaggtacgccgctcgtcctcccccccccccctctctaccttctctagatcggcgttccggtccatgcatggttagggcccggtagttctacttctgttcatgtttgtgttagatccgtgtttgtgttagatccgtgctgctagcgttcgtacacggatgcgacctgtacgtcagacacgttctgattgctaacttgccagtgtttctctttggggaatcctgggatggctctagccgttccgcagacgggatcgatttcatgattttttttgtttcgttgcatagggtttggtttgcccttttcctttatttcaatatatgccgtgcacttgtttgtcgggtcatcttttcatgcttttttttgtcttggttgtgatgatgtggtctggttgggcggtcgttctagatcggagtagaattctgtttcaaactacctggtggatttattaattttggatctgtatgtgtgtgccatacatattcatagttacgaattgaagatgatggatggaaatatcgatctaggataggtatacatgttgatgcgggttttactgatgcatatacagagatgctttttgttcgcttggttgtgatgatgtggtgtggttgggcggtcgttcattcgttctagatcggagtagaatactgtttcaaactacctggtgtatttattaattttggaactgtatgtgtgtgtcatacatcttcatagttacgagtttaagatggatggaaatatcgatctaggataggtatacatgttgatgtgggttttactgatgcatatacatgatggcatatgcagcatctattcatatgctctaaccttgagtacctatctattataataaacaagtatgttttataattattttgatcttgatatacttggatgatggcatatgcagcagctatatgtggatttttttagccctgccttcatacgctatttatttgcttggtactgtttcttttgtcgatgctcaccctgttgtttggtgttacttctgcaggtcgactctagaggatccaccggtcgccaccatggccctgtccaacaagttcatcggcgacgacatgaagatgacctaccacatggacggctgcgtgaacggccactacttcaccgtgaagggcgagggcagcggcaagccctacgagggcacccagacctccaccttcaaggtgaccatggccaacggcggccccctggccttctccttcgacatcctgtccaccgtgttcatgtacggcaaccgctgcttcaccgcctaccccaccagcatgcccgactacttcaagcaggccttccccgacggcatgtcctacgagagaaccttcacctacgaggacggcggcgtggccaccgccagctgggagatcagcctgaagggcaactgcttcgagcacaagtccaccttccacggcgtgaacttccccgccgacggccccgtgatggccaagaagaccaccggctgggacccctccttcgagaagatgaccgtgtgcgacggcatcttgaagggcgacgtgaccgccttcctgatgctgcagggcggcggcaactacagatgccagttccacacctcctacaagaccaagaagcccgtgaccatgccccccaaccacgtggtggagcaccgcatcgccagaaccgacctggacaagggcggcaacagcgtgcagctgaccgagcacgccgtggcccacatcacctccgtggtgcccttctgaagcggccgcaacctagacttgtccatcttctggattggccaacttaattaatgtatgaaataaaaggatgcacacatagtgacatgctaatcactataatgtgggcatcaaagttgtgtgttatgtgtaattactagttatctgaataaaagagaaagagatcatccatatttcttatcctaaatgaatgtcacgtgtctttataattctttgatgaaccagatgcatttcattaaccaaatccatatacatataaatattaatcatatataattaatatcaattgggttagcaaaacaaatctagtctaggtgtgttttgcgaatgcggccgccaccgcggtggagctcgaatgcggccctagcgtatacgaagttcctattccgaagttcctattcttcaaaaagtataggaacttctgtaccgagctcgaattcattccgattaatcgtggcctcttgctcttcaggatgaagagctatgtttaaacgtgcaagcgctactagacaattcagtacattaaaaacgtccgcaatgtgttattaagttgtctaagcgtcaatttgtttacaccacaatatatcctgcca

SEQ ID NO: 33 - DNA, 19104 bp, synthetic construct
  misc_feature 1..19104: note = PHP94682
  source 1..19104: mol_type = other DNA
gtttacccgccaatatatcctgtcaaacactgcggccgcacttgaccgcggatggagccggagctgtggtgaggccatcgacgggaggtgggggagaacacagtctcagtgttctttgtgagtccgcaaggtttttagcttttctgtattaattaaggttgctgttggctgtagaatacggtcgtggaagagctgtatcggtagctactacgtaagctattatatactggaagtctggagctcgtcgatctccggtcgtcttcctccatttctcctcgtcttgctttgactgctgctaccatttgcttctgttttctgatgaagcatgccatgtcggccaccagtgtttgtgtggtttttgcagggaatggctttcaagtgctgtgattgaatggccctcgtcgtcctcggctgagctcacatggacgcgtcatgtgagtgagatatatgatcatatgatgagtggggttcgggtgagtgcgtacttgaagtaggatcccgctttcactcattcattcattggcctttaaaccgggaaattttcgcgaggagatggagggaagcaagcagggtgacgagtgcagagtgccgcgagcgctttgtcaaaaggcaccgccgtaggcaaaaaaatcaatggccctgactgactcgatggtagtactactgtagagactagagagggttgctccccatatcttcgtgtgacttttactccagcattgcatttccgtcattgagacgttaattaatagcagctttcgggacagatgactgtggccatgtttcgtcacggccgcttcgtgccagctgggggtactatagtactgtgattttgttagtaaaaactttcattaggccaccattgacgaccgggccttcgcttttgctgcgctaattaaccatttcccggcgaccgaagggaacatgaacatgccccgacacatgagggcatgaggactagtgttctccctgtcgttcgttgacttgactagtgatagtttaaacgctcttcaactggaagagcggttactaccggttcactagctagctgctaatcgagctagttaccctatgaggtgacatgaagcgctcacggttactatgacggttagcttcacgactgttggtggcagtagcgtacgacttagctatagttccggacttacctagctaataacttcgtatagcatacattatacgaagttatggttaccgaattcgagctcggtaccctggttcacaaactcaatacaacacacagtggagtagggtattacgctccggcggcccgaaccactctaaatccttgtgtcctcgtgtgctcttccaccattaatgactgtaattgcagggacacgaagagttgtagcgcttttgccaacaagatccgctatatgctagtagagtggaacctgcacagcaacaagcatccaataatctgagaataagaattatgtgtggtgatggttctcatctctgcaactcgccattttcgcgagagaaccaaatccaagttggtgaagatcatgatttgggctcatgggctggcatagtagctattacctttgcaattgtggttcgaatctatccgatattctccttttcagggagagctaatgcttatgcttattgggtattttggtttgacactgcttcacgcccaaaaaaaggcaactatgtctgagttggatatggcccaaaaaaaggcagctatgtctgagttggatatggaagtcttctttcgtttagggtgaagtaagaccaagctcatgagcttattatcttaggtcggaacaaattagttgataggcatggcacatttatcaaattataatgattttaacagaaaagcaacacctctttttcagcagcaccagctttgcaagctgcaattgacactccaagcatagtatttgctccaaactcagcctgcatttcgcacaatatcatatctatttccatttggataaaatatattttccagaaatatgggaacagaatcaagatacagaaaaaagttgtggtagtagtggtaagtggaaacacaagtacagtgaaaagatagcattatttctgaacagtcaaattaaccgaaataagtagtatcacatactgcccctaaattgactacacccaatgtaaagaattgcttgagcatattgagccatcagttgtttgtttgtgtaacggatttgacaatgcagagttcaggagcaaaaaaccgcaaaggagagaaagagggaaaggatctcctagtatcccaccttgtggcgcgccctgtcaagtgcatgatggcctggtcgatctgcgtctgctgctgcggttccatcccaacgagtgcctccgacaccttgtcgttgatcacccgcaccgcgtaggcgacccccctggcgaggaacttccgcctctcggaggccccggccgcgtcggcggcggcgccctcgagcgcgcccacgctagccgtagatgctcggtgcacggccttgttggtgtgcaactcgacctcaacggccggtgcgctacgcccgtcaaggatctggcgcgcccgcaccctcgtgatcacggtgggcgcctcccgcctcatgtggccgacgatgaaaagcgccgggttaggggccttggcgcgcaccgccgtattcagggcctcctcgctcttgcgcgagagcaggtgcttccccaggtactcctgcactgacaaggctgccacagcggtggaatttgtcctcacgacttcgccacgtcgtcctcacctccctggcttcccacgactccgccgtatcgaggtgctcggtgggtcgtcttaatccgaagtccgaactaggaagacgagacagagaggtctgaggaatgggcctcgtttgatgttgagctgaattatttttccagcataagcccaggtcttggtccatgaacaaaattactagaaacccagcccagtactacgatctaaaagagggactgccactggatagctctctctagcattctccacgctccaatacagcggcgtcgtgtctatccgggtctatccgcgaacacgtgagaactctccagaaactgctttctcctccacttcatctctctcgctttccctctataaaaagaccccttctaggaattgagggagacagcaagcaccaagcagcgatccgaagctcaatcaattcactcaaacctcttccccaaatcttcgattagatcttcgttgacaagaagactagaaccgaacctgacatgtccaacctgctcacggttcaccagaaccttccggctcttccagtggacgcgacgtccgatgaagtcaggaagaacctcatggacatgttccgcgacaggcaagcgttcagcgagcacacctggaagatgctgctctccgtctgccgctcctgggctgcatggtgcaagctgaacaacaggaagtggttccccgctgagcccgaggacgtgagggattaccttctgtacctgcaagcgcgaggtttgtttctgcttctacctttgatatatatataataattatcattaattagtagtaatataatatttcaaatatttttttcaaaataaaagaatgtagtatatagcaattgcttttctgtagtttataagtgtgtatattttaatttataacttttctaatatatgaccaaaacatggtgatgcctaggtctggcagtgaagaccatccagcaacaccttggacaactgaacatgcttcacaggcgctccggcctcccgcgccccagcgactcgaacgccgtgagcctcgtcatgcgccgcatcaggaaggaaaacgtcgatgccggcgaaagggcaaagcaggccctcgcgttcgagaggaccgatttcgaccaggtccgcagcctgatggagaacagcgacaggtgccaggacattaggaacctggcgttcctcggaattgcatacaacacgctcctcaggatcgcggaaattgcccgcattcgcgtgaaggacattagccgcaccgacggcggcaggatgcttatccacattggcaggaccaagacgctcgtttccaccgcaggcgtcgaaaaggccctcagcctcggagtgaccaagctcgtcgaacgctggatctccgtgtccggcgtcgcggacgacccaaacaactacctcttctgccgcgtccgcaagaacggggtggctgcccctagcgccaccagccaactcagcacgagggccttggaaggtattttcgaggccacccaccgcctgatctacggcgcgaaggatgacagcggtcaacgctacctcgcatggtccgggcactccgcccgcgttggagctgctagggacatggcccgcgccggtgtttccatccccgaaatcatgcaggcgggtggatggacgaacgtgaacattgtcatgaactacattcgcaaccttgacagcgagacgggcgcaatggttcgcctcctggaagatggtgactgagctagacccagctttcttgtacaaagtggccgttaacggatgcagacttgtccatcttctggattggccaacttaattaatgtatgaaataaaaggatgcacacatagtgacatgctaatcactataatgtgggcatcaaagttgtgtgttatgtgtaattactagttatctgaataaaagagaaagagatcatccatatttcttatcctaaatgaatgtcacgtgtctttataattctttgatgaaccagatgcatttcattaaccaaatccatatacatataaatattaatcatatataattaatatcaattgggttagcaaaacaaatctagtctaggtgtgttttgcgaatgcgaccttcttatgtgcttctagtctccaaatgtggttgatagttattttgctctaagatcaacagtaatgaagtataaatcatcgttgtggtgtgctactcggttaattgagcattaacacacacaaacatgacgaggatggtataatctccaaaaatgtgtactttgttaggtcgatcggaagttgaagacaaagaaggtcttaaatcctggctagcaacactgaactatgccagaaaccacatcaaagcatatcggcaagcttcttggcccattatatccaaagacctcagagaaaggtgagcgaaggctcaattcagaagattggaagctgatcaataggatcaagacaatggtgagaacgcttccaaatctcactattccaccagaagatgcatacattatcattgaaacagatgcatgtgcaactggatggggagcagtatgcaagtggaagaaaaacaaggcagacccaagaaatacagagcaaatctgtaggtatgccagtggaaaatttgataagccaaaaggaacctgtgatgcagaaatctatggggttatgaatggcttagaaaagatgagattgttctacttggacaaaagagagatcacagtcagaactgacagtagtgcaatcgaaaggttctacaacaagagtgctgaacacaagccttctgagatcagatggatcaggttcatggactacatcactggtgcaggaccagagatagtcattgaacacataaaagggaagaggaatggtttagctgacatcttgtccaggctcaaagccaaattagctcagaatgaaccaacggaagagatgatcctgcttacacaagccataagggaagtaattccttatccagatcatccatacactgagcaactcagagaatggggaaacaaaattctcgatccattccccacattcaagaaggacatgttcgaaagaacagagcaagcttttatgctaacagaggaaccagttctactctgtgcatgcaggaagcctgcaattcagttagtgtccagaacatctgccaacccaggaaggaaattcttcaagtgcgcaatgaacaaatgccattgctggtactgggcagatctcattgaagaacacattcaagacagaattgatgaatttctcaagaatcttgaagttctgaagaccggtggcgtgcaaacaatggaggaggaacttatgaaggaagtcaccaagctgaagatagaagaggaggagttcgaggaataccaggccacaccaagggctatgtcgccagtagccgcagaagatgtgctagatctccaagacgtaagcaatgacgattgaggaggcattgacgtcagggatgaccgcagcggagagtactgggcccattcagtggatgctccactgagttgtattattgtgtgcttttcggacaagtgtgctgtccactttcttttggcacctgtgccactttattccttgtctgccacgatgcctttgcttagcttgtaagcaaggatcgcagtgcgtgtgtgacaccaccccccttccgacgctctgcctatataaggcaccgtctgtaagctcttacgatcatcggtagttcaccaaggatcggtagttcaccacatgagtatttgagtcaagtttggcttgaataataagaattacacctttccgcaggatccatggcggccaatgcgggcggcggtggagcgggaggaggcagcggcagcggcagcgtggctgcgccggcggtgtgccgccccagcggctcgcggtggacgccgacgccggagcagatcaggatgctgaaggagctctactacggctgcggcatccggtcgcccagctcggagcagatccagcgcatcaccgccatgctgcggcagcacggcaagatcgagggcaagaacgtcttctactggttccagaaccacaaggcccgcgagcgccagaagcgccgcctcaccagcctcgacgtcaacgtgcccgccgccggcgcggccgacgccaccaccagccaactcggcgtcctctcgctgtcgtcgccgccgccttcaggcgcggcgcctccctcgcccaccctcggcttctacgccgccggcaatggcggcggatcggctgtgctgctggacacgagttccgactggggcagcagcggcgctgctatggccaccgagacatgcttcctgcaggactacatgggcgtgacggacacgggcagctcgtcgcagtggccacgcttctcgtcgtcggacacgataatggcggcggccgcggcgcgggcggcgacgacgcgggcgcccgagacgctccctctcttcccgacctgcggcgacgacggcggcagcggtagcagcagctacttgccgttctggggtgccgcgtccacaactgccggcgccacttcttccgttgcgatccaacagcaacaccagctgcaggagcagtacagcttttacagcaacagcaacagcacccagctggccggcaccggcaaccaagacgtatcggcaacagcagcagcagccgccgccctggagctgagcctcagctcatggtgctccccttaccctgctgcagggagtatgtgagagcaacgcgagctgccactgctcttcactgatgtctctggaatggaaggaggaggaagtgagaacagatcattcgacaaagcagcattagtccgttgatcggtggaagaccactcgtcagtgttgagttgaatgtttgatcaataaaatacggcaatgctgtaagggttgttttttatgccattgataatacactgtactgttcagttgttgaactctatttcttagccatgccaagtgcttttcttattttgaataacattacagcaaaaagttgaaagacaaaaaaaaaaacccccgaacagagtgctttgggtcccaagcttctttagactgtgttcggcgttccccctaaatttctccccctatatctcactcacttgtcacatcagcgttctctttccccctatatctccacgctctacagcagttccacctatatcaaacctctataccccaccacaacaatattatatactttcatcttcaactaactcatgtaccttccaatttttttctactaataattatttacgtgcacagaaacttagcaaggagagagagagcgggaatttaaatgctcggcgttaggcttttagtccgctaggtggctagaccgaggttaggacgctagttcactaggggcctagtggtgttttaagacgtcacggtcaccacgcgtggaccgaagcttgcatgcctgcagtgcagcgtgacccggtcgtgcccctctctagagataatgagcattgcatgtctaagttataaaaaattaccacatattttttttgtcacacttgtttgaagtgcagtttatctatctttatacatatatttaaactttactctacgaataatataatctatagtactacaataatatcagtgttttagagaatcatataaatgaacagttagacatggtctaaaggacaattgagtattttgacaacaggactctacagttttatctttttagtgtgcatgtgttctcctttttttttgcaaatagcttcacctatataatacttcatccattttattagtacatccatttagggtttagggttaatggtttttatagactaatttttttagtacatctattttattctattttagcctctaaattaagaaaactaaaactctattttagtttttttatttaataatttagatataaaatagaataaaataaagtgactaaaaattaaacaaataccctttaagaaattaaaaaaactaaggaaacatttttcttgtttcgagtagataatgccagcctgttaaacgccgtcgacgagtctaacggacaccaaccagcgaaccagcagcgtcgcgtcgggccaagcgaagcagacggcacggcatctctgtcgctgcctctggacccctctcgagagttccgctccaccgttggacttgctccgctgtcggcatccagaaattgcgtggcggagcggcagacgtgagccggcacggcaggcggcctcctcctcctctcacggcaccggcagctacgggggattcctttcccaccgctccttcgctttcccttcctcgcccgccgtaataaatagacaccccctccacaccctctttccccaacctcgtgttgttcggagcgcacacacacacaaccagatctcccccaaatccacccgtcggcacctccgcttcaaggtacgccgctcgtcctcccccccccccctctctaccttctctagatcggcgttccggtccatgcatggttagggcccggtagttctacttctgttcatgtttgtgttagatccgtgtttgtgttagatccgtgctgctagcgttcgtacacggatgcgacctgtacgtcagacacgttctgattgctaacttgccagtgtttctctttggggaatcctgggatggctctagccgttccgcagacgggatcgatttcatgattttttttgtttcgttgcatagggtttggtttgcccttttcctttatttcaatatatgccgtgcacttgtttgtcgggtcatcttttcatgcttttttttgtcttggttgtgatgatgtggtctggttgggcggtcgttctagatcggagtagaattctgtttcaaactacctggtggatttattaattttggatctgtatgtgtgtgccatacatattcatagttacgaattgaagatgatggatggaaatatcgatctaggataggtatacatgttgatgcgggttttactgatgcatatacagagatgctttttgttcgcttggttgtgatgatgtggtgtggttgggcggtcgttcattcgttctagatcggagtagaatactgtttcaaactacctggtgtatttattaattttggaactgtatgtgtgtgtcatacatcttcatagttacgagtttaagatggatggaaatatcgatctaggataggtatacatgttgatgtgggttttactgatgcatatacatgatggcatatgcagcatctattcatatgctctaaccttgagtacctatctattataataaacaagtatgttttataattattttgatcttgatatacttggatgatggcatatgcagcagctatatgtggatttttttagccctgccttcatacgctatttatttgcttggtactgtttcttttgtcgatgctcaccctgttgtttggtgttacttctgcaggtcgactttaacttagcctaggatccgcccatggactccagcagcttcctccctgccgccggcgcggagaatggctcggcggcgggcggcgccaacaatggcggcgctgctcagcagcatgcggcgccggcgatccgcgagcaggaccggctgatgccgatcgcgaacgtgatccgcatcatgcggcgcgtgctgccggcgcacgccaagattagcgacgacgccaaggagacgatccaggagtgcgtgtcggagtacatcagcttcatcacgggggaggccaacgagcggtgccagcgggagcagcgcaagaccatcaccgccgaggacgtgctgtgggccatgagccgcctcggcttcgacgactacgtcgagccgctcggcgcctacctccaccgctaccgcgagttcgagggcgacgcgcgcggcgtcgggctcgtccctggggccgccccatcgcgcggcggcgaccaccacccgcactccatgtcgccagcggcgatgctcaagtcccgcgggccagtctccggagccgccatgctaccgcaccaccaccaccaccacgacatgcagatgcacgccgccatgtacgggggaacggccgtgcccccgccggccgggcctcctcaccacggcgggttcctcatgccacacccacagggtagtagccactacctgccttacgcgtacgagcccacgtacggcggtgagcacgcgatggctgcatactatggaggcgccgcgtacgcgcccggcaacggcgggagcggcgacggcagtggcagtggcggcggtggcgggagcgcgtcgcacacaccgcagggcagcggcggcttggagcacccgcacccgttcgcgtacaagtagttatgtacaggtacctgacatcttatagtctgcaacctctcgtgtctgaattcctatctttatcaagtgttattgcttccacgactataggacagctttcgtcgaaagcttttgctcatgtgatctcgaaggattcatctagtctgatttttcgtgacttgtatcggttttattggattcatccaacatatatcaataaaaaatgagttgtgtttcctttcttcctagttcagttaaaattatttccctcctgcgcttgtgctgtaattgtctgtgtacctgttgtttgtgactgtgttagttcccttggatatgatttcgtatttgatatgtacatggagatagcttagcttcattattggagtatgaagttagtatgacatagtcactctcctggaaaattgacactgcaaaccatatttttattctgaaccacaaatcctagtcagtccgctggcatatgccgtccgtttgctgaatccagaacgtgggtttggagatgtacggctgagatgcctctatgcgaaggggatttcgtggtgaaacgagatgggagtagagcaacgcccgtggaagatgcttcaaacttccacacttttgagcaacgatcggcagtagtaaggtagacgatttcaagatcaaagcatatgaagataaacaacatcaacaacaaaatttgttggggttctatagagagaaacagagctacatacatacactgttttgtatctaccatctgagatgatgaaaagatgaaaaactaaagaatgccccggcgccaacgccaggacacgccgcgcgcgcgtcacccgagccatctcttgacccagccggcgctgtatatttacacacgttgcagcatcgatcaccacctgttcgatcgcgtcgccgtcaccggtaccgagctcgaattccggattaagacccgtcgtcaagtaggaattccagaaatcaacgcacggtaactaaatcctcgcgctaagctgggtcagtgcgcacgataacttcgtatagcatacattatacgaagttataacagcggaccgggttaccgaattcctgcccttaaggccaattgttcaagattcattcaacaattgaaacatctcccatgattaaatcagtataaggttgctatggtcttgcttgacaaagtttttttttgagggaatttcaactaaatttttgagtgaaactatcaaatactgattttaaaaaatttttataaaaggaagcgcagagataaaaggccatctatgctacaaaagtacccaaaaatgtaatcctaaagtatgaattgcattttttttttgtttggacgaaaggaaaggagtattaccacaagaatgatatcatcttcatatttagatcttttttgggtaaagcttgagattctctaaatatagagaaatcagaagaaaaaaaaaccgtgttttggtggttttgatttctagcctccacaataactttgacggcgtcgacaagtctaacggacaccaagcagcgaaccaccagcgccgagccaagcgaagcagacggccgagacgttgacaccttcggcgcggcatctctcgagagttccgctccggcgctccacctccaccgctggcggtttcttattccgttccgttccgcctcctgctctgctcctctccacaccacacggcacgaaaccgttacggcaccggcagcacccagcacgggagaggggattcctttcccaccgttccttccctttccgccccgccgctataaatagccagccccatccccagcttttttccccaatctcatctcctctctcctgttgttcggagcacacgcacaatccgatcgatccccaaatccccttcgtctctcctcgcgagcctcgtggatcccagcttcaaggtacggcgatcgatcatcccccctccttctctctaccttcttttctctagactacatcggatggcgatccatggttagggcctgctagtttcccttcctgttttgtcgatggctgcgaggcacaatagatctgatggcgttatgacggctaacttgtcatgttgttgcgatttatagtccctttaggagatcagtttaatttctcggatggttcgagatcggtggtccatggttagtaccctaagatccgcgctgttagggttcgtagatggaggcgacctgttctgattgttaacttgtcagtacctgggaaatcctgggatggttctagctcgtccgcagatgagatcgatttcatgatcctctgtatcttgtttcgttgcctaggttccgtctaatctatccgtggtatgatgtagatgttttgatcgtgctaactacgtcttgtaaagttaattgtcaggtcataatttttagcatgcctttttttttgtttggttttgtctaattgggctgtcgttctagatcagagtagaagactgttccaaactacctgctggatttattgaacttggatctgtatgtgtgtcacatatcttcataaattcatgattaagatggattgaaatatcttttatctttttggtatggatagttctatatgttggtgtggctttgttagatgtatacatgcttagatacatgaagcaacgtgctgctactgtttagtaattgctgttcatttgtctaataaacagataaggatatgtatttatgttgctgttggttttgctggtactttgttggatacaaatgcttcaatacagaaaacagcatgctgctacgatttaccatttatctaatcttatcatatgtctaatctaataaacaaacatgcttttaaattatcttcatatgcttggatgatggcatacacagcggctatgtgtggttttttaaatacccagcatcatgggcatgcatgacactgctttaatatgctttttatttgcttgagactgtttcttttgtttatactgaccctttagttcggtgactcttctgcaggtcgactttaacttagcctaggatccatggcccagtccaagcacggcctgaccaaggagatgaccatgaagtaccgcatggagggctgcgtggacggccacaagttcgtgatcaccggcgagggcatcggctaccccttcaagggcaagcaggccatcaacctgtgcgtggtggagggcggccccttgcccttcgccgaggacatcttgtccgccgccttcatgtacggcaaccgcgtgttcaccgagtacccccaggacatcgtcgactacttcaagaactcctgccccgccggctacacctgggaccgctccttcctgttcgaggacggcgccgtgtgcatctgcaacgccgacatcaccgtgagcgtggaggagaactgcatgtaccacgagtccaagttctacggcgtgaacttccccgccgacggccccgtgatgaagaagatgaccgacaactgggagccctcctgcgagaagatcatccccgtgcccaagcagggcatcttgaagggcgacgtgagcatgtacctgctgctgaaggacggtggccgcttgcgctgccagttcgacaccgtgtacaaggccaagtccgtgccccgcaagatgcccgactggcacttcatccagcacaagctgacccgcgaggaccgcagcgacgccaagaaccagaagtggcacctgaccgagcacgccatcgcctccggctccgccttgccctccggactcagatctcgatagggtaccaatggccagttaacagatccagctgctgctgttctagggttcacaagtctgcctatttgtcttccccaatggagctatggttgtctggtctggtccttggtcgtgtcccgtttcattgtgtactatttacctgtaatgtgtatccttaagtctggtttgatggtgtctgaaacgttttgctgtggtagagcagcatggaagaactataatgaataagtgatccctaatcattgtgtccaaattttgcttctgctatacccttttgtgctgtttcttatgttttgcttaaaaatttgatctgacaaacaaatttgtctaaattatgctcttgttctgactgtgtactgtacacatttgtattgctaccggtttggcacatagttttctctttgattgcagatcaaacccttctgattgcagattgcttggctatggctgatgtgctcactgttcttctttagcttgtatattgctgatggtggcttggctacggctgaaaaagttgctgctgcgccgacttggcaactgttgctccagtaatgctttgtcctctcttcctagccgccgacttggcacttggcagctgttgctcctgtaatgcgttgttatctcttatctcttgagatgtactatgattttgaggctgtttgacttgtgccagattgccagtgctgatgctatattatctcaggtttttatgctagtatatgttttactgtgtgctgcctgtgtcgagttacgtaatctattgaaccgctatgcgtgttgatgccctgttgttgcttgccagattgatgcccctgttgcttgcagcttgcaagctgtagtgaaatcctaaaattcgaaaccaaatctattctgaacttttgaagatctgtgatgtccggaagaaaagattcaaacagataaacgggactctccagaatctataaaataaatgatcgacaaacgctttgctttggtaggcttcctagttagttagcggaccgggatccgacggcgtcttcaccgccccgccgccgcccgagccggacttgtcgctgccgccgccgctgctcatcttgcgcgcttgtgtccctccctcagtccctgcgttcgcggatcgcgggcgggtgcgacccgtttggactccggccggtagccttcgtgccgacctcgctcggtccaccggtttgtcggggacccacatgtcagtgaaggtacgcgtccacgtccacagaccctactaccccagacgagtccaaatcgctgttccctcacactctcgtgtaccagcgcgcggcggaaagcacctttccaacaaccgccgacacgtcggtcccacgtcggcatgctccaccggtcagtgtttggcgtgtacggctcccggcgacgaacgagtgtggcctaagctttcctactcccatcccatctgagccacacatctctctcacgccacgcgcacaaaacagccaggctcccacgcgcatcaaccggctctccctttccgtgccactcgcccccaagccccaaaccctcgccgccgcctccgagacagccgccgccacctaggccatggccaccgccgccgccgcgtctaccgcgctcactggcgccactaccgctgcgcccaaggcgaggcgccgggcgcacctcctggccacccgccgcgccctcgccgcgcccatcaggtgctcagcggcgtcacccgccatgccgatggctcccccggccaccccgctccggccgtggggccccaccgagccccgcaagggtgctgacatcctcgtcgagtccctcgagcgctgcggcgtccgcgacgtcttcgcctaccccggcggcgcgtcgatggagatccaccaggcactcacccgctcccccgtcatcgccaaccacctcttccgccacgagcaaggggaggcctttgccgcctccggctacgcgcgctcctcgggccgcgtcggcgtctgcatcgccacctccggccccggcgccaccaacctagtctccgcgctcgccgacgcgctgctcgattccgtcccgatggtcgccatcacgggacaggtggcgcgacgcatgattggcaccgacgccttccaggagacgcccatcgtcgaggtcacgcgctccatcaccaagcacaactacctggtcctcgacgtcgacgacatcccccgcgtcgtgcaggaggctttcttcctcgcctcctctggtcgaccagggccggtgcttgtcgacatccccaaggacatccagcagcagatggcggtgcctgtctgggacaagcccatgagtctgcctgggtacattgcgcgccttcccaagccccctgcgactgagttgcttgagcaggtgctgcgtcttgttggtgaatcgcggcgccctgttctttatgtgggcggtggctgcgcagcatctggtgaggagttgcgacgctttgtggagctgactggaatcccggtcacaactactcttatgggcctcggcaacttccccagcgacgacccactgtctctgcgcatgctaggtatgcatgggacggtgtatgcaaattatgcagtggataaggccgatctgttgcttgcacttggtgtgcggtttgatgatcgcgtgacagggaagattgaggcttttgcaagcagggctaagattgtgcacgttgatattgatccggctgagattggcaagaacaagcagccacatgtgtccatctgtgcagatgttaagcttgctttgcagggcatgaatgctcttcttgaaggaagcacatcaaagaagagctttgactttggctcatggaacgatgagttggatcagcagaagagggaattcccccttgggtataaaacatctaatgaggagatccagccacaatatgctattcaggttcttgatgagctgacgaaaggcgaggccatcatcggcacaggtgttgggcagcaccagatgtgggcggcacagtactacacttacaagcggccaaggcagtggttgtcttcagctggtcttggggctatgggatttggtttgccggctgctgctggtgcttctgtggcaaacccaggtgtcactgttgttgacatcgatggagatggtagctttctcatgaacgttcaggagctagctatgatccgaattgagaacctcccagtgaaggtctttgtgctaaacaaccagcacctggggatggtggtgcagttggaggacaggttctataaggccaacagagcgcacacatacttgggaaacccagagaatgaaagtgagatatatccagatttcgtgacgatcgccaaagggttcaacattccagccgtccgtgtgacaaagaagaacgaagtccgcgcagcgataaagaagatgctcgagactccagggccgtacctcttggatataatcgtcccacaccaggagcatgtgttgcctatgatccctagtggtggggctttcaaggatatgatcctggatggtgatggcaggactgtgtactgacttcgaataggtacccggggatcctctagtgccgtgggtcgtttaagctgccgctgtacctgtgtcgtctggtgccttctggtgtacctgggaggttgtcgtctatcaagtatctgtggttggtgtcatgagtcagtgagtcccaatactgttcgtgtcctgtgtgcattatacccaaaactgttatgggcaaatcatgaataagcttgatgttcgaacttaaaagtctctgctcaatatggtattatggttgtttttgttcgtctcctaatatttgcctgggatcaaattttattggctggtgttcatttgacctccatgttcttgctaggctccattttttactctacagccataatatgtttgattgtttggtttgttctttgttgtacacctggttctgtcgagcttagttttcgacactggcttacagcttaacatgttgctattttattgggttctgattgctattttattgggttctgattgctagtttttgctgaatccaaaaaccatgttatttatttaagcgatccaggttattattatgatggtggctaagtttttttttttccaagggtaaattttctggattctccagtgtttctgtggccgaattcaatcactagagtcgacctgcaaagcttcggtccgggcctagaaggcccgcgccacttacgcttgattccgatgacttcgtaggttcctagctcaagccgctcgtgtccaagcgtcacttacgattagctaatgattacggcatctaggaccgactagctagctagctaagagctcggtaccgagctcgaattcattccgattaatcgtggcctcttgctcttcaggatgaagagctatgtttaaacgtgcaagcgctactagacaattcagtacattaaaaacgtccgcaatgtgttattaagttgtctaagcgtcaatttgtttacaccacaatatatcctgcca

SEQ ID NO: 34 - DNA, 20402 bp, synthetic construct
  misc_feature 1..20402: note = PHP94684
  source 1..20402: mol_type = other DNA
gtttacccgccaatatatcctgtcaaacactgcggccgcacttgaccgcggatggagccggagctgtggtgaggccatcgacgggaggtgggggagaacacagtctcagtgttctttgtgagtccgcaaggtttttagcttttctgtattaattaaggttgctgttggctgtagaatacggtcgtggaagagctgtatcggtagctactacgtaagctattatatactggaagtctggagctcgtcgatctccggtcgtcttcctccatttctcctcgtcttgctttgactgctgctaccatttgcttctgttttctgatgaagcatgccatgtcggccaccagtgtttgtgtggtttttgcagggaatggctttcaagtgctgtgattgaatggccctcgtcgtcctcggctgagctcacatggacgcgtcatgtgagtgagatatatgatcatatgatgagtggggttcgggtgagtgcgtacttgaagtaggatcccgctttcactcattcattcattggcctttaaaccgggaaattttcgcgaggagatggagggaagcaagcagggtgacgagtgcagagtgccgcgagcgctttgtcaaaaggcaccgccgtaggcaaaaaaatcaatggccctgactgactcgatggtagtactactgtagagactagagagggttgctccccatatcttcgtgtgacttttactccagcattgcatttccgtcattgagacgttaattaatagcagctttcgggacagatgactgtggccatgtttcgtcacggccgcttcgtgccagctgggggtactatagtactgtgattttgttagtaaaaactttcattaggccaccattgacgaccgggccttcgcttttgctgcgctaattaaccatttcccggcgaccgaagggaacatgaacatgccccgacacatgagggcatgaggactagtgttctccctgtcgttcgttgacttgactagtgatagtttaaacgctcttcaactggaagagcggttactaccggttcactagctagctgctaatcgagctagttaccctatgaggtgacatgaagcgctcacggttactatgacggttagcttcacgactgttggtggcagtagcgtacgacttagctatagttccggacttacccagatcttggccaataacttcgtatagcatacattatacgaagttataggtacaattcgagctcggtaccctggttcacaaactcaatacaacacacagtggagtagggtattacgctccggcggcccgaaccactctaaatccttgtgtcctcgtgtgctcttccaccattaatgactgtaattgcagggacacgaagagttgtagcgcttttgccaacaagatccgctatatgctagtagagtggaacctgcacagcaacaagcatccaataatctgagaataagaattatgtgtggtgatggttctcatctctgcaactcgccattttcgcgagagaaccaaatccaagttggtgaagatcatgatttgggctcatgggctggcatagtagctattacctttgcaattgtggttcgaatctatccgatattctccttttcagggagagctaatgcttatgcttattgggtattttggtttgacactgcttcacgcccaaaaaaaggcaactatgtctgagttggatatggcccaaaaaaaggcagctatgtctgagttggatatggaagtcttctttcgtttagggtgaagtaagaccaagctcatgagcttattatcttaggtcggaacaaattagttgataggcatggcacatttatcaaattataatgattttaacagaaaagcaacacctctttttcagcagcaccagctttgcaagctgcaattgacactccaagcatagtatttgctccaaactcagcctgcatttcgcacaatatcatatctatttccatttggataaaatatattttccagaaatatgggaacagaatcaagatacagaaaaaagttgtggtagtagtggtaagtggaaacacaagtacagtgaaaagatagcattatttctgaacagtcaaattaaccgaaataagtagtatcacatactgcccctaaattgactacacccaatgtaaagaattgcttgagcatattgagccatcagttgtttgtttgtgtaacggatttgacaatgcagagttcaggagcaaaaaaccgcaaaggagagaaagagggaaaggatctcctagtatcccaccttgtggcgcgccctgtcaagtgcatgatggcctggtcgatctgcgtctgctgctgcggttccatcccaacgagtgcctccgacaccttgtcgttgatcacccgcaccgcgtaggcgacccccctggcgaggaacttccgcctctcggaggccccggccgcgtcggcggcggcgccctcgagcgcgcccacgctagccgtagatgctcggtgcacggccttgttggtgtgcaactcgacctcaacggccggtgcgctacgcccgtcaaggatctggcgcgcccgcaccctcgtgatcacggtgggcgcctcccgcctcatgtggccgacgatgaaaagcgccgggttaggggccttggcgcgcaccgccgtattcagggcctcctcgctcttgcgcgagagcaggtgcttccccaggtactcctgcactgacaaggctgccacagcggtggaatttgtcctcacgacttcgccacgtcgtcctcacctccctggcttcccacgactccgccgtatcgaggtgctcggtgggtcgtcttaatccgaagtccgaactaggaagacgagacagagaggtctgaggaatgggcctcgtttgatgttgagctgaattatttttccagcataagcccaggtcttggtccatgaacaaaattactagaaacccagcccagtactacgatctaaaagagggactgccactggatagctctctctagcattctccacgctccaatacagcggcgtcgtgtctatccgggtctatccgcgaacacgtgagaactctccagaaactgctttctcctccacttcatctctctcgctttccctctataaaaagaccccttctaggaattgagggagacagcaagcaccaagcagcgatccgaagctcaatcaattcactcaaacctcttccccaaatcttcgattagatcttcgttgacaagaagactagaaccgaacctgacatgtccaacctgctcacggttcaccagaaccttccggctcttccagtggacgcgacgtccgatgaagtcaggaagaacctcatggacatgttccgcgacaggcaagcgttcagcgagcacacctggaagatgctgctctccgtctgccgctcctgggctgcatggtgcaagctgaacaacaggaagtggttccccgctgagcccgaggacgtgagggattaccttctgtacctgcaagcgcgaggtttgtttctgcttctacctttgatatatatataataattatcattaattagtagtaatataatatttcaaatatttttttcaaaataaaagaatgtagtatatagcaattgcttttctgtagtttataagtgtgtatattttaatttataacttttctaatatatgaccaaaacatggtgatgcctaggtctggcagtgaagaccatccagcaacaccttggacaactgaacatgcttcacaggcgctccggcctcccgcgccccagcgactcgaacgccgtgagcctcgtcatgcgccgcatcaggaaggaaaacgtcgatgccggcgaaagggcaaagcaggccctcgcgttcgagaggaccgatttcgaccaggtccgcagcctgatggagaacagcgacaggtgccaggacattaggaacctggcgttcctcggaattgcatacaacacgctcctcaggatcgcggaaattgcccgcattcgcgtgaaggacattagccgcaccgacggcggcaggatgcttatccacattggcaggaccaagacgctcgtttccaccgcaggcgtcgaaaaggccctcagcctcggagtgaccaagctcgtcgaacgctggatctccgtgtccggcgtcgcggacgacccaaacaactacctcttctgccgcgtccgcaagaacggggtggctgcccctagcgccaccagccaactcagcacgagggccttggaaggtattttcgaggccacccaccgcctgatctacggcgcgaaggatgacagcggtcaacgctacctcgcatggtccgggcactccgcccgcgttggagctgctagggacatggcccgcgccggtgtttccatccccgaaatcatgcaggcgggtggatggacgaacgtgaacattgtcatgaactacattcgcaaccttgacagcgagacgggcgcaatggttcgcctcctggaagatggtgactgaggtacccaacctagacttgtccatcttctggattggccaacttaattaatgtatgaaataaaaggatgcacacatagtgacatgctaatcactataatgtgggcatcaaagttgtgtgttatgtgtaattactagttatctgaataaaagagaaagagatcatccatatttcttatcctaaatgaatgtcacgtgtctttataattctttgatgaaccagatgcatttcattaaccaaatccatatacatataaatattaatcatatataattaatatcaattgggttagcaaaacaaatctagtctaggtgtgttttgcgatccgatatcgatctcccatccttaaaacaccactaggcccctagtgaactagcgtcctaacctcggtctagccacctagcggactaaaagcctaacgccgagccccgggtggccttctaggcccggaccgggtgaccccgctctctctctccttgctaagtttctgtgcacgtaaataattattagtagaaaaaaattggaaggtacatgagttagttgaagatgaaagtatataatattgttgtggtggggtatagaggtttgatataggtggaactgctgtagagcgtggagatatagggggaaagagaacgctgatgtgacaagtgagtgagatatagggggagaaatttagggggaacgccgaacacagtctaaagaagcttgggacccaaagcactctgttcgggggtttttttttttgtctttcaactttttgctgtaatgttattcaaaataagaaaagcacttggcatggctaagaaatagagttcaacaactgaacagtacagtgtattatcaatggcataaaaaacaacccttacagcattgccgtattttattgatcaaacattcaactcaacactgacgagtggtcttccaccgatcaacggactaatgctgctttgtcgaatgatctgttctcacttcctcctccttccattccagagacatcagtgaagagcagtggcagctcgcgttgctctcacatactccctgcagcagggtaaggggagcaccatgagctgaggctcagctccagggcggcggctgctgctgctgttgccgatacgtcttggttgccggtgccggccagctgggtgctgttgctgttgctgtaaaagctgtactgctcctgcagctggtgttgctgttggatcgcaacggaagaagtggcgccggcagttgtggacgcggcaccccagaacggcaagtagctgctgctaccgctgccgccgtcgtcgccgcaggtcgggaagagagggagcgtctcgggcgcccgcgtcgtcgccgcccgcgccgcggccgccgccattatcgtgtccgacgacgagaagcgtggccactgcgacgagctgcccgtgtccgtcacgcccatgtagtcctgcaggaagcatgtctcggtggccatagcagcgccgctgctgccccagtcggaactcgtgtccagcagcacagccgatccgccgccattgccggcggcgtagaagccgagggtgggcgagggaggcgccgcgcctgaaggcggcggcgacgacagcgagaggacgccgagttggctggtggtggcgtcggccgcgccggcggcgggcacgttgacgtcgaggctggtgaggcggcgcttctggcgctcgcgggccttgtggttctggaaccagtagaagacgttcttgccctcgatcttgccgtgctgccgcagcatggcggtgatgcgctggatctgctccgagctgggcgaccggatgccgcagccgtagtagagctccttcagcatcctgatctgctccggcgtcggcgtccaccgcgagccgctggggcggcacaccgccggcgcagccacgctgccgctgccgctgcctcctcccgctccaccgccgcccgcattggccgccatggatcctgcagaagtaacaccaaacaacagggtgagcatcggacaaaagaaacagtaccaagcaaataaatagcgtatgaaggcagggctaaaaaatccacatatagctgctgcatatgccatcatccaagtatatcaagatcaaaataattataaaacatacttgtttattataatagataggtactcaaggttagagcatatgaatagatgccgcatatgccatcatgtatatgcatcagtaaaacccacatcaacatgtatacctatcctagatcaatatttccatccatcatcttaaactcgtaactatgaagatgtatggcacacacataaagatacaaaattaataaatccaccaggtagtttgaaacagtattctactccgatctagaacgaccgcccaaccagaccacatcatcacaaccaagcgaaaaaaagcatctctgtatatgcatcagtaaaacccgcatcaacatgtatacctatcctagatcgatatttccatccatcatcttaaactcgtaactatgaagatgtaggcacatacatacagatcctttaataaatccaccaggtagtttgaaacagtattctactccgatctagaacgaccctttaataaatccaccaggtagtttgaaacagtattctactccgatctagaacgaccgcccaaccagaccatatcatcacaaccaagcgagaaaaaaagcatctctgtatatgcatcagtaaaacccgcatcaacatgtatacctatcctagatcgatatttccatccatcatcttaaactcgtaactatgaagatgtatggcacacacatacagatacaaaattaataaatccaccaggtagcttgaaacagtatcctactccgatctagaacgaccgcccaaccagaccacatcatcacaaacatgaacatgaacatgtttgctctaacacaaacatgaacagaagtagaactaccgggccctaaccatggaccggatcgccgatctagagaaggtagagagaggggggggggaggatgagcggcgtaccttgaagcggaggtgccgacggctggatttgggggagatctggttgcgtgtgtgtgcgctccgaacgaacacgaggttggggaagagggtgtggagggggtgtctatttattacggcgggcgaggaagggaaagcgaaggagcggtgggaaaggaatcccccgtagctgccggtgccgtgagaggaggaagaggccgcctgccgtgccgcctcacgtctgccgctccgccacgcaatttctggatgccgacagcggagcaagtccaacggtggagcggaactctcgagaggggtccagggatcgctatcaactttgtatagaaaagttgggccgagctcggtacggccagaatggcccggaccggcagcttgcatgcctgcagtgcagcgtgacccggtcgtgcccctctctagagataatgagcattgcatgtctaagttataaaaaattaccacatattttttttgtcacacttgtttgaagtgcagtttatctatctttatacatatatttaaactttactctacgaataatataatctatagtactacaataatatcagtgttttagagaatcatataaatgaacagttagacatggtctaaaggacaattgagtattttgacaacaggactctacagttttatctttttagtgtgcatgtgttctcctttttttttgcaaatagcttcacctatataatacttcatccattttattagtacatccatttagggtttagggttaatggtttttatagactaatttttttagtacatctattttattctattttagcctctaaattaagaaaactaaaactctattttagtttttttatttaataatttagatataaaatagaataaaataaagtgactaaaaattaaacaaataccctttaagaaattaaaaaaactaaggaaacatttttcttgtttcgagtagataatgccagcctgttaaacgccgtcgacgagtctaacggacaccaaccagcgaaccagcagcgtcgcgtcgggccaagcgaagcagacggcacggcatctctgtcgctgcctctggacccctctcgagagttccgctccaccgttggacttgctccgctgtcggcatccagaaattgcgtggcggagcggcagacgtgagccggcacggcaggcggcctcctcctcctctcacggcaccggcagctacgggggattcctttcccaccgctccttcgctttcccttcctcgcccgccgtaataaatagacaccccctccacaccctctttccccaacctcgtgttgttcggagcgcacacacacacaaccagatctcccccaaatccacccgtcggcacctccgcttcaaggtacgccgctcgtcctcccccccccccctctctaccttctctagatcggcgttccggtccatgcatggttagggcccggtagttctacttctgttcatgtttgtgttagatccgtgtttgtgttagatccgtgctgctagcgttcgtacacggatgcgacctgtacgtcagacacgttctgattgctaacttgccagtgtttctctttggggaatcctgggatggctctagccgttccgcagacgggatcgatttcatgattttttttgtttcgttgcatagggtttggtttgcccttttcctttatttcaatatatgccgtgcacttgtttgtcgggtcatcttttcatgcttttttttgtcttggttgtgatgatgtggtctggttgggcggtcgttctagatcggagtagaattctgtttcaaactacctggtggatttattaattttggatctgtatgtgtgtgccatacatattcatagttacgaattgaagatgatggatggaaatatcgatctaggataggtatacatgttgatgcgggttttactgatgcatatacagagatgctttttgttcgcttggttgtgatgatgtggtgtggttgggcggtcgttcattcgttctagatcggagtagaatactgtttcaaactacctggtgtatttattaattttggaactgtatgtgtgtgtcatacatcttcatagttacgagtttaagatggatggaaatatcgatctaggataggtatacatgttgatgtgggttttactgatgcatatacatgatggcatatgcagcatctattcatatgctctaaccttgagtacctatctattataataaacaagtatgttttataattattttgatcttgatatacttggatgatggcatatgcagcagctatatgtggatttttttagccctgccttcatacgctatttatttgcttggtactgtttcttttgtcgatgctcaccctgttgtttggtgttacttctgcaggtcgactttaacttagcctagcatggccactgtgaacaactggctcgctttctccctctccccgcaggagctgccgccctcccagacgacggactccacactcatctcggccgccaccgccgaccatgtctccggcgatgtctgcttcaacatcccccaagattggagcatgaggggatcagagctttcggcgctcgtcgcggagccgaagctggaggacttcctcggcggcatctccttctccgagcagcatcacaaggccaactgcaacatgatacccagcactagcagcacagtttgctacgcgagctcaggtgctagcaccggctaccatcaccagctgtaccaccagcccaccagctcagcgctccacttcgcggactccgtaatggtggcttcctcggccggtgtccacgacggcggtgccatgctcagcgcggccgccgctaacggtgtcgctggcgctgccagtgccaacggcggcggcatcgggctgtccatgattaagaactggctgcggagccaaccggcgcccatgcagccgagggtggcggcggctgagggcgcgcaggggctctctttgtccatgaacatggcggggacgacccaaggcgctgctggcatgccacttctcgctggagagcgcgcacgggcgcccgagagtgtatcgacgtcagcacagggtggagccgtcgtcgtcacggcgccgaaggaggatagcggtggcagcggtgttgccggcgctctagtagccgtgagcacggacacgggtggcagcggcggcgcgtcggctgacaacacggcaaggaagacggtggacacgttcgggcagcgcacgtcgatttaccgtggcgtgacaaggcatagatggactgggagatatgaggcacatctttgggataacagttgcagaagggaagggcaaactcgtaagggtcgtcaagtctatttaggtggctatgataaagaggagaaagctgctagggcttatgatcttgctgctctgaagtactggggtgccacaacaacaacaaattttccagtgagtaactacgaaaaggagctcgaggacatgaagcacatgacaaggcaggagtttgtagcgtctctgagaaggaagagcagtggtttctccagaggtgcatccatttacaggggagtgactaggcatcaccaacatggaagatggcaagcacggattggacgagttgcagggaacaaggatctttacttgggcaccttcagcacccaggaggaggcagcggaggcgtacgacatcgcggcgatcaagttccgcggcctcaacgccgtcaccaacttcgacatgagccgctacgacgtgaagagcatcctggacagcagcgccctccccatcggcagcgccgccaagcgcctcaaggaggccgaggccgcagcgtccgcgcagcaccaccacgccggcgtggtgagctacgacgtcggccgcatcgcctcgcagctcggcgacggcggagccctggcggcggcgtacggcgcgcactaccacggcgccgcctggccgaccatcgcgttccagccgggcgccgccagcacaggcctgtaccacccgtacgcgcagcagccaatgcgcggcggcgggtggtgcaagcaggagcaggaccacgcggtgatcgcggccgcgcacagcctgcaggacctccaccacctgaacctgggcgcggccggcgcgcacgactttttctcggcagggcagcaggccgccgccgctgcgatgcacggcctgggtagcatcgacagtgcgtcgctcgagcacagcaccggctccaactccgtcgtctacaacggcggggtcggcgacagcaacggcgccagcgccgtcggcggcagtggcggtggctacatgatgccgatgagcgctgccggagcaaccactacatcggcaatggtgagccacgagcaggtgcatgcacgggcctacgacgaagccaagcaggctgctcagatggggtacgagagctacctggtgaacgcggagaacaatggtggcggaaggatgtctgcatgggggactgtcgtgtctgcagccgcggcggcagcagcaagcagcaacgacaacatggccgccgacgtcgggcatggcggcgcgcagctcttcagtgtctggaacgacacttaatattggtaccgtcatgggtcgtttaagctgccgatgtgcctgcgtcgtctggtgccctctctccatatggaggttgtcaaagtatctgctgttcgtgtcatgagtcgtgtcagtgttggtttaataatggaccggttgtgttgtgtgtgcgtactacccagaactatgacaaatcatgaataagtttgatgtttgaaattaaagcctgtgctcattatgttctgtctttcagttgtctcctaatatttgcctgcaggtactggctatctaccgtttcttacttaggaggtgtttgaatgcactaaaactaatagttagtggctaaaattagttaaaacatccaaacaccatagctaatagttgaactattagctatttttggaaaattagttaatagtgaggtagttatttgttagctagctaattcaactaacaatttttagccaactaacaattagtttcagtgcattcaaacacccccttaatgttaaggtggttctatctaccgtctcctaatatatggttgattgttcggtttgttgctatgctattgggttctgattgctgctagttcttgctgaatccagaagttctcgtagtatagctcagattcatattatttatttgagtgataagtgatccaggttattactatgttagctaggttttttttacaaggataaattatctgtgatcataattcttatgaaagctttatgtttcctggaggcagtggcatgcaatgcatgacagcaacttgatcacaccagctgaggtagatacggtaacaaggttcttaaatctgttcaccaaatcattggagaacacacatacacattcttgccagtcttggttagagaaatttcatgacaaaatgccaaagctgtcttgactcttcacttttggccatgagtcgtgacgcgacttattgaactagtctagggcgcggctaacaacctagcttagattgccttgtctaaacccttaggctaacgcgccactctagaaggccgatctcccgggataacttcgtatagcatacattatacgaagttatgaattccggaccggcctagaaggccccagagctggtcaccccatacgattggaagcttcaagtttgtacaaaaaagcaggctggatcggccagaatggccccggaccgggttaccaagcggccgcggaattcctgcccttaaggccaattgttcaagattcattcaacaattgaaacatctcccatgattaaatcagtataaggttgctatggtcttgcttgacaaagtttttttttgagggaatttcaactaaatttttgagtgaaactatcaaatactgattttaaaaaatttttataaaaggaagcgcagagataaaaggccatctatgctacaaaagtacccaaaaatgtaatcctaaagtatgaattgcattttttttttgtttggacgaaaggaaaggagtattaccacaagaatgatatcatcttcatatttagatcttttttgggtaaagcttgagattctctaaatatagagaaatcagaagaaaaaaaaaccgtgttttggtggttttgatttctagcctccacaataactttgacggcgtcgacaagtctaacggacaccaagcagcgaaccaccagcgccgagccaagcgaagcagacggccgagacgttgacaccttcggcgcggcatctctcgagagttccgctccggcgctccacctccaccgctggcggtttcttattccgttccgttccgcctcctgctctgctcctctccacaccacacggcacgaaaccgttacggcaccggcagcacccagcacgggagaggggattcctttcccaccgttccttccctttccgccccgccgctataaatagccagccccatccccagcttttttccccaatctcatctcctctctcctgttgttcggagcacacgcacaatccgatcgatccccaaatccccttcgtctctcctcgcgagcctcgtggatcccagcttcaaggtacggcgatcgatcatcccccctccttctctctaccttcttttctctagactacatcggatggcgatccatggttagggcctgctagtttcccttcctgttttgtcgatggctgcgaggcacaatagatctgatggcgttatgacggctaacttgtcatgttgttgcgatttatagtccctttaggagatcagtttaatttctcggatggttcgagatcggtggtccatggttagtaccctaagatccgcgctgttagggttcgtagatggaggcgacctgttctgattgttaacttgtcagtacctgggaaatcctgggatggttctagctcgtccgcagatgagatcgatttcatgatcctctgtatcttgtttcgttgcctaggttccgtctaatctatccgtggtatgatgtagatgttttgatcgtgctaactacgtcttgtaaagttaattgtcaggtcataatttttagcatgcctttttttttgtttggttttgtctaattgggctgtcgttctagatcagagtagaagactgttccaaactacctgctggatttattgaacttggatctgtatgtgtgtcacatatcttcataaattcatgattaagatggattgaaatatcttttatctttttggtatggatagttctatatgttggtgtggctttgttagatgtatacatgcttagatacatgaagcaacgtgctgctactgtttagtaattgctgttcatttgtctaataaacagataaggatatgtatttatgttgctgttggttttgctggtactttgttggatacaaatgcttcaatacagaaaacagcatgctgctacgatttaccatttatctaatcttatcatatgtctaatctaataaacaaacatgcttttaaattatcttcatatgcttggatgatggcatacacagcggctatgtgtggttttttaaatacccagcatcatgggcatgcatgacactgctttaatatgctttttatttgcttgagactgtttcttttgtttatactgaccctttagttcggtgactcttctgcaggtcgactttaacttagcctaggatccatggcccagtccaagcacggcctgaccaaggagatgaccatgaagtaccgcatggagggctgcgtggacggccacaagttcgtgatcaccggcgagggcatcggctaccccttcaagggcaagcaggccatcaacctgtgcgtggtggagggcggccccttgcccttcgccgaggacatcttgtccgccgccttcatgtacggcaaccgcgtgttcaccgagtacccccaggacatcgtcgactacttcaagaactcctgccccgccggctacacctgggaccgctccttcctgttcgaggacggcgccgtgtgcatctgcaacgccgacatcaccgtgagcgtggaggagaactgcatgtaccacgagtccaagttctacggcgtgaacttccccgccgacggccccgtgatgaagaagatgaccgacaactgggagccctcctgcgagaagatcatccccgtgcccaagcagggcatcttgaagggcgacgtgagcatgtacctgctgctgaaggacggtggccgcttgcgctgccagttcgacaccgtgtacaaggccaagtccgtgccccgcaagatgcccgactggcacttcatccagcacaagctgacccgcgaggaccgcagcgacgccaagaaccagaagtggcacctgaccgagcacgccatcgcctccggctccgccttgccctccggactcagatctcgatagggtacctgacatcttatagtctgcaacctctcgtgtctgaattcctatctttatcaagtgttattgcttccacgactataggacagctttcgtcgaaaggttttgctcatgtgatctcgaaggattcatctagtctgatttttcgtgacttgtatcggttttattggattcatccaacatatatcaataaaaaatgagttgtgtttcctttcttcctagttcagttaaaattatttccctcctgcgcttgtgctgtaattgtctgtgtacctgttgtttgtgactgtgttagttcccttggatatgatttcgtatttgatatgtacatggagatagcttagcttcattattggagtatgaagttagtatgacatagtcactctcctggaaaattgacactgcaaaccatatttttattctgaaccacaaatcctagtcagtccgctggcatatgccgtccgtttgctgaatccagaacgtgggtttggagatgtacggctgagatgcctctatgcgaaggggatttcgtggtgaaacgagatgggagtagagcaacgcccgtggaagatgcttcaaacttccacacttttgagcaacgatcggcagtagtaaggtagacgatttcaagatcaaagcatatgaagataaacaacatcaacaacaaaatttgttggggttctatagagagaaacagagctacatacatacactgttttgtatctaccatctgagatgatgaaaagatgaaaaactaaagaatgccccggcgccaacgccaggacacgccgcgcgcgcgtcacccgagccatctcttgacccagccggcgctgtatatttacacacgttgcagcatcgatcaccacctgttcgatcgcgtcgccgtcaccaagcttggcgcgccggtcacccggtccgggcctagaaggccacccggggtcggaggagactagccgttagttagtgcagaccgtctctaatcagtgactagcgacgtcccgacccacccagctttcttgtacaaagtggcccggggcggccgaagctggccttctaggcccggaccgggttaccgcggccgcgaattcaggtgactcttagcgatccgacggcgtcttcaccgccccgccgccgcccgagccggacttgtcgctgccgccgccgctgctcatcttgcgcgcttgtgtccctccctcagtccctgcgttcgcggatcgcgggcgggtgcgacccgtttggactccggccggtagccttcgtgccgacctcgctcggtccaccggtttgtcggggacccacatgtcagtgaaggtacgcgtccacgtccacagaccctactaccccagacgagtccaaatcgctgttccctcacactctcgtgtaccagcgcgcggcggaaagcacctttccaacaaccgccgacacgtcggtcccacgtcggcatgctccaccggtcagtgtttggcgtgtacggctcccggcgacgaacgagtgtggcctaagctttcctactcccatcccatctgagccacacatctctctcacgccacgcgcacaaaacagccaggctcccacgcgcatcaaccggctctccctttccgtgccactcgcccccaagccccaaaccctcgccgccgcctccgagacagccgccgccacctaggccatggccaccgccgccgccgcgtctaccgcgctcactggcgccactaccgctgcgcccaaggcgaggcgccgggcgcacctcctggccacccgccgcgccctcgccgcgcccatcaggtgctcagcggcgtcacccgccatgccgatggctcccccggccaccccgctccggccgtggggccccaccgagccccgcaagggtgctgacatcctcgtcgagtccctcgagcgctgcggcgtccgcgacgtcttcgcctaccccggcggcgcgtcgatggagatccaccaggcactcacccgctcccccgtcatcgccaaccacctcttccgccacgagcaaggggaggcctttgccgcctccggctacgcgcgctcctcgggccgcgtcggcgtctgcatcgccacctccggccccggcgccaccaacctagtctccgcgctcgccgacgcgctgctcgattccgtcccgatggtcgccatcacgggacaggtggcgcgacgcatgattggcaccgacgccttccaggagacgcccatcgtcgaggtcacgcgctccatcaccaagcacaactacctggtcctcgacgtcgacgacatcccccgcgtcgtgcaggaggctttcttcctcgcctcctctggtcgaccagggccggtgcttgtcgacatccccaaggacatccagcagcagatggcggtgcctgtctgggacaagcccatgagtctgcctgggtacattgcgcgccttcccaagccccctgcgactgagttgcttgagcaggtgctgcgtcttgttggtgaatcgcggcgccctgttctttatgtgggcggtggctgcgcagcatctggtgaggagttgcgacgctttgtggagctgactggaatcccggtcacaactactcttatgggcctcggcaacttccccagcgacgacccactgtctctgcgcatgctaggtatgcatgggacggtgtatgcaaattatgcagtggataaggccgatctgttgcttgcacttggtgtgcggtttgatgatcgcgtgacagggaagattgaggcttttgcaagcagggctaagattgtgcacgttgatattgatccggctgagattggcaagaacaagcagccacatgtgtccatctgtgcagatgttaagcttgctttgcagggcatgaatgctcttcttgaaggaagcacatcaaagaagagctttgactttggctcatggaacgatgagttggatcagcagaagagggaattcccccttgggtataaaacatctaatgaggagatccagccacaatatgctattcaggttcttgatgagctgacgaaaggcgaggccatcatcggcacaggtgttgggcagcaccagatgtgggcggcacagtactacacttacaagcggccaaggcagtggttgtcttcagctggtcttggggctatgggatttggtttgccggctgctgctggtgcttctgtggcaaacccaggtgtcactgttgttgacatcgatggagatggtagctttctcatgaacgttcaggagctagctatgatccgaattgagaacctcccagtgaaggtctttgtgctaaacaaccagcacctggggatggtggtgcagttggaggacaggttctataaggccaacagagcgcacacatacttgggaaacccagagaatgaaagtgagatatatccagatttcgtgacgatcgccaaagggttcaacattccagccgtccgtgtgacaaagaagaacgaagtccgcgcagcgataaagaagatgctcgagactccagggccgtacctcttggatataatcgtcccacaccaggagcatgtgttgcctatgatccctagtggtggggctttcaaggatatgatcctggatggtgatggcaggactgtgtactgacttcgaataggtacccggggatcctctagtgccgtgggtcgtttaagctgccgctgtacctgtgtcgtctggtgccttctggtgtacctgggaggttgtcgtctatcaagtatctgtggttggtgtcatgagtcagtgagtcccaatactgttcgtgtcctgtgtgcattatacccaaaactgttatgggcaaatcatgaataagcttgatgttcgaacttaaaagtctctgctcaatatggtattatggttgtttttgttcgtctcctaatatttgcctgggatcaaattttattggctggtgttcatttgacctccatgttcttgctaggctccattttttactctacagccataatatgtttgattgtttggtttgttctttgttgtacacctggttctgtcgagcttagttttcgacactggcttacagcttaacatgttgctattttattgggttctgattgctattttattgggttctgattgctagtttttgctgaatccaaaaaccatgttatttatttaagcgatccaggttattattatgatggtggctaagtttttttttttccaagggtaaattttctggattctccagtgtttctgtggccgaattcaatcactagagtcgacctgcaggcatgcccgcggtggagctcgaattccggtccgggcctagaaggccagcttcggccgccccgggcaactttattatacaaagttgatagatgtacctgattccgatgacttcgtaggttcctagctcaagccgctcgtgtccaagcgtcacttacgattagctaatgattacggcatctaggaccgactagctagctagctaagagctcggtaccgagctcgaattcattccgattaatcgtggcctcttgctcttcaggatgaagagctatgtttaaacgtgcaagcgctactagacaattcagtacattaaaaacgtccgcaatgtgttattaagttgtctaagcgtcaatttgtttacaccacaatatatcctgcca

SEQ ID NO: 35 - DNA, 17497 bp, synthetic construct
  misc_feature 1..17497: note = PHP94685
  source 1..17497: mol_type = other DNA
gtttacccgccaatatatcctgtcaaacactgcggccgcacttgaccgcggatggagccggagctgtggtgaggccatcgacgggaggtgggggagaacacagtctcagtgttctttgtgagtccgcaaggtttttagcttttctgtattaattaaggttgctgttggctgtagaatacggtcgtggaagagctgtatcggtagctactacgtaagctattatatactggaagtctggagctcgtcgatctccggtcgtcttcctccatttctcctcgtcttgctttgactgctgctaccatttgcttctgttttctgatgaagcatgccatgtcggccaccagtgtttgtgtggtttttgcagggaatggctttcaagtgctgtgattgaatggccctcgtcgtcctcggctgagctcacatggacgcgtcatgtgagtgagatatatgatcatatgatgagtggggttcgggtgagtgcgtacttgaagtaggatcccgctttcactcattcattcattggcctttaaaccgggaaattttcgcgaggagatggagggaagcaagcagggtgacgagtgcagagtgccgcgagcgctttgtcaaaaggcaccgccgtaggcaaaaaaatcaatggccctgactgactcgatggtagtactactgtagagactagagagggttgctccccatatcttcgtgtgacttttactccagcattgcatttccgtcattgagacgttaattaatagcagctttcgggacagatgactgtggccatgtttcgtcacggccgcttcgtgccagctgggggtactatagtactgtgattttgttagtaaaaactttcattaggccaccattgacgaccgggccttcgcttttgctgcgctaattaaccatttcccggcgaccgaagggaacatgaacatgccccgacacatgagggcatgaggactagtgttctccctgtcgttcgttgacttgactagtgatagtttaaacgctcttcaactggaagagcggttactaccggttcactagctagctgctaatcgagctagttaccctatgaggtgacatgaagcgctcacggttactatgacggttagcttcacgactgttggtggcagtagcgtacgacttagctatagttccggacttacccagatcttggccaataacttcgtatagcatacattatacgaagttatcagatcttggccaaggtaccttcgaaattgggtcatcggatcccatccttaaaacaccactaggcccctagtgaactagcgtcctaacctcggtctagccacctagcggactaaaagcctaacgccgagccccgggtggccttctaggcccggaccgggtgaccccgctctctctctccttgctaagtttctgtgcacgtaaataattattagtagaaaaaaattggaaggtacatgagttagttgaagatgaaagtatataatattgttgtggtggggtatagaggtttgatataggtggaactgctgtagagcgtggagatatagggggaaagagaacgctgatgtgacaagtgagtgagatatagggggagaaatttagggggaacgccgaacacagtctaaagaagcttgggacccaaagcactctgttcgggggtttttttttttgtctttcaactttttgctgtaatgttattcaaaataagaaaagcacttggcatggctaagaaatagagttcaacaactgaacagtacagtgtattatcaatggcataaaaaacaacccttacagcattgccgtattttattgatcaaacattcaactcaacactgacgagtggtcttccaccgatcaacggactaatgctgctttgtcgaatgatctgttctcacttcctcctccttccattccagagacatcagtgaagagcagtggcagctcgcgttgctctcacatactccctgcagcagggtaaggggagcaccatgagctgaggctcagctccagggcggcggctgctgctgctgttgccgatacgtcttggttgccggtgccggccagctgggtgctgttgctgttgctgtaaaagctgtactgctcctgcagctggtgttgctgttggatcgcaacggaagaagtggcgccggcagttgtggacgcggcaccccagaacggcaagtagctgctgctaccgctgccgccgtcgtcgccgcaggtcgggaagagagggagcgtctcgggcgcccgcgtcgtcgccgcccgcgccgcggccgccgccattatcgtgtccgacgacgagaagcgtggccactgcgacgagctgcccgtgtccgtcacgcccatgtagtcctgcaggaagcatgtctcggtggccatagcagcgccgctgctgccccagtcggaactcgtgtccagcagcacagccgatccgccgccattgccggcggcgtagaagccgagggtgggcgagggaggcgccgcgcctgaaggcggcggcgacgacagcgagaggacgccgagttggctggtggtggcgtcggccgcgccggcggcgggcacgttgacgtcgaggctggtgaggcggcgcttctggcgctcgcgggccttgtggttctggaaccagtagaagacgttcttgccctcgatcttgccgtgctgccgcagcatggcggtgatgcgctggatctgctccgagctgggcgaccggatgccgcagccgtagtagagctccttcagcatcctgatctgctccggcgtcggcgtccaccgcgagccgctggggcggcacaccgccggcgcagccacgctgccgctgccgctgcctcctcccgctccaccgccgcccgcattggccgccatggatcctgcagaagtaacaccaaacaacagggtgagcatcggacaaaagaaacagtaccaagcaaataaatagcgtatgaaggcagggctaaaaaatccacatatagctgctgcatatgccatcatccaagtatatcaagatcaaaataattataaaacatacttgtttattataatagataggtactcaaggttagagcatatgaatagatgccgcatatgccatcatgtatatgcatcagtaaaacccacatcaacatgtatacctatcctagatcaatatttccatccatcatcttaaactcgtaactatgaagatgtatggcacacacataaagatacaaaattaataaatccaccaggtagtttgaaacagtattctactccgatctagaacgaccgcccaaccagaccacatcatcacaaccaagcgaaaaaaagcatctctgtatatgcatcagtaaaacccgcatcaacatgtatacctatcctagatcgatatttccatccatcatcttaaactcgtaactatgaagatgtaggcacatacatacagatcctttaataaatccaccaggtagtttgaaacagtattctactccgatctagaacgaccctttaataaatccaccaggtagtttgaaacagtattctactccgatctagaacgaccgcccaaccagaccatatcatcacaaccaagcgagaaaaaaagcatctctgtatatgcatcagtaaaacccgcatcaacatgtatacctatcctagatcgatatttccatccatcatcttaaactcgtaactatgaagatgtatggcacacacatacagatacaaaattaataaatccaccaggtagcttgaaacagtatcctactccgatctagaacgaccgcccaaccagaccacatcatcacaaacatgaacatgaacatgtttgctctaacacaaacatgaacagaagtagaactaccgggccctaaccatggaccggatcgccgatctagagaaggtagagagaggggggggggaggatgagcggcgtaccttgaagcggaggtgccgacggctggatttgggggagatctggttgcgtgtgtgtgcgctccgaacgaacacgaggttggggaagagggtgtggagggggtgtctatttattacggcgggcgaggaagggaaagcgaaggagcggtgggaaaggaatcccccgtagctgccggtgccgtgagaggaggaagaggccgcctgccgtgccgcctcacgtctgccgctccgccacgcaatttctggatgccgacagcggagcaagtccaacggtggagcggaactctcgagaggggtccagggaattcgattggtcaccgggccctgggattagacgtcatggcttacgtcatttccttcgtcctgttgctcactgattgagctgtgagtggagggaccactggaagatgcttcactaattttcttagtggagggaccggcttctcatgcttcacacaagtggctgtcgggcatcatcttttttagcttttgacaaagcaatgttttagtgggtcgacggtcacatcgtcattgccgtggaaatttaaaaatacacgccaaacataaaaagtaaaggttctgagagaccgacaggtcacatcagcctttaattatttcgtatgggcgtaagcccttacgtcatggctccattattgctttaggtctacatcactcctctttgattggctcatgatctcgttgctcgagttttgtggtcgtcactgcgttcgtcatacgcattagtgagtgggctgtcaggacagctcttttccacgttattttgttccccacttgtactagaggaatctgctttatctttgcaataaaggcaaagatgcttttggtaggtgcgcctaacaattctgcaccattccttttttgtctggtccccacaagccagctgctcgatgccaggtttatcgctatcaactttgtatagaaaagttgggccgagctcggtacggccagaatggcccggaccggcagcttgcatgcctgcagtgcagcgtgacccggtcgtgcccctctctagagataatgagcattgcatgtctaagttataaaaaattaccacatattttttttgtcacacttgtttgaagtgcagtttatctatctttatacatatatttaaactttactctacgaataatataatctatagtactacaataatatcagtgttttagagaatcatataaatgaacagttagacatggtctaaaggacaattgagtattttgacaacaggactctacagttttatctttttagtgtgcatgtgttctcctttttttttgcaaatagcttcacctatataatacttcatccattttattagtacatccatttagggtttagggttaatggtttttatagactaatttttttagtacatctattttattctattttagcctctaaattaagaaaactaaaactctattttagtttttttatttaataatttagatataaaatagaataaaataaagtgactaaaaattaaacaaataccctttaagaaattaaaaaaactaaggaaacatttttcttgtttcgagtagataatgccagcctgttaaacgccgtcgacgagtctaacggacaccaaccagcgaaccagcagcgtcgcgtcgggccaagcgaagcagacggcacggcatctctgtcgctgcctctggacccctctcgagagttccgctccaccgttggacttgctccgctgtcggcatccagaaattgcgtggcggagcggcagacgtgagccggcacggcaggcggcctcctcctcctctcacggcaccggcagctacgggggattcctttcccaccgctccttcgctttcccttcctcgcccgccgtaataaatagacaccccctccacaccctctttccccaacctcgtgttgttcggagcgcacacacacacaaccagatctcccccaaatccacccgtcggcacctccgcttcaaggtacgccgctcgtcctcccccccccccctctctaccttctctagatcggcgttccggtccatgcatggttagggcccggtagttctacttctgttcatgtttgtgttagatccgtgtttgtgttagatccgtgctgctagcgttcgtacacggatgcgacctgtacgtcagacacgttctgattgctaacttgccagtgtttctctttggggaatcctgggatggctctagccgttccgcagacgggatcgatttcatgattttttttgtttcgttgcatagggtttggtttgcccttttcctttatttcaatatatgccgtgcacttgtttgtcgggtcatcttttcatgcttttttttgtcttggttgtgatgatgtggtctggttgggcggtcgttctagatcggagtagaattctgtttcaaactacctggtggatttattaattttggatctgtatgtgtgtgccatacatattcatagttacgaattgaagatgatggatggaaatatcgatctaggataggtatacatgttgatgcgggttttactgatgcatatacagagatgctttttgttcgcttggttgtgatgatgtggtgtggttgggcggtcgttcattcgttctagatcggagtagaatactgtttcaaactacctggtgtatttattaattttggaactgtatgtgtgtgtcatacatcttcatagttacgagtttaagatggatggaaatatcgatctaggataggtatacatgttgatgtgggttttactgatgcatatacatgatggcatatgcagcatctattcatatgctctaaccttgagtacctatctattataataaacaagtatgttttataattattttgatcttgatatacttggatgatggcatatgcagcagctatatgtggatttttttagccctgccttcatacgctatttatttgcttggtactgtttcttttgtcgatgctcaccctgttgtttggtgttacttctgcaggtcgactttaacttagcctagcatggccactgtgaacaactggctcgctttctccctctccccgcaggagctgccgccctcccagacgacggactccacactcatctcggccgccaccgccgaccatgtctccggcgatgtctgcttcaacatcccccaagattggagcatgaggggatcagagctttcggcgctcgtcgcggagccgaagctggaggacttcctcggcggcatctccttctccgagcagcatcacaaggccaactgcaacatgatacccagcactagcagcacagtttgctacgcgagctcaggtgctagcaccggctaccatcaccagctgtaccaccagcccaccagctcagcgctccacttcgcggactccgtaatggtggcttcctcggccggtgtccacgacggcggtgccatgctcagcgcggccgccgctaacggtgtcgctggcgctgccagtgccaacggcggcggcatcgggctgtccatgattaagaactggctgcggagccaaccggcgcccatgcagccgagggtggcggcggctgagggcgcgcaggggctctctttgtccatgaacatggcggggacgacccaaggcgctgctggcatgccacttctcgctggagagcgcgcacgggcgcccgagagtgtatcgacgtcagcacagggtggagccgtcgtcgtcacggcgccgaaggaggatagcggtggcagcggtgttgccggcgctctagtagccgtgagcacggacacgggtggcagcggcggcgcgtcggctgacaacacggcaaggaagacggtggacacgttcgggcagcgcacgtcgatttaccgtggcgtgacaaggcatagatggactgggagatatgaggcacatctttgggataacagttgcagaagggaagggcaaactcgtaagggtcgtcaagtctatttaggtggctatgataaagaggagaaagctgctagggcttatgatcttgctgctctgaagtactggggtgccacaacaacaacaaattttccagtgagtaactacgaaaaggagctcgaggacatgaagcacatgacaaggcaggagtttgtagcgtctctgagaaggaagagcagtggtttctccagaggtgcatccatttacaggggagtgactaggcatcaccaacatggaagatggcaagcacggattggacgagttgcagggaacaaggatctttacttgggcaccttcagcacccaggaggaggcagcggaggcgtacgacatcgcggcgatcaagttccgcggcctcaacgccgtcaccaacttcgacatgagccgctacgacgtgaagagcatcctggacagcagcgccctccccatcggcagcgccgccaagcgcctcaaggaggccgaggccgcagcgtccgcgcagcaccaccacgccggcgtggtgagctacgacgtcggccgcatcgcctcgcagctcggcgacggcggagccctggcggcggcgtacggcgcgcactaccacggcgccgcctggccgaccatcgcgttccagccgggcgccgccagcacaggcctgtaccacccgtacgcgcagcagccaatgcgcggcggcgggtggtgcaagcaggagcaggaccacgcggtgatcgcggccgcgcacagcctgcaggacctccaccacctgaacctgggcgcggccggcgcgcacgactttttctcggcagggcagcaggccgccgccgctgcgatgcacggcctgggtagcatcgacagtgcgtcgctcgagcacagcaccggctccaactccgtcgtctacaacggcggggtcggcgacagcaacggcgccagcgccgtcggcggcagtggcggtggctacatgatgccgatgagcgctgccggagcaaccactacatcggcaatggtgagccacgagcaggtgcatgcacgggcctacgacgaagccaagcaggctgctcagatggggtacgagagctacctggtgaacgcggagaacaatggtggcggaaggatgtctgcatgggggactgtcgtgtctgcagccgcggcggcagcagcaagcagcaacgacaacatggccgccgacgtcgggcatggcggcgcgcagctcttcagtgtctggaacgacacttaatattggtaccgtcatgggtcgtttaagctgccgatgtgcctgcgtcgtctggtgccctctctccatatggaggttgtcaaagtatctgctgttcgtgtcatgagtcgtgtcagtgttggtttaataatggaccggttgtgttgtgtgtgcgtactacccagaactatgacaaatcatgaataagtttgatgtttgaaattaaagcctgtgctcattatgttctgtctttcagttgtctcctaatatttgcctgcaggtactggctatctaccgtttcttacttaggaggtgtttgaatgcactaaaactaatagttagtggctaaaattagttaaaacatccaaacaccatagctaatagttgaactattagctatttttggaaaattagttaatagtgaggtagttatttgttagctagctaattcaactaacaatttttagccaactaacaattagtttcagtgcattcaaacacccccttaatgttaaggtggttctatctaccgtctcctaatatatggttgattgttcggtttgttgctatgctattgggttctgattgctgctagttcttgctgaatccagaagttctcgtagtatagctcagattcatattatttatttgagtgataagtgatccaggttattactatgttagctaggttttttttacaaggataaattatctgtgatcataattcttatgaaagctttatgtttcctggaggcagtggcatgcaatgcatgacagcaacttgatcacaccagctgaggtagatacggtaacaaggttcttaaatctgttcaccaaatcattggagaacacacatacacattcttgccagtcttggttagagaaatttcatgacaaaatgccaaagctgtcttgactcttcacttttggccatgagtcgtgacgcgacttattgaactagtctagggcgcggctaacaacctagcttagattgccttgtctaaacccttaggctaacgcgccactctagaaggccgatctcccgggataacttcgtatagcatacattatacgaagttatgaattccggaccggcctagaaggccccagagctggtcaccccatacgattggaagcttcaagtttgtacaaaaaagcaggctggatcggccagaatggccccggaccgggttaccaagcggccgcggaattcctgcccttaaggccaattgttcaagattcattcaacaattgaaacatctcccatgattaaatcagtataaggttgctatggtcttgcttgacaaagtttttttttgagggaatttcaactaaatttttgagtgaaactatcaaatactgattttaaaaaatttttataaaaggaagcgcagagataaaaggccatctatgctacaaaagtacccaaaaatgtaatcctaaagtatgaattgcattttttttttgtttggacgaaaggaaaggagtattaccacaagaatgatatcatcttcatatttagatcttttttgggtaaagcttgagattctctaaatatagagaaatcagaagaaaaaaaaaccgtgttttggtggttttgatttctagcctccacaataactttgacggcgtcgacaagtctaacggacaccaagcagcgaaccaccagcgccgagccaagcgaagcagacggccgagacgttgacaccttcggcgcggcatctctcgagagttccgctccggcgctccacctccaccgctggcggtttcttattccgttccgttccgcctcctgctctgctcctctccacaccacacggcacgaaaccgttacggcaccggcagcacccagcacgggagaggggattcctttcccaccgttccttccctttccgccccgccgctataaatagccagccccatccccagcttttttccccaatctcatctcctctctcctgttgttcggagcacacgcacaatccgatcgatccccaaatccccttcgtctctcctcgcgagcctcgtggatcccagcttcaaggtacggcgatcgatcatcccccctccttctctctaccttcttttctctagactacatcggatggcgatccatggttagggcctgctagtttcccttcctgttttgtcgatggctgcgaggcacaatagatctgatggcgttatgacggctaacttgtcatgttgttgcgatttatagtccctttaggagatcagtttaatttctcggatggttcgagatcggtggtccatggttagtaccctaagatccgcgctgttagggttcgtagatggaggcgacctgttctgattgttaacttgtcagtacctgggaaatcctgggatggttctagctcgtccgcagatgagatcgatttcatgatcctctgtatcttgtttcgttgcctaggttccgtctaatctatccgtggtatgatgtagatgttttgatcgtgctaactacgtcttgtaaagttaattgtcaggtcataatttttagcatgcctttttttttgtttggttttgtctaattgggctgtcgttctagatcagagtagaagactgttccaaactacctgctggatttattgaacttggatctgtatgtgtgtcacatatcttcataaattcatgattaagatggattgaaatatcttttatctttttggtatggatagttctatatgttggtgtggctttgttagatgtatacatgcttagatacatgaagcaacgtgctgctactgtttagtaattgctgttcatttgtctaataaacagataaggatatgtatttatgttgctgttggttttgctggtactttgttggatacaaatgcttcaatacagaaaacagcatgctgctacgatttaccatttatctaatcttatcatatgtctaatctaataaacaaacatgcttttaaattatcttcatatgcttggatgatggcatacacagcggctatgtgtggttttttaaatacccagcatcatgggcatgcatgacactgctttaatatgctttttatttgcttgagactgtttcttttgtttatactgaccctttagttcggtgactcttctgcaggtcgactttaacttagcctaggatccatggcccagtccaagcacggcctgaccaaggagatgaccatgaagtaccgcatggagggctgcgtggacggccacaagttcgtgatcaccggcgagggcatcggctaccccttcaagggcaagcaggccatcaacctgtgcgtggtggagggcggccccttgcccttcgccgaggacatcttgtccgccgccttcatgtacggcaaccgcgtgttcaccgagtacccccaggacatcgtcgactacttcaagaactcctgccccgccggctacacctgggaccgctccttcctgttcgaggacggcgccgtgtgcatctgcaacgccgacatcaccgtgagcgtggaggagaactgcatgtaccacgagtccaagttctacggcgtgaacttccccgccgacggccccgtgatgaagaagatgaccgacaactgggagccctcctgcgagaagatcatccccgtgcccaagcagggcatcttgaagggcgacgtgagcatgtacctgctgctgaaggacggtggccgcttgcgctgccagttcgacaccgtgtacaaggccaagtccgtgccccgcaagatgcccgactggcacttcatccagcacaagctgacccgcgaggaccgcagcgacgccaagaaccagaagtggcacctgaccgagcacgccatcgcctccggctccgccttgccctccggactcagatctcgatagggtacctgacatcttatagtctgcaacctctcgtgtctgaattcctatctttatcaagtgttattgcttccacgactataggacagctttcgtcgaaaggttttgctcatgtgatctcgaaggattcatctagtctgatttttcgtgacttgtatcggttttattggattcatccaacatatatcaataaaaaatgagttgtgtttcctttcttcctagttcagttaaaattatttccctcctgcgcttgtgctgtaattgtctgtgtacctgttgtttgtgactgtgttagttcccttggatatgatttcgtatttgatatgtacatggagatagcttagcttcattattggagtatgaagttagtatgacatagtcactctcctggaaaattgacactgcaaaccatatttttattctgaaccacaaatcctagtcagtccgctggcatatgccgtccgtttgctgaatccagaacgtgggtttggagatgtacggctgagatgcctctatgcgaaggggatttcgtggtgaaacgagatgggagtagagcaacgcccgtggaagatgcttcaaacttccacacttttgagcaacgatcggcagtagtaaggtagacgatttcaagatcaaagcatatgaagataaacaacatcaacaacaaaatttgttggggttctatagagagaaacagagctacatacatacactgttttgtatctaccatctgagatgatgaaaagatgaaaaactaaagaatgccccggcgccaacgccaggacacgccgcgcgcgcgtcacccgagccatctcttgacccagccggcgctgtatatttacacacgttgcagcatcgatcaccacctgttcgatcgcgtcgccgtcaccaagcttggcgcgccggtcacccggtccgggcctagaaggccacccggggtcggaggagactagccgttagttagtgcagaccgtctctaatcagtgactagcgacgtcccgacccacccagctttcttgtacaaagtggcccggggcggccgaagctggccttctaggcccggaccgggttaccgcggccgcgaattcaggtgactcttagcgatccgacggcgtcttcaccgccccgccgccgcccgagccggacttgtcgctgccgccgccgctgctcatcttgcgcgcttgtgtccctccctcagtccctgcgttcgcggatcgcgggcgggtgcgacccgtttggactccggccggtagccttcgtgccgacctcgctcggtccaccggtttgtcggggacccacatgtcagtgaaggtacgcgtccacgtccacagaccctactaccccagacgagtccaaatcgctgttccctcacactctcgtgtaccagcgcgcggcggaaagcacctttccaacaaccgccgacacgtcggtcccacgtcggcatgctccaccggtcagtgtttggcgtgtacggctcccggcgacgaacgagtgtggcctaagctttcctactcccatcccatctgagccacacatctctctcacgccacgcgcacaaaacagccaggctcccacgcgcatcaaccggctctccctttccgtgccactcgcccccaagccccaaaccctcgccgccgcctccgagacagccgccgccacctaggccatggccaccgccgccgccgcgtctaccgcgctcactggcgccactaccgctgcgcccaaggcgaggcgccgggcgcacctcctggccacccgccgcgccctcgccgcgcccatcaggtgctcagcggcgtcacccgccatgccgatggctcccccggccaccccgctccggccgtggggccccaccgagccccgcaagggtgctgacatcctcgtcgagtccctcgagcgctgcggcgtccgcgacgtcttcgcctaccccggcggcgcgtcgatggagatccaccaggcactcacccgctcccccgtcatcgccaaccacctcttccgccacgagcaaggggaggcctttgccgcctccggctacgcgcgctcctcgggccgcgtcggcgtctgcatcgccacctccggccccggcgccaccaacctagtctccgcgctcgccgacgcgctgctcgattccgtcccgatggtcgccatcacgggacaggtggcgcgacgcatgattggcaccgacgccttccaggagacgcccatcgtcgaggtcacgcgctccatcaccaagcacaactacctggtcctcgacgtcgacgacatcccccgcgtcgtgcaggaggctttcttcctcgcctcctctggtcgaccagggccggtgcttgtcgacatccccaaggacatccagcagcagatggcggtgcctgtctgggacaagcccatgagtctgcctgggtacattgcgcgccttcccaagccccctgcgactgagttgcttgagcaggtgctgcgtcttgttggtgaatcgcggcgccctgttctttatgtgggcggtggctgcgcagcatctggtgaggagttgcgacgctttgtggagctgactggaatcccggtcacaactactcttatgggcctcggcaacttccccagcgacgacccactgtctctgcgcatgctaggtatgcatgggacggtgtatgcaaattatgcagtggataaggccgatctgttgcttgcacttggtgtgcggtttgatgatcgcgtgacagggaagattgaggcttttgcaagcagggctaagattgtgcacgttgatattgatccggctgagattggcaagaacaagcagccacatgtgtccatctgtgcagatgttaagcttgctttgcagggcatgaatgctcttcttgaaggaagcacatcaaagaagagctttgactttggctcatggaacgatgagttggatcagcagaagagggaattcccccttgggtataaaacatctaatgaggagatccagccacaatatgctattcaggttcttgatgagctgacgaaaggcgaggccatcatcggcacaggtgttgggcagcaccagatgtgggcggcacagtactacacttacaagcggccaaggcagtggttgtcttcagctggtcttggggctatgggatttggtttgccggctgctgctggtgcttctgtggcaaacccaggtgtcactgttgttgacatcgatggagatggtagctttctcatgaacgttcaggagctagctatgatccgaattgagaacctcccagtgaaggtctttgtgctaaacaaccagcacctggggatggtggtgcagttggaggacaggttctataaggccaacagagcgcacacatacttgggaaacccagagaatgaaagtgagatatatccagatttcgtgacgatcgccaaagggttcaacattccagccgtccgtgtgacaaagaagaacgaagtccgcgcagcgataaagaagatgctcgagactccagggccgtacctcttggatataatcgtcccacaccaggagcatgtgttgcctatgatccctagtggtggggctttcaaggatatgatcctggatggtgatggcaggactgtgtactgacttcgaataggtacccggggatcctctagtgccgtgggtcgtttaagctgccgctgtacctgtgtcgtctggtgccttctggtgtacctgggaggttgtcgtctatcaagtatctgtggttggtgtcatgagtcagtgagtcccaatactgttcgtgtcctgtgtgcattatacccaaaactgttatgggcaaatcatgaataagcttgatgttcgaacttaaaagtctctgctcaatatggtattatggttgtttttgttcgtctcctaatatttgcctgggatcaaattttattggctggtgttcatttgacctccatgttcttgctaggctccattttttactctacagccataatatgtttgattgtttggtttgttctttgttgtacacctggttctgtcgagcttagttttcgacactggcttacagcttaacatgttgctattttattgggttctgattgctattttattgggttctgattgctagtttttgctgaatccaaaaaccatgttatttatttaagcgatccaggttattattatgatggtggctaagtttttttttttccaagggtaaattttctggattctccagtgtttctgtggccgaattcaatcactagagtcgacctgcaggcatgcccgcggtggagctcgaattccggtccgggcctagaaggccagcttcggccgccccgggcaactttattatacaaagttgatagatgtacctgattccgatgacttcgtaggttcctagctcaagccgctcgtgtccaagcgtcacttacgattagctaatgattacggcatctaggaccgactagctaactaactagtacgtacgcgccgactagctagctaaggtaccgagctcgaattcattccgattaatcgtggcctcttgctcttcaggatgaagagctatgtttaaacgtgcaagcgctactagacaattcagtacattaaaaacgtccgcaatgtgttattaagttgtctaagcgtcaatttgtttacaccacaatatatcctgcca

SEQ ID NO: 36 - DNA, 16917 bp, synthetic construct
  misc_feature 1..16917: note = PHP94715
  source 1..16917: mol_type = other DNA
gtttacccgccaatatatcctgtcaaacactgcggccgcacttgaccgcggatggagccggagctgtggtgaggccatcgacgggaggtgggggagaacacagtctcagtgttctttgtgagtccgcaaggtttttagcttttctgtattaattaaggttgctgttggctgtagaatacggtcgtggaagagctgtatcggtagctactacgtaagctattatatactggaagtctggagctcgtcgatctccggtcgtcttcctccatttctcctcgtcttgctttgactgctgctaccatttgcttctgttttctgatgaagcatgccatgtcggccaccagtgtttgtgtggtttttgcagggaatggctttcaagtgctgtgattgaatggccctcgtcgtcctcggctgagctcacatggacgcgtcatgtgagtgagatatatgatcatatgatgagtggggttcgggtgagtgcgtacttgaagtaggatcccgctttcactcattcattcattggcctttaaaccgggaaattttcgcgaggagatggagggaagcaagcagggtgacgagtgcagagtgccgcgagcgctttgtcaaaaggcaccgccgtaggcaaaaaaatcaatggccctgactgactcgatggtagtactactgtagagactagagagggttgctccccatatcttcgtgtgacttttactccagcattgcatttccgtcattgagacgttaattaatagcagctttcgggacagatgactgtggccatgtttcgtcacggccgcttcgtgccagctgggggtactatagtactgtgattttgttagtaaaaactttcattaggccaccattgacgaccgggccttcgcttttgctgcgctaattaaccatttcccggcgaccgaagggaacatgaacatgccccgacacatgagggcatgaggactagtgttctccctgtcgttcgttgacttgactagtgatagtttaaacgctcttcaactggaagagcggttactaccggttcactagctagctgctaatcgagctagttaccctatgaggtgacatgaagcgctcacggttactatgacggttagcttcacgactgttggtggcagtagcgtacgacttagctatagttccggacttacccttaagataacttcgtatagcatacattatacgaagttatgggcccacgcgtgaagagcggttaccagagctggtcacctttgtccaccaagatggaactgtcttcggccagaatggccatctggattcagcaggcctagaaggccatttatcgctatcaactttgtatagaaaagttgggccgaattcgagctcggtacggccagaatggcccggaccgggttaccaagcggccgcgaattcaagcttccttttgtctcccttttgtctcccttttgtctcccttttgtctcccttttgtctcccttttgtctcccttttgtctcccttttgtctcgaggacatctccactgacgtaagggatgacgcacaatcccactatccttcgcaagacccttcctctatataaggaagttcatttcatttggagaggaggatcccatggcggccaatgcgggcggcggtggagcgggaggaggcagcggcagcggcagcgtggctgcgccggcggtgtgccgccccagcggctcgcggtggacgccgacgccggagcagatcaggatgctgaaggagctctactacggctgcggcatccggtcgcccagctcggagcagatccagcgcatcaccgccatgctgcggcagcacggcaagatcgagggcaagaacgtcttctactggttccagaaccacaaggcccgcgagcgccagaagcgccgcctcaccagcctcgacgtcaacgtgcccgccgccggcgcggccgacgccaccaccagccaactcggcgtcctctcgctgtcgtcgccgccgccttcaggcgcggcgcctccctcgcccaccctcggcttctacgccgccggcaatggcggcggatcggctgtgctgctggacacgagttccgactggggcagcagcggcgctgctatggccaccgagacatgcttcctgcaggactacatgggcgtgacggacacgggcagctcgtcgcagtggccacgcttctcgtcgtcggacacgataatggcggcggccgcggcgcgggcggcgacgacgcgggcgcccgagacgctccctctcttcccgacctgcggcgacgacggcggcagcggtagcagcagctacttgccgttctggggtgccgcgtccacaactgccggcgccacttcttccgttgcgatccaacagcaacaccagctgcaggagcagtacagcttttacagcaacagcaacagcacccagctggccggcaccggcaaccaagacgtatcggcaacagcagcagcagccgccgccctggagctgagcctcagctcatggtgctccccttaccctgctgcagggagtatgtgagagcaacgcgagctgccactgctcttcactgatgtctctggaatggaaggaggaggaagtgagcatagcgttggtgcgttgctgtcaagggcgaattgtaccacatggttaacctagacttgtccatcttctggattggccaacttaattaatgtatgaaataaaaggatgcacacatagtgacatgctaatcactataatgtgggcatcaaagttgtgtgttatgtgtaattactagttatctgaataaaagagaaagagatcatccatatttcttatcctaaatgaatgtcacgtgtctttataattctttgatgaaccagatgcatttcattaaccaaatccatatacatataaatattaatcatatataattaatatcaattgggttagcaaaacaaatctagtctaggtgtgttttgcgaatgcggccgccaccgcggtggagctcgaattccggtccgggcctagaaggccagcttcaagtttgtacaaaaaagcaggctccggccagaatggcccggaccgggttaccgaattcgagctcggtaccatttaaattgcgcccgccacggccgtggaggtcgtattccggtcagcttgcatccctgcagtgcagcgtgacccggtcgtgcccctctctagagataatgagcattgcatgtctaagttataaaaaattaccacatattttttttgtcacacttgtttgaagtgcagtttatctatctttatacatatatttaaactttactctacgaataatataatctatagtactacaataatatcagtgttttagagaatcatataaatgaacagttagacatggtctaaaggacaattgagtattttgacaacaggactctacagttttatctttttagtgtgcatgtgttctcctttttttttgcaaatagcttcacctatataatacttcatccattttattagtacatccatttagggtttagggttaatggtttttatagactaatttttttagtacatctattttattctattttagcctctaaattaagaaaactaaaactctattttagtttttttatttaataatttagatataaaatagaataaaataaagtgactaaaaattaaacaaataccctttaagaaattaaaaaaactaaggaaacatttttcttgtttcgagtagataatgccagcctgttaaacgccgtcgacgagtctaacggacaccaaccagcgaaccagcagcgtcgcgtcgggccaagcgaagcagacggcacggcatctctgtcgctgcctctggacccctctcgagagttccgctccaccgttggacttgctccgctgtcggcatccagaaattgcgtggcggagcggcagacgtgagccggcacggcaggcggcctcctcctcctctcacggcaccggcagctacgggggattcctttcccaccgctccttcgctttcccttcctcgcccgccgtaataaatagacaccccctccacaccctctttccccaacctcgtgttgttcggagcgcacacacacacaaccagatctcccccaaatccacccgtcggcacctccgcttcaaggtacgccgctcgtcctcccccccccccctctctaccttctctagatcggcgttccggtccatgcatggttagggcccggtagttctacttctgttcatgtttgtgttagatccgtgtttgtgttagatccgtgctgctagcgttcgtacacggatgcgacctgtacgtcagacacgttctgattgctaacttgccagtgtttctctttggggaatcctgggatggctctagccgttccgcagacgggatcgatttcatgattttttttgtttcgttgcatagggtttggtttgcccttttcctttatttcaatatatgccgtgcacttgtttgtcgggtcatcttttcatgcttttttttgtcttggttgtgatgatgtggtctggttgggcggtcgttctagatcggagtagaattctgtttcaaactacctggtggatttattaattttggatctgtatgtgtgtgccatacatattcatagttacgaattgaagatgatggatggaaatatcgatctaggataggtatacatgttgatgcgggttttactgatgcatatacagagatgctttttgttcgcttggttgtgatgatgtggtgtggttgggcggtcgttcattcgttctagatcggagtagaatactgtttcaaactacctggtgtatttattaattttggaactgtatgtgtgtgtcatacatcttcatagttacgagtttaagatggatggaaatatcgatctaggataggtatacatgttgatgtgggttttactgatgcatatacatgatggcatatgcagcatctattcatatgctctaaccttgagtacctatctattataataaacaagtatgttttataattattttgatcttgatatacttggatgatggcatatgcagcagctatatgtggatttttttagccctgccttcatacgctatttatttgcttggtactgtttcttttgtcgatgctcaccctgttgtttggtgttacttctgcaggtcgactctagaggatccatggccactgtgaacaactggctcgctttctccctctccccgcaggagctgccgccctcccagacgacggactccacactcatctcggccgccaccgccgaccatgtctccggcgatgtctgcttcaacatcccccaagattggagcatgaggggatcagagctttcggcgctcgtcgcggagccgaagctggaggacttcctcggcggcatctccttctccgagcagcatcacaaggccaactgcaacatgatacccagcactagcagcacagtttgctacgcgagctcaggtgctagcaccggctaccatcaccagctgtaccaccagcccaccagctcagcgctccacttcgcggactccgtaatggtggcttcctcggccggtgtccacgacggcggtgccatgctcagcgcggccgccgctaacggtgtcgctggcgctgccagtgccaacggcggcggcatcgggctgtccatgattaagaactggctgcggagccaaccggcgcccatgcagccgagggtggcggcggctgagggcgcgcaggggctctctttgtccatgaacatggcggggacgacccaaggcgctgctggcatgccacttctcgctggagagcgcgcacgggcgcccgagagtgtatcgacgtcagcacagggtggagccgtcgtcgtcacggcgccgaaggaggatagcggtggcagcggtgttgccggcgctctagtagccgtgagcacggacacgggtggcagcggcggcgcgtcggctgacaacacggcaaggaagacggtggacacgttcgggcagcgcacgtcgatttaccgtggcgtgacaaggcatagatggactgggagatatgaggcacatctttgggataacagttgcagaagggaagggcaaactcgtaagggtcgtcaagtctatttaggtggctatgataaagaggagaaagctgctagggcttatgatcttgctgctctgaagtactggggtgccacaacaacaacaaattttccagtgagtaactacgaaaaggagctcgaggacatgaagcacatgacaaggcaggagtttgtagcgtctctgagaaggaagagcagtggtttctccagaggtgcatccatttacaggggagtgactaggcatcaccaacatggaagatggcaagcacggattggacgagttgcagggaacaaggatctttacttgggcaccttcagcacccaggaggaggcagcggaggcgtacgacatcgcggcgatcaagttccgcggcctcaacgccgtcaccaacttcgacatgagccgctacgacgtgaagagcatcctggacagcagcgccctccccatcggcagcgccgccaagcgcctcaaggaggccgaggccgcagcgtccgcgcagcaccaccacgccggcgtggtgagctacgacgtcggccgcatcgcctcgcagctcggcgacggcggagccctggcggcggcgtacggcgcgcactaccacggcgccgcctggccgaccatcgcgttccagccgggcgccgccagcacaggcctgtaccacccgtacgcgcagcagccaatgcgcggcggcgggtggtgcaagcaggagcaggaccacgcggtgatcgcggccgcgcacagcctgcaggacctccaccacctgaacctgggcgcggccggcgcgcacgactttttctcggcagggcagcaggccgccgccgctgcgatgcacggcctgggtagcatcgacagtgcgtcgctcgagcacagcaccggctccaactccgtcgtctacaacggcggggtcggcgacagcaacggcgccagcgccgtcggcggcagtggcggtggctacatgatgccgatgagcgctgccggagcaaccactacatcggcaatggtgagccacgagcaggtgcatgcacgggcctacgacgaagccaagcaggctgctcagatggggtacgagagctacctggtgaacgcggagaacaatggtggcggaaggatgtctgcatgggggactgtcgtgtctgcagccgcggcggcagcagcaagcagcaacgacaacatggccgccgacgtcgggcatggcggcgcgcagctcttcagtgtctggaacgacacttaagcgtacgtgccggcctggctctccgaaagggcgtattccagcacactggcggccgttactagacccaacctagacttgtccatcttctggattggccaacttaattaatgtatgaaataaaaggatgcacacatagtgacatgctaatcactataatgtgggcatcaaagttgtgtgttatgtgtaattactagttatctgaataaaagagaaagagatcatccatatttcttatcctaaatgaatgtcacgtgtctttataattctttgatgaaccagatgcatttcattaaccaaatccatatacatataaatattaatcatatataattaatatcaattgggttagcaaaacaaatctagtctaggtgtgttttgcgaatgcggcctccgggcacccagctttcttgtacaaagtggccgttaacggatcggccagatccctatagtattttaaaattgcattaacaaacatgtcctaattggtactcctgagatactataccctcctgttttaaaatagttggcattatcgaattatcattttactctttaatgttttctcttcttttaatatattttatgaattttaatgtattttaaaatgttatgcagttcgctctggacttttctgctgcgcctacacttgggtgtactgggcctaaattcagcctgaccgaccgcctgcattgaataatggatgagcaccggtaaaatccgcgtacccaactttcgagaagaaccgagacgtggcgggccgggccaccgacgcacggcaccagcgactgcacacgtcccgccggcgtacgtgtacgtgctgttccctcactggccgcccaatccactcatgcatgcccacgtacacccctgccgtggcgcgcccagatcctaatcctttcgccgttctgcacttctgctgcctataaatggcggcatcgaccgtcacctgcttcaccaccggcgagccacatcgagaacacgatcgagcacacaagcacgaagactcgtttaggagaaaccacaaaccaccaagccgtgcaagcaccaagcttggtcacccggtccgggcctagaaggccagcttcaagtttgtacaaaaaagcaggcttcgaaggagatagaaccgatccaccatgtccaacctgctcacggttcaccagaaccttccggctcttccagtggacgcgacgtccgatgaagtcaggaagaacctcatggacatgttccgcgacaggcaagcgttcagcgagcacacctggaagatgctgctctccgtctgccgctcctgggctgcatggtgcaagctgaacaacaggaagtggttccccgctgagcccgaggacgtgagggattaccttctgtacctgcaagcgcgaggtttgtttctgcttctacctttgatatatatataataattatcattaattagtagtaatataatatttcaaatatttttttcaaaataaaagaatgtagtatatagcaattgcttttctgtagtttataagtgtgtatattttaatttataacttttctaatatatgaccaaaacatggtgatgcctaggtctggcagtgaagaccatccagcaacaccttggacaactgaacatgcttcacaggcgctccggcctcccgcgccccagcgactcgaacgccgtgagcctcgtcatgcgccgcatcaggaaggaaaacgtcgatgccggcgaaagggcaaagcaggccctcgcgttcgagaggaccgatttcgaccaggtccgcagcctgatggagaacagcgacaggtgccaggacattaggaacctggcgttcctcggaattgcatacaacacgctcctcaggatcgcggaaattgcccgcattcgcgtgaaggacattagccgcaccgacggcggcaggatgcttatccacattggcaggaccaagacgctcgtttccaccgcaggcgtcgaaaaggccctcagcctcggagtgaccaagctcgtcgaacgctggatctccgtgtccggcgtcgcggacgacccaaacaactacctcttctgccgcgtccgcaagaacggggtggctgcccctagcgccaccagccaactcagcacgagggccttggaaggtattttcgaggccacccaccgcctgatctacggcgcgaaggatgacagcggtcaacgctacctcgcatggtccgggcactccgcccgcgttggagctgctagggacatggcccgcgccggtgtttccatccccgaaatcatgcaggcgggtggatggacgaacgtgaacattgtcatgaactacattcgcaaccttgacagcgagacgggcgcaatggttcgcctcctggaagatggtgactgagctagacccagctttcttgtacaaagtggccgttaacggatccagacttgtccatcttctggattggccaacttaattaatgtatgaaataaaaggatgcacacatagtgacatgctaatcactataatgtgggcatcaaagttgtgtgttatgtgtaattactagttatctgaataaaagagaaagagatcatccatatttcttatcctaaatgaatgtcacgtgtctttataattctttgatgaaccagatgcatttcattaaccaaatccatatacatataaatattaatcatatataattaatatcaattgggttagcaaaacaaatctagtctaggtgtgttttgcgaatgcggccgccaccgcggtggagctcgaattccggtccgggcctagaaggccagcttcggccgccccgggcaactttattatacaaagttgatagataaatcagatatctggttcctaaggacccggcggaccgattaaactgattcggtccgacgcgttacctaataacttcgtatagcatacattatacgaagttattagctaactaactagtaagcttggtcacccggtccgtcaatattctgattccgatgacttcgtaggttcctagctcaagccgctcgtgtccaagcgtcacttacgattagctaatgattacggcatctaggaccgactagtggcgcgccgactagctagctaaggtacgacttagctatagttccggacttaccggcgccgctagcctgcagtgcagcgtgacccggtcgtgcccctctctagagataatgagcattgcatgtctaagttataaaaaattaccacatattttttttgtcacacttgtttgaagtgcagtttatctatctttatacatatatttaaactttactctacgaataatataatctatagtactacaataatatcagtgttttagagaatcatataaatgaacagttagacatggtctaaaggacaattgagtattttgacaacaggactctacagttttatctttttagtgtgcatgtgttctcctttttttttgcaaatagcttcacctatataatacttcatccattttattagtacatccatttagggtttagggttaatggtttttatagactaatttttttagtacatctattttattctattttagcctctaaattaagaaaactaaaactctattttagtttttttatttaataatttagatataaaatagaataaaataaagtgactaaaaattaaacaaataccctttaagaaattaaaaaaactaaggaaacatttttcttgtttcgagtagataatgccagcctgttaaacgccgtcgacgagtctaacggacaccaaccagcgaaccagcagcgtcgcgtcgggccaagcgaagcagacggcacggcatctctgtcgctgcctctggacccctctcgagagttccgctccaccgttggacttgctccgctgtcggcatccagaaattgcgtggcggagcggcagacgtgagccggcacggcaggcggcctcctcctcctctcacggcaccggcagctacgggggattcctttcccaccgctccttcgctttcccttcctcgcccgccgtaataaatagacaccccctccacaccctctttccccaacctcgtgttgttcggagcgcacacacacacaaccagatctcccccaaatccacccgtcggcacctccgcttcaaggtacgccgctcgtcctcccccccccccctctctaccttctctagatcggcgttccggtccatgcatggttagggcccggtagttctacttctgttcatgtttgtgttagatccgtgtttgtgttagatccgtgctgctagcgttcgtacacggatgcgacctgtacgtcagacacgttctgattgctaacttgccagtgtttctctttggggaatcctgggatggctctagccgttccgcagacgggatcgatttcatgattttttttgtttcgttgcatagggtttggtttgcccttttcctttatttcaatatatgccgtgcacttgtttgtcgggtcatcttttcatgcttttttttgtcttggttgtgatgatgtggtctggttgggcggtcgttctagatcggagtagaattctgtttcaaactacctggtggatttattaattttggatctgtatgtgtgtgccatacatattcatagttacgaattgaagatgatggatggaaatatcgatctaggataggtatacatgttgatgcgggttttactgatgcatatacagagatgctttttgttcgcttggttgtgatgatgtggtgtggttgggcggtcgttcattcgttctagatcggagtagaatactgtttcaaactacctggtgtatttattaattttggaactgtatgtgtgtgtcatacatcttcatagttacgagtttaagatggatggaaatatcgatctaggataggtatacatgttgatgtgggttttactgatgcatatacatgatggcatatgcagcatctattcatatgctctaaccttgagtacctatctattataataaacaagtatgttttataattattttgatcttgatatacttggatgatggcatatgcagcagctatatgtggatttttttagccctgccttcatacgctatttatttgcttggtactgtttcttttgtcgatgctcaccctgttgtttggtgttacttctgcaggtcgactctagaggatcaattcgctagcgaagttcctattccgaagttcctattctctagaaagtataggaacttcagatccaccgggatccaccatggttgaacaagatggattgcacgcaggttctccggccgcttgggtggagaggctattcggctatgactgggcacaacagacaatcggctgctctgatgccgccgtgttccggctgtcagcgcaggggcgcccggttctttttgtcaagaccgacctgtccggtgccctgaatgaactgcaggacgaggcagcgcggctatcgtggctggccacgacgggcgttccttgcgcagctgtgctcgacgttgtcactgaagcgggaagggactggctgctattgggcgaagtgccggggcaggatctcctgtcatctcaccttgctcctgccgagaaagtatccatcatggctgatgcaatgcggcggctgcatacgcttgatccggctacctgcccattcgaccaccaagcgaaacatcgcatcgagcgagcacgtactcggatggaagccggtcttgtcgatcaggatgatctggacgaagagcatcaggggctcgcgccagccgaactgttcgccaggctcaaggcgcgcatgcccgacggcgatgatctcgtcgtgacccatggcgatgcctgcttgccgaatatcatggtggaaaatggccgcttttctggattcatcgactgtggccggctgggtgtggcggaccgctatcaggacatagcgttggctacccgtgatattgctgaagagcttggcggcgaatgggctgaccgcttcctcgtgctttacggtatcgccgctcccgattcgcagcgcatcgccttctatcgccttcttgacgagttcttctgaggatccaccatggttaacctagacttgtccatcttctggattggccaacttaattaatgtatgaaataaaaggatgcacacatagtgacatgctaatcactataatgtgggcatcaaagttgtgtgttatgtgtaattactagttatctgaataaaagagaaagagatcatccatatttcttatcctaaatgaatgtcacgtgtctttataattctttgatgaaccagatgcatttcattaaccaaatccatatacatataaatattaatcatatataattaatatcaattgggttagcaaaacaaatctagtctaggtgtgttttgcaagcttgcatgcctgcagtgcagcgtgacccggtcgtgcccctctctagagataatgagcattgcatgtctaagttataaaaaattaccacatattttttttgtcacacttgtttgaagtgcagtttatctatctttatacatatatttaaactttactctacgaataatataatctatagtactacaataatatcagtgttttagagaatcatataaatgaacagttagacatggtctaaaggacaattgagtattttgacaacaggactctacagttttatctttttagtgtgcatgtgttctcctttttttttgcaaatagcttcacctatataatacttcatccattttattagtacatccatttagggtttagggttaatggtttttatagactaatttttttagtacatctattttattctattttagcctctaaattaagaaaactaaaactctattttagtttttttatttaataatttagatataaaatagaataaaataaagtgactaaaaattaaacaaataccctttaagaaattaaaaaaactaaggaaacatttttcttgtttcgagtagataatgccagcctgttaaacgccgtcgacgagtctaacggacaccaaccagcgaaccagcagcgtcgcgtcgggccaagcgaagcagacggcacggcatctctgtcgctgcctctggacccctctcgagagttccgctccaccgttggacttgctccgctgtcggcatccagaaattgcgtggcggagcggcagacgtgagccggcacggcaggcggcctcctcctcctctcacggcaccggcagctacgggggattcctttcccaccgctccttcgctttcccttcctcgcccgccgtaataaatagacaccccctccacaccctctttccccaacctcgtgttgttcggagcgcacacacacacaaccagatctcccccaaatccacccgtcggcacctccgcttcaaggtacgccgctcgtcctcccccccccccctctctaccttctctagatcggcgttccggtccatgcatggttagggcccggtagttctacttctgttcatgtttgtgttagatccgtgtttgtgttagatccgtgctgctagcgttcgtacacggatgcgacctgtacgtcagacacgttctgattgctaacttgccagtgtttctctttggggaatcctgggatggctctagccgttccgcagacgggatcgatttcatgattttttttgtttcgttgcatagggtttggtttgcccttttcctttatttcaatatatgccgtgcacttgtttgtcgggtcatcttttcatgcttttttttgtcttggttgtgatgatgtggtctggttgggcggtcgttctagatcggagtagaattctgtttcaaactacctggtggatttattaattttggatctgtatgtgtgtgccatacatattcatagttacgaattgaagatgatggatggaaatatcgatctaggataggtatacatgttgatgcgggttttactgatgcatatacagagatgctttttgttcgcttggttgtgatgatgtggtgtggttgggcggtcgttcattcgttctagatcggagtagaatactgtttcaaactacctggtgtatttattaattttggaactgtatgtgtgtgtcatacatcttcatagttacgagtttaagatggatggaaatatcgatctaggataggtatacatgttgatgtgggttttactgatgcatatacatgatggcatatgcagcatctattcatatgctctaaccttgagtacctatctattataataaacaagtatgttttataattattttgatcttgatatacttggatgatggcatatgcagcagctatatgtggatttttttagccctgccttcatacgctatttatttgcttggtactgtttcttttgtcgatgctcaccctgttgtttggtgttacttctgcaggtcgactctagaggatccaccggtcgccaccatggccctgtccaacaagttcatcggcgacgacatgaagatgacctaccacatggacggctgcgtgaacggccactacttcaccgtgaagggcgagggcagcggcaagccctacgagggcacccagacctccaccttcaaggtgaccatggccaacggcggccccctggccttctccttcgacatcctgtccaccgtgttcatgtacggcaaccgctgcttcaccgcctaccccaccagcatgcccgactacttcaagcaggccttccccgacggcatgtcctacgagagaaccttcacctacgaggacggcggcgtggccaccgccagctgggagatcagcctgaagggcaactgcttcgagcacaagtccaccttccacggcgtgaacttccccgccgacggccccgtgatggccaagaagaccaccggctgggacccctccttcgagaagatgaccgtgtgcgacggcatcttgaagggcgacgtgaccgccttcctgatgctgcagggcggcggcaactacagatgccagttccacacctcctacaagaccaagaagcccgtgaccatgccccccaaccacgtggtggagcaccgcatcgccagaaccgacctggacaagggcggcaacagcgtgcagctgaccgagcacgccgtggcccacatcacctccgtggtgcccttctgaagcggccgcaacctagacttgtccatcttctggattggccaacttaattaatgtatgaaataaaaggatgcacacatagtgacatgctaatcactataatgtgggcatcaaagttgtgtgttatgtgtaattactagttatctgaataaaagagaaagagatcatccatatttcttatcctaaatgaatgtcacgtgtctttataattctttgatgaaccagatgcatttcattaaccaaatccatatacatataaatattaatcatatataattaatatcaattgggttagcaaaacaaatctagtctaggtgtgttttgcgaatgcggccgccaccgcggtggagctcgaatgcggccctagcgtatacgaagttcctattccgaagttcctattcttcaaaaagtataggaacttctgtaccgagctcgaattcattccgattaatcgtggcctcttgctcttcaggatgaagagctatgtttaaacgtgcaagcgctactagacaattcagtacattaaaaacgtccgcaatgtgttattaagttgtctaagcgtcaatttgtttacaccacaatatatcctgcca

SEQ ID NO: 37 - DNA, 20588 bp, synthetic construct
  misc_feature 1..20588: note = PHP95067
  source 1..20588: mol_type = other DNA
gtttacccgccaatatatcctgtcaaacactgatagtttaaactgaaggcgggaaacgacaatctgatcatgagcggagaattaagggagtcacgttatgacccccgccgatgacgcgggacaagccgttttacgtttggaactgacagaaccgcaacgttgaaggagccactcagcaagctggtacgattgtaatacgactcactatagggcgaattgagcgctgtttaaacgctcttcaactggaagagcggttacgctgtttaaacgctcttcaactggaagagcggttactaccggttcactagctagctgctaatcgagctagttaccctatgaggtgacatgaagcgctcacggttactatgacggttagcttcacgactgttggtggcagtagcgtacgacttagctatagttccggacttacccttaagcgatttaaatctgcggttaccgaattcgagctcggtacctagtacccttgtacttttggtttcacctgcatagagaaaacccacaagaatatgacagtctgatttgtcagtctcattctcaagcaacatttctctatccgttactttcatggtgaataacacaatccatcatcaatactttgtgttactcagaaactgaaagttattccgagtcttgcatatctttggacctactcgtttttctaccattattgctgattgttaagctctcgctacttgaatcggcattgttggagtgggaaggttcaaaaaattggagttatgactagttgtctctttctatgtacgatggagaaaatgaataaacaactgagaaaatggctcttgtttagttgatgatgctcttaagctttccactggttgccatatatgatttgggcatttcactttgatcttaatgggccttgtaaagcccaagactcatgattatctttagttgatgctcttaattaggtgtgggcaaataattcaaactgtatgtacccgaccaaaaccaaagcaaaaataatcgaaccaaaccgaaaatttaaaaataaccgaatgaaaactaaatcctataactgaaagaactgaaaccgaatcaaaatatttaatgtaaccaaaaatatccgaaatataattatattgtcaaaaatattaataatttctagattaaataattaaaaatacttaaaaatttatataaaatagtaaaaatactcgaaaataaccacaaatattcaaaaacaaccgaaatatcccaaaatattcaaagcaaaataaccgaatggataccaaattttaaaaccgaaaaaactggaacaaaaccaaaatcgaaccaaaatttcaaaaatcgaataaatactaaactttagaacaaaaaaaaacgataaccgaatgtatacgaaccaaagccgaattagataaccgaacgtccaggactactcttaatctttccgccacttatgatttgggctattactttgtttataatgagccttttcaagctcaagttcatgattgtccgtgagatgagaaactgacttgttggattcgaaaccctagctagtattggttaatacttaatacataaatgacctgcattgacatcatcatccaagaaaataaaaattgtatgcttgagatatttagttttcctagctaggttttctttattttagtaccgaatctttaggtgtgccacgttaatttagacccattttttcatacttaccaactgagtctagtttaatcatgactataatcgtataaaatgattcagtcgacgtcattgcgaacgtatataaaatcatccaaattgacgtcattccaaagaggtaagcatgcttatctaagagtccgagcatactaaacaagacgacattttatttgcactccaaatcaaattttgtattgcctaaagaaaaacaatcaaactcaagtttcttaaaattaatttcattcaaactaatcactttcaatatctcacatattattcatgccatttctatttgtctaaacatgatttaaaaaaaaaagtaaaatacaaagattactatgcaaaaactctataaaaaaaaattcaaatttcttatttatttgtgacatcaaattttcaaaataatttttttaattatcggttgatccggtcagtcgataaaaacataaactttcagcgaccgttaaaactttcctactaccgatttagagaaaatcttagcttgaaacgtaattgtaacctgccttcatgcaagtcgcaagatatgtcatcctaagttgtatatgttttctcaaaagatgtatttacttgagaaaatacgtttcaacgttgatggacaaccaattaagaatcaagcacctttcgtaatcaatttaggcttatcgtctaaggtatactgatttacgacagttgactagacttataaggaacaaaataatagaatagtttctaaacacttcacctaatcatagagactaagatggtaattcgtaaacgacaaagcctagtgacactgtccattgtaaaattccacatcatattagtattaaacatatacatgtagtttcctgaacacatgtagtatcaaacacacttcgtggcttcttcctcgaaacctgcggccgcgctatagttccggacttacccttaagataacttcgtatagcatacattatacgaagttatgggcccacgcgtgaagagcggttaccagagctggtcacctttgtccaccaagatggaactgtcttcggccagaatggccatctggattcagcaggcctagaaggccatttatcgctatcaactttgtatagaaaagttgggccgaattcgagctcggtacggccagaatggcccggaccgaagcttgcggccgcacactgatagtttaaactgaaggcgggaaacgacaatctgatcatgagcggagaattaagggagtcacgttatgacccccgccgatgacgcgggacaagccgttttacgtttggaactgacagaaccgcaacgttgaaggagccactcagccgcgggtttctggagtttaatgagctaagcacatacgtcagaaaccattattgcgcgttcaaaagtcgcctaaggtcactatcagctagcaaatatttcttgtcaaaaatgctccactgacgttccataaattcccctcggtatccaattagagtctcatattcactctcccgggggatctcgactctagaggatcgctcaggaaggccgctgagatagaggcatggcggccaatgcgggcggcggtggagcgggaggaggcagcggcagcggcagcgtggctgcgccggcggtgtgccgccccagcggctcgcggtggacgccgacgccggagcagatcaggatgctgaaggagctctactacggctgcggcatccggtcgcccagctcggagcagatccagcgcatcaccgccatgctgcggcagcacggcaagatcgagggcaagaacgtcttctactggttccagaaccacaaggcccgcgagcgccagaagcgccgcctcaccagcctcgacgtcaacgtgcccgccgccggcgcggccgacgccaccaccagccaactcggcgtcctctcgctgtcgtcgccgccgccttcaggcgcggcgcctccctcgcccaccctcggcttctacgccgccggcaatggcggcggatcggctgtgctgctggacacgagttccgactggggcagcagcggcgctgccatggccaccgagacatgcttcctgcaggactacatgggcgtgacggacacgggcagctcgtcgcagtggccacgcttctcgtcgtcggacacgataatggcggcggccgcggcgcgggcggcgacgacgcgggcgcccgagacgctccctctcttcccgacctgcggcgacgacggcggcagcggtagcagcagctacttgccgttctggggtgccgcgtccacaactgccggcgccacttcttccgttgcgatccagcagcaacaccagctgcaggagcagtacagcttttacagcaacagcaacagcacccagctggccggcaccggcaaccaagacgtatcggcaacagcagcagcagccgccgccctggagctgagcctcagctcatggtgctccccttaccctgctgcagggagtatgtgagagcaacgcgagctgccactgctcttcactgatgtctctggaatggaaggaggaggaagtgagcatagcgttggtgcgttgctgtcaagggcgaattcacatggttaacctagacttgtccatcttctggattggccaacttaattaatgtatgaaataaaaggatgcacacatagtgacatgctaatcactataatgtgggcatcaaagttgtgtgttatgtgtaattactagttatctgaataaaagagaaagagatcatccatatttcttatcctaaatgaatgtcacgtgtctttataattctttgatgaaccagatgcatttcattaaccaaatccatatacatataaatattaatcatatataattaatatcaattgggttagcaaaacaaatctagtctaggtgtgttttgcgaatgcggccgccaccgcggtggagctcgaattccggtccgggcctagaaggccagcttcaagtttgtacaaaaaagcaggctccggccagagttacccggaccgaagcttgcatgcctgcagtgcagcgtgacccggtcgtgcccctctctagagataatgagcattgcatgtctaagttataaaaaattaccacatattttttttgtcacacttgtttgaagtgcagtttatctatctttatacatatatttaaactttactctacgaataatataatctatagtactacaataatatcagtgttttagagaatcatataaatgaacagttagacatggtctaaaggacaattgagtattttgacaacaggactctacagttttatctttttagtgtgcatgtgttctcctttttttttgcaaatagcttcacctatataatacttcatccattttattagtacatccatttagggtttagggttaatggtttttatagactaatttttttagtacatctattttattctattttagcctctaaattaagaaaactaaaactctattttagtttttttatttaataatttagatataaaatagaataaaataaagtgactaaaaattaaacaaataccctttaagaaattaaaaaaactaaggaaacatttttcttgtttcgagtagataatgccagcctgttaaacgccgtcgacgagtctaacggacaccaaccagcgaaccagcagcgtcgcgtcgggccaagcgaagcagacggcacggcatctctgtcgctgcctctggacccctctcgagagttccgctccaccgttggacttgctccgctgtcggcatccagaaattgcgtggcggagcggcagacgtgagccggcacggcaggcggcctcctcctcctctcacggcaccggcagctacgggggattcctttcccaccgctccttcgctttcccttcctcgcccgccgtaataaatagacaccccctccacaccctctttccccaacctcgtgttgttcggagcgcacacacacacaaccagatctcccccaaatccacccgtcggcacctccgcttcaaggtacgccgctcgtcctcccccccccccctctctaccttctctagatcggcgttccggtccatgcatggttagggcccggtagttctacttctgttcatgtttgtgttagatccgtgtttgtgttagatccgtgctgctagcgttcgtacacggatgcgacctgtacgtcagacacgttctgattgctaacttgccagtgtttctctttggggaatcctgggatggctctagccgttccgcagacgggatcgatttcatgattttttttgtttcgttgcatagggtttggtttgcccttttcctttatttcaatatatgccgtgcacttgtttgtcgggtcatcttttcatgcttttttttgtcttggttgtgatgatgtggtctggttgggcggtcgttctagatcggagtagaattctgtttcaaactacctggtggatttattaattttggatctgtatgtgtgtgccatacatattcatagttacgaattgaagatgatggatggaaatatcgatctaggataggtatacatgttgatgcgggttttactgatgcatatacagagatgctttttgttcgcttggttgtgatgatgtggtgtggttgggcggtcgttcattcgttctagatcggagtagaatactgtttcaaactacctggtgtatttattaattttggaactgtatgtgtgtgtcatacatcttcatagttacgagtttaagatggatggaaatatcgatctaggataggtatacatgttgatgtgggttttactgatgcatatacatgatggcatatgcagcatctattcatatgctctaaccttgagtacctatctattataataaacaagtatgttttataattattttgatcttgatatacttggatgatggcatatgcagcagctatatgtggatttttttagccctgccttcatacgctatttatttgcttggtactgtttcttttgtcgatgctcaccctgttgtttggtgttacttctgcaggtcgactttaacttagcctaggatccatggagaggttgggcgtcggcgtcggcgtcggcgagctgccgccggggttccgcttccacccgacggacgaggagctgatcacctactacctcctctgcaaggccgtggacggcggcttctgcggcggccgcgccatcgcggagatcgacctgaacaagtgcgagccatgggagctcccggacaaggcgaagatgggggagaaggagtggtacttctactgcctccgcgaccgcaagtacccgacgggcctgcgcaccaaccgcgccacggcggccggctactggaaggccaccggcaaggaccgcgaggtccgcagcggccgcagcggcgcgctggtgggcatgaagaagacgctcgtcttctaccggggccgcgcccccaggggccagaagacgcgctgggtcatgcacgagtaccgcctcgacggcacctacgcctaccatttccttcccggctctacgagggacgagtgggtgatcgcgagggtgttccagaagccaggcgaggtcccatgcggccgcaagcaccgcctgggcggccccagcgccgccgccggcgagtcctgcttctcggactccaccacctcggcctccatcggcggcggcggcggaggaggagcgtccgcgtcgtctcgcccgctgctcaccgtcacggacacttcctcgccgtcgctgttcgtggccaacgcgaacgccgccgccagcaacaacaacggcaacccggtcaccgggcgagagctcgtgccctgcttctccactaccgccagtcccctggaagccgcggcgctcggcgtcgtcgggcacccgtacaacgcggccccgctgcgtctgggcttggacttcgaggcgccgtccccgggcttcgtcgtcccgaacctgcgttccctgcaagtgcaggacgacggcggcctgccgctgttcctctcggcagcagcaggcggcggcatgtcgtccgcgacgctgggaataatggggtcgctgggcgggtctctccactgcccgccccacgccggcatggatgtcgtcaaggtcgagggccgcgccgcgccgccgcagatggctgtcggccccggcctcctcgatggcgccttcgcctggggcttctagggtaccgttaacagatctactaactatctatactgtaataatgttgtatagccgccggatagctagctagtttagtcattcagcggcgatgggtaataataaagtgtcatccatccatcaccatgcgtggcaacgtgagcaatgacctgattgaacaaattgaaatgaaaagaagaaatatgttatatgtcaacgagatttcctcataatgccactgacgacgtgtgtccaagaaatgtatcagtgatacgtatattcacaatttttttatgacttatactcacaatttgtttttttactacttatactcacaatttgttgtgcgtaccataacaatttcgatcgaatatatatcagaaagttgacgaaagtaagctcactcaaaaagttaaatgggctgcggaagctgcgtcaggcccaagttttggctattctatccggtatccacgattttgatggctgagggacatatgttcgcttaagcttcggtccgggcctagaaggccgatctcccgggcacccagctttcttgtacaaagtggccgttaacggatcggccagaatggcccggaccgggttaccgaattcgagctcggtaccctggttcacaaactcaatacaacacacagtggagtagggtattacgctccggcggcccgaaccactctaaatccttgtgtcctcgtgtgctcttccaccattaatgactgtaattgcagggacacgaagagttgtagcgcttttgccaacaagatccgctatatgctagtagagtggaacctgcacagcaacaagcatccaataatctgagaataagaattatgtgtggtgatggttctcatctctgcaactcgccattttcgcgagagaaccaaatccaagttggtgaagatcatgatttgggctcatgggctggcatagtagctattacctttgcaattgtggttcgaatctatccgatattctccttttcagggagagctaatgcttatgcttattgggtattttggtttgacactgcttcacgcccaaaaaaaggcaactatgtctgagttggatatggcccaaaaaaaggcagctatgtctgagttggatatggaagtcttctttcgtttagggtgaagtaagaccaagctcatgagcttattatcttaggtcggaacaaattagttgataggcatggcacatttatcaaattataatgattttaacagaaaagcaacacctctttttcagcagcaccagctttgcaagctgcaattgacactccaagcatagtatttgctccaaactcagcctgcatttcgcacaatatcatatctatttccatttggataaaatatattttccagaaatatgggaacagaatcaagatacagaaaaaagttgtggtagtagtggtaagtggaaacacaagtacagtgaaaagatagcattatttctgaacagtcaaattaaccgaaataagtagtatcacatactgcccctaaattgactacacccaatgtaaagaattgcttgagcatattgagccatcagttgtttgtttgtgtaacggatttgacaatgcagagttcaggagcaaaaaaccgcaaaggagagaaagagggaaaggatctcctagtatcccaccttgtggcgcgccctgtcaagtgcatgatggcctggtcgatctgcgtctgctgctgcggttccatcccaacgagtgcctccgacaccttgtcgttgatcacccgcaccgcgtaggcgacccccctggcgaggaacttccgcctctcggaggccccggccgcgtcggcggcggcgccctcgagcgcgcccacgctagccgtagatgctcggtgcacggccttgttggtgtgcaactcgacctcaacggccggtgcgctacgcccgtcaaggatctggcgcgcccgcaccctcgtgatcacggtgggcgcctcccgcctcatgtggccgacgatgaaaagcgccgggttaggggccttggcgcgcaccgccgtattcagggcctcctcgctcttgcgcgagagcaggtgcttccccaggtactcctgcactgacaaggctgccacagcggtggaatttgtcctcacgacttcgccacgtcgtcctcacctccctggcttcccacgactccgccgtatcgaggtgctcggtgggtcgtcttaatccgaagtccgaactaggaagacgagacagagaggtctgaggaatgggcctcgtttgatgttgagctgaattatttttccagcataagcccaggtcttggtccatgaacaaaattactagaaacccagcccagtactacgatctaaaagagggactgccactggatagctctctctagcattctccacgctccaatacagcggcgtcgtgtctatccgggtctatccgcgaacacgtgagaactctccagaaactgctttctcctccacttcatctctctcgctttccctctataaaaagaccccttctaggaattgagggagacagcaagcaccaagcagcgatccgaagctcaatcaattcactcaaacctcttccccaaatcttcgattagatcttcgttgacaagaagactagaaccgaacctgacatgtccaacctgctcacggttcaccagaaccttccggctcttccagtggacgcgacgtccgatgaagtcaggaagaacctcatggacatgttccgcgacaggcaagcgttcagcgagcacacctggaagatgctgctctccgtctgccgctcctgggctgcatggtgcaagctgaacaacaggaagtggttccccgctgagcccgaggacgtgagggattaccttctgtacctgcaagcgcgaggtttgtttctgcttctacctttgatatatatataataattatcattaattagtagtaatataatatttcaaatatttttttcaaaataaaagaatgtagtatatagcaattgcttttctgtagtttataagtgtgtatattttaatttataacttttctaatatatgaccaaaacatggtgatgcctaggtctggcagtgaagaccatccagcaacaccttggacaactgaacatgcttcacaggcgctccggcctcccgcgccccagcgactcgaacgccgtgagcctcgtcatgcgccgcatcaggaaggaaaacgtcgatgccggcgaaagggcaaagcaggccctcgcgttcgagaggaccgatttcgaccaggtccgcagcctgatggagaacagcgacaggtgccaggacattaggaacctggcgttcctcggaattgcatacaacacgctcctcaggatcgcggaaattgcccgcattcgcgtgaaggacattagccgcaccgacggcggcaggatgcttatccacattggcaggaccaagacgctcgtttccaccgcaggcgtcgaaaaggccctcagcctcggagtgaccaagctcgtcgaacgctggatctccgtgtccggcgtcgcggacgacccaaacaactacctcttctgccgcgtccgcaagaacggggtggctgcccctagcgccaccagccaactcagcacgagggccttggaaggtattttcgaggccacccaccgcctgatctacggcgcgaaggatgacagcggtcaacgctacctcgcatggtccgggcactccgcccgcgttggagctgctagggacatggcccgcgccggtgtttccatccccgaaatcatgcaggcgggtggatggacgaacgtgaacattgtcatgaactacattcgcaaccttgacagcgagacgggcgcaatggttcgcctcctggaagatggtgactgaggtacccaacctagacttgtccatcttctggattggccaacttaattaatgtatgaaataaaaggatgcacacatagtgacatgctaatcactataatgtgggcatcaaagttgtgtgttatgtgtaattactagttatctgaataaaagagaaagagatcatccatatttcttatcctaaatgaatgtcacgtgtctttataattctttgatgaaccagatgcatttcattaaccaaatccatatacatataaatattaatcatatataattaatatcaattgggttagcaaaacaaatctagtctaggtgtgttttgcgatccgatatcgaattggccacggtaccagctgctgctgttctagggttcacaagtctgcctatttgtcttccccaatggagctatggttgtctggtctggtccttggtcgtgtcccgtttcattgtgtactatttacctgtaatgtgtatccttaagtctggtttgatggtgtctgaaacgttttgctgtggtagagcagcatggaagaactataatgaataagtgatccctaatcattgtgtccaaattttgcttctgctatacccttttgtgctgtttcttatgttttgcttaaaaatttgatctgacaaacaaatttgtctaaattatgctcttgttctgactgtgtactgtacacatttgtattgctaccggtttggcacatagttttctctttgattgcagatcaaacccttctgattgcagattgcttggctatggctgatgtgctcactgttcttctttagcttgtatattgctgatggtggcttggctacggctgaaaaagttgctgctgcgccgacttggcaactgttgctccagtaatgctttgtcctctcttcctagccgccgacttggcacttggcagctgttgctcctgtaatgcgttgttatctcttatctcttgagatgtactatgattttgaggctgtttgacttgtgccagattgccagtgctgatgctatattatctcaggtttttatgctagtatatgttttactgtgtgctgcctgtgtcgagttacgtaatctattgaaccgctatgcgtgttgatgccctgttgttgcttgccagattgatgcccctgttgcttgcagcttgcaagctgtagtgaaatcctaaaattccaaaccaaatctattctgaacttttgaagatctgtgatgtccggaagaaaagattcaaacagataaacgggactctccagaatctataaaataaatgatcgacaaacgctttgctttggtaggcttcaagcttggtcacccggtccgggcctagaaggccagcttcggccgccccgggcaactttattatacaaagttgatagataaatcagatatctggttcctaaggacccggcggaccgattaaactgattcggtccgacgcgttacctaataacttcgtatagcatacattatacgaagttattagctaactaactagtaagcttaagccatgggtcgacggatccgttaactagcgtggcatttggcaccgccgcacactatgcgagctaggagtgctagtttacagatgaaactatgaaaccaagaaaacacaattgtccgtagctagcgcgtggcgtcgtgtcaagcttcacacagtatcttcgttcttcactataaatcgcgcctgttgttcgtgagacccaccaccgtggataacagtcccctaataataagcgatcaacagcactgctgatggctgaacaccgaggcgccgccgcgcgtaaccatccgccggagcagcccgtcgtgccggcgaacgacgccttccccgaccgcgcccagcagctctgcctcgacgccgggcgcgcgctcgcgatgtgcggcgtgctcgtcgccgtccctcccgcattttacgcgtcgacgtcgcggacgacaccgcacttgccttcgtcggcttcgtcctctggatcatcggtgcgtggctgtgcctcctggcgctcacgcccttggctccacgggcggtgagggcgggcggggccgccgccagcaccttgctgatcaggtgcctgtccctttcatgaactactagcgcccgcgcccgcggccgccgggcacaagagaacacatcgatgttcgctgcgtacgtcagcaataaggcactctttgtcagtagtcgagtgcatatgttgggtgtttgccctgggagatttcaagtgttgtggccattatcccgcaggataaaaaatcggcggcttttggattgatacggaaaataacgatgtttcatgctcgtgttgtgtgtgtgacatcttgtcagccaagtttttaaccgttgctactccccctctgtgggctcagtgtgtggaccggaatacgtcgtacataggccgtagcctaagcccaatatgccgtttttcaggttggcctgtgtgacgacaagcgggtctcaaaagcccatcacgcaactggcctgcaattattggaggagagcgcgtcgagttggttccagaggctgcgtggtggggccggactctgcgacgacctctcgttcgcgtccgatttggttgccgtgagccgtgacgtaacgcctccttccgttcctccctatataagttccacccccgggtccggtttccccaagccccagtgacccccgatcccgatcgcgaaatctccgcacccgccggcaagggaccgaagcaagcctctctcccgaccgtcgcatcaaggtacgcgtccgctcgatctgtcctcttccttctcgatttgacttgctgtggtgcccgatcacgggatcagaatcgcaccagtgtagatttcgcatgttctaagatgtgttagtttccaggctaatccagttctcttgacgcccgatccgatcgagctccgtgtttatttcagcctaatcgtagtattcccctaaaatttcctcattagggggttcgcaagattgttggtcgacaggttcacttatgctcgatcgcttacttttagtcgattcatgctgcgtactattgttgccccccgtggttttatcttttctcgtgtgaaatccagtagatatagtagatatcgtagcattaggttttaattcaatcgattgattattgtatcatcaaaattgagaagttcgaatcatgcctatcatgctgcctcaaccgaaatcctgtatattgaagtttcaattcaattgattgatcattcattagattcaaccaaaatctagaaggttagatgacgcatgtcatgctgcctgcgtagtttacctttgatctgtttatgattaccttatcagtaggatatttgtgattttgggaagtagcactaactgattcatgctgacatgatgttccctttcagattatactgttgagtcctatctaattgatgctttgtatgctatatgaatacgtcatggtaaattagcagttaattagcatattagcaattgggcgtacctcatcaggattgctcttgtagatgtgtgtggtgatgtttcttgttcaattcatgttctgctttaaaagtatgtgttctctgtttgttaattaagattcatggttataatgatttggacctaattaatcagggttgcccttttagatgcgtggttacttgttgagttcatttttttcctgctatagttgtatgcgtttgttcattcatggttagatttgatttgtttcttctctattccatgccttccatatacttcaattgtagcttaacatgagatttctgtatatgcaggtcgaccgccggggatccacacgacaccatggcccagtccaagcacggcctgaccaaggagatgaccatgaagtaccgcatggagggctgcgtggacggccacaagttcgtgatcaccggcgagggcatcggctaccccttcaagggcaagcaggccatcaacctgtgcgtggtggagggcggccccttgcccttcgccgaggacatcttgtccgccgccttcatgtacggcaaccgcgtgttcaccgagtacccccaggacatcgtcgactacttcaagaactcctgccccgccggctacacctgggaccgctccttcctgttcgaggacggcgccgtgtgcatctgcaacgccgacatcaccgtgagcgtggaggagaactgcatgtaccacgagtccaagttctacggcgtgaacttccccgccgacggccccgtgatgaagaagatgaccgacaactgggagccctcctgcgagaagatcatccccgtgcccaagcagggcatcttgaagggcgacgtgagcatgtacctgctgctgaaggacggtggccgcttgcgctgccagttcgacaccgtgtacaaggccaagtccgtgccccgcaagatgcccgactggcacttcatccagcacaagctgacccgcgaggaccgcagcgacgccaagaaccagaagtggcacctgaccgagcacgccatcgcctccggctccgccttgccctccggactcagatctcgatagagtcaacctagacttgtccatcttctggattggccaacttaattaatgtatgaaataaaaggatgcacacatagtgacatgctaatcactataatgtgggcatcaaagttgtgtgttatgtgtaattactagttatctgaataaaagagaaagagatcatccatatttcttatcctaaatgaatgtcacgtgtctttataattctttgatgaaccagatgcatttcattaaccaaatccatatacatataaatattaatcatatataattaatatcaattgggttagcaaaacaaatctagtctaggtgtgttttgcgaattgcggcgcccttactttaacgcctctaaccaacacccctttatctttataaggaacaataaacagaatttgccccactgttctaaatcacctaataatatccccagctaaaaacaataaaggtttcctagaattaagacaagcatgactgttcctccaggagggtttggaacattgttgcagtcttgcagatacgggcgaagggtgagaaacagagcggagggctggaggtgacctcggtagtcgacgccggagttgagcttgacaacgacggggcggcccctgatggacttgaggaagtccgatggcgtcttcaccgtcccgccggcgcccgaggcgggcctgtcgctgccgccgccgccgctgctcatcttgcgcgctgtgcccccggcggtgtccctgtgttgcggatcgcgggtgggccaggtggatgcgagggcgacccgtttggactccggccggagccgccggatccctggtcggtgtcagtgccgtttactctgggccccacgtgtcagtaccgtctgtagatgacaacaacccgtcgtccacagtcatgtccaaaatatcctttcttcttttttttcgattcggatatctatcttccttttttttttccaaaaatcttcttgacgcaccagcgcgcacgtttgtggtaaacgccgacacgtcggtcccacgtcgatagaccccacccaccagtgagtagcgtgtacgtattcgggggtgacggacgtgtcgccgtcgtcttgctagtcccattcccatctgagccacacatctctgaacaaaaaaaaggagggaggcctccacgcacatccccctccgtgccacccgccccaaaccctcgcgccgcctccgagacagccgccgcaaccatggccaccgccgccgccgcgtctaccgcgctcactggcgccactaccgctgcgcccaaggcgaggcgccgggcgcacctcctggccacccgccgcgccctcgccgcgcccatcaggtgctcagcggcgtcacccgccatgccgatggctcccccggccaccccgctccggccgtggggccccaccgagccccgcaagggtgctgacatcctcgtcgagtccctcgagcgctgcggcgtccgcgacgtcttcgcctaccccggcggcgcgtccatggagatccaccaggcactcacccgctcccccgtcatcgccaaccacctcttccgccacgagcaaggggaggcctttgccgcctccggctacgcgcgctcctcgggccgcgtcggcgtctgcatcgccacctccggccccggcgccaccaacctagtctccgcgctcgccgacgcgctgctcgattccgtccccatggtcgccatcacgggacaggtggcgcgacgcatgattggcaccgacgccttccaggagacgcccatcgtcgaggtcacccgctccatcaccaagcacaactacctggtcctcgacgtcgacgacatcccccgcgtcgtgcaggaggctttcttcctcgcctcctctggtcgaccagggccggtgcttgtcgacatccccaaggacatccagcagcagatggcggtgcctgtctgggacaagcccatgagtctgcctgggtacattgcgcgccttcccaagccccctgcgactgagttgcttgagcaggtgctgcgtcttgttggtgaatcgcggcgccctgttctttatgtgggcggtggctgcgcagcatctggtgaggagttgcgacgctttgtggagctgactggaatcccggtcacaactactcttatgggcctcggcaacttccccagcgacgacccactgtctctgcgcatgctaggtatgcatgggacggtgtatgcaaattatgcagtggataaggccgatctgttgcttgcacttggtgtgcggtttgatgatcgcgtgacagggaagattgaggcttttgcaagcagggctaagattgtgcacgttgatattgatccggctgagattggcaagaacaagcagccacatgtgtccatctgtgcagatgttaagcttgctttgcagggcatgaatgctcttcttgaaggaagcacatcaaagaagagctttgactttggctcatggaacgatgagttggatcagcagaagagggaattcccccttgggtataaaacatctaatgaggagatccagccacaatatgctattcaggttcttgatgagctgacgaaaggcgaggccatcatcggcacaggtgttgggcagcaccagatgtgggcggcacagtactacacttacaagcggccaaggcagtggttgtcttcagctggtcttggggctatgggatttggtttgccggctgctgctggtgcttctgtggcaaacccaggtgtcactgttgttgacatcgatggagatggtagctttctcatgaacgttcaggagctagctatgatccgaattgagaacctcccagtgaaggtctttgtgctaaacaaccagcacctggggatggtggtgcagttggaggacaggttctataaggccaacagagcgcacacatacttgggaaacccagagaatgaaagtgagatatatccagatttcgtgacgatcgccaaagggttcaacattccagcggtccgtgtgacaaagaagaacgaagtccgcgcagcgataaagaagatgctcgagactccagggccgtacctcttggatataatcgtcccacaccaggagcatgtgttgcctatgatccctagtggtggggctttcaaggatatgatcctggatggtgatggcaggactgtgtactgactagctagtcagttaacagatctgccagatcctcggtgtacaaataacccgtcttatcctatgagacgggccggcgtcagtgtgttctggaggaatttttatgtcagagcctttttctttgtgtgcttgatgtagatgccaagggaagcttattggctgttgaagcttgatgcaaaataaattatggaactctgttttttgtttatctaataataactagcaaatatgcttccattgcattgaaactaacagccttttgtgtttccaagttttattttgtgacaatgtcatctatttcaattagttgtggaatcggaaacttgcaggactaacttggaaactccaatccctcagcatcctggactttttcctggtgtaatccatgtagatattattttaatcatcattttagttctggaggtttttccatctccggttttgctcccctttcttcaaaaaaaaaaaaaaaatgccgtaggcgccgcaacgcccacctgttgttcaaactcatgggcacgagtggctcgaagattttatacaacaattgctgtagtttcaccgttgctggtgaagaagcatttttttaaaaaaatatagtggtattcattttaattagtttagttgtgcagcgagcaaaatttggacatgctctgctcggaatctgatcgacctagacacagattagcagcagtagctttgtcatctgttccaagagttgcgatctgatagaagaaaaaaaaaccttcccttcaatgtaaaaccgaaactaacaagaaagaagcacagtgccgtttaggcaagtatggagtacgtattaagcatgtagaaggccatgcatgaaccactaacaagaaagaagcgcagtgccattcaggcaagcataagcatgtagattggcatgcatgaacaactaacagtagatcgtctctggtctgattagaagttttttgggaagccaagaaatcatgtacaactggttccatctcaaattccgtggcaaaaagaggcctaagcaacatacctcgagtagatcacattcaagcttggtcacccggtccgtcaatattctgattccgatgacttcgtaggttcctagctcaagccgctcgtgtccaagcgtcacttacgattagctaatgattacggcatctaggaccgactagtggcgcgccgactagctagctaaggtaccgagctcgaattcattccgattaatcgtggcctcttgctcttcaggatgaagagctatgtttaaacgtgcaagcgctactagacaattcagtacattaaaaacgtccgcaatgtgttattaagttgtctaagcgtcaatttgtttacaccacaatatatcctgcca

SEQ ID NO: 38 - DNA, 20558 bp, synthetic construct
  misc_feature 1..20558: note = PHP95068
  source 1..20558: mol_type = other DNA
gtttacccgccaatatatcctgtcaaacactgatagtttaaactgaaggcgggaaacgacaatctgatcatgagcggagaattaagggagtcacgttatgacccccgccgatgacgcgggacaagccgttttacgtttggaactgacagaaccgcaacgttgaaggagccactcagcaagctggtacgattgtaatacgactcactatagggcgaattgagcgctgtttaaacgctcttcaactggaagagcggttacgctgtttaaacgctcttcaactggaagagcggttactaccggttcactagctagctgctaatcgagctagttaccctatgaggtgacatgaagcgctcacggttactatgacggttagcttcacgactgttggtggcagtagcgtacgacttagctatagttccggacttacccttaagcgatttaaatctgcggttaccgaattcgagctcggtacctagtacccttgtacttttggtttcacctgcatagagaaaacccacaagaatatgacagtctgatttgtcagtctcattctcaagcaacatttctctatccgttactttcatggtgaataacacaatccatcatcaatactttgtgttactcagaaactgaaagttattccgagtcttgcatatctttggacctactcgtttttctaccattattgctgattgttaagctctcgctacttgaatcggcattgttggagtgggaaggttcaaaaaattggagttatgactagttgtctctttctatgtacgatggagaaaatgaataaacaactgagaaaatggctcttgtttagttgatgatgctcttaagctttccactggttgccatatatgatttgggcatttcactttgatcttaatgggccttgtaaagcccaagactcatgattatctttagttgatgctcttaattaggtgtgggcaaataattcaaactgtatgtacccgaccaaaaccaaagcaaaaataatcgaaccaaaccgaaaatttaaaaataaccgaatgaaaactaaatcctataactgaaagaactgaaaccgaatcaaaatatttaatgtaaccaaaaatatccgaaatataattatattgtcaaaaatattaataatttctagattaaataattaaaaatacttaaaaatttatataaaatagtaaaaatactcgaaaataaccacaaatattcaaaaacaaccgaaatatcccaaaatattcaaagcaaaataaccgaatggataccaaattttaaaaccgaaaaaactggaacaaaaccaaaatcgaaccaaaatttcaaaaatcgaataaatactaaactttagaacaaaaaaaaacgataaccgaatgtatacgaaccaaagccgaattagataaccgaacgtccaggactactcttaatctttccgccacttatgatttgggctattactttgtttataatgagccttttcaagctcaagttcatgattgtccgtgagatgagaaactgacttgttggattcgaaaccctagctagtattggttaatacttaatacataaatgacctgcattgacatcatcatccaagaaaataaaaattgtatgcttgagatatttagttttcctagctaggttttctttattttagtaccgaatctttaggtgtgccacgttaatttagacccattttttcatacttaccaactgagtctagtttaatcatgactataatcgtataaaatgattcagtcgacgtcattgcgaacgtatataaaatcatccaaattgacgtcattccaaagaggtaagcatgcttatctaagagtccgagcatactaaacaagacgacattttatttgcactccaaatcaaattttgtattgcctaaagaaaaacaatcaaactcaagtttcttaaaattaatttcattcaaactaatcactttcaatatctcacatattattcatgccatttctatttgtctaaacatgatttaaaaaaaaaagtaaaatacaaagattactatgcaaaaactctataaaaaaaaattcaaatttcttatttatttgtgacatcaaattttcaaaataatttttttaattatcggttgatccggtcagtcgataaaaacataaactttcagcgaccgttaaaactttcctactaccgatttagagaaaatcttagcttgaaacgtaattgtaacctgccttcatgcaagtcgcaagatatgtcatcctaagttgtatatgttttctcaaaagatgtatttacttgagaaaatacgtttcaacgttgatggacaaccaattaagaatcaagcacctttcgtaatcaatttaggcttatcgtctaaggtatactgatttacgacagttgactagacttataaggaacaaaataatagaatagtttctaaacacttcacctaatcatagagactaagatggtaattcgtaaacgacaaagcctagtgacactgtccattgtaaaattccacatcatattagtattaaacatatacatgtagtttcctgaacacatgtagtatcaaacacacttcgtggcttcttcctcgaaacctgcggccgcgctatagttccggacttacccttaagataacttcgtatagcatacattatacgaagttatgggcccacgcgtgaagagcggttaccagagctggtcacctttgtccaccaagatggaactgtcttcggccagaatggccatctggattcagcaggcctagaaggccatttatcgctatcaactttgtatagaaaagttgggccgaattcgagctcggtacggccagaatggcccggaccgaagcttgcggccgcacactgatagtttaaactgaaggcgggaaacgacaatctgatcatgagcggagaattaagggagtcacgttatgacccccgccgatgacgcgggacaagccgttttacgtttggaactgacagaaccgcaacgttgaaggagccactcagccgcgggtttctggagtttaatgagctaagcacatacgtcagaaaccattattgcgcgttcaaaagtcgcctaaggtcactatcagctagcaaatatttcttgtcaaaaatgctccactgacgttccataaattcccctcggtatccaattagagtctcatattcactctcccgggggatctcgactctagaggatcgctcaggaaggccgctgagatagaggcatggcggccaatgcgggcggcggtggagcgggaggaggcagcggcagcggcagcgtggctgcgccggcggtgtgccgccccagcggctcgcggtggacgccgacgccggagcagatcaggatgctgaaggagctctactacggctgcggcatccggtcgcccagctcggagcagatccagcgcatcaccgccatgctgcggcagcacggcaagatcgagggcaagaacgtcttctactggttccagaaccacaaggcccgcgagcgccagaagcgccgcctcaccagcctcgacgtcaacgtgcccgccgccggcgcggccgacgccaccaccagccaactcggcgtcctctcgctgtcgtcgccgccgccttcaggcgcggcgcctccctcgcccaccctcggcttctacgccgccggcaatggcggcggatcggctgtgctgctggacacgagttccgactggggcagcagcggcgctgccatggccaccgagacatgcttcctgcaggactacatgggcgtgacggacacgggcagctcgtcgcagtggccacgcttctcgtcgtcggacacgataatggcggcggccgcggcgcgggcggcgacgacgcgggcgcccgagacgctccctctcttcccgacctgcggcgacgacggcggcagcggtagcagcagctacttgccgttctggggtgccgcgtccacaactgccggcgccacttcttccgttgcgatccagcagcaacaccagctgcaggagcagtacagcttttacagcaacagcaacagcacccagctggccggcaccggcaaccaagacgtatcggcaacagcagcagcagccgccgccctggagctgagcctcagctcatggtgctccccttaccctgctgcagggagtatgtgagagcaacgcgagctgccactgctcttcactgatgtctctggaatggaaggaggaggaagtgagcatagcgttggtgcgttgctgtcaagggcgaattcacatggttaacctagacttgtccatcttctggattggccaacttaattaatgtatgaaataaaaggatgcacacatagtgacatgctaatcactataatgtgggcatcaaagttgtgtgttatgtgtaattactagttatctgaataaaagagaaagagatcatccatatttcttatcctaaatgaatgtcacgtgtctttataattctttgatgaaccagatgcatttcattaaccaaatccatatacatataaatattaatcatatataattaatatcaattgggttagcaaaacaaatctagtctaggtgtgttttgcgaatgcggccgccaccgcggtggagctcgaattccggtccgggcctagaaggccagcttcaagtttgtacaaaaaagcaggctccggccagagttacccggaccgaagcttgcatgcctgcagtgcagcgtgacccggtcgtgcccctctctagagataatgagcattgcatgtctaagttataaaaaattaccacatattttttttgtcacacttgtttgaagtgcagtttatctatctttatacatatatttaaactttactctacgaataatataatctatagtactacaataatatcagtgttttagagaatcatataaatgaacagttagacatggtctaaaggacaattgagtattttgacaacaggactctacagttttatctttttagtgtgcatgtgttctcctttttttttgcaaatagcttcacctatataatacttcatccattttattagtacatccatttagggtttagggttaatggtttttatagactaatttttttagtacatctattttattctattttagcctctaaattaagaaaactaaaactctattttagtttttttatttaataatttagatataaaatagaataaaataaagtgactaaaaattaaacaaataccctttaagaaattaaaaaaactaaggaaacatttttcttgtttcgagtagataatgccagcctgttaaacgccgtcgacgagtctaacggacaccaaccagcgaaccagcagcgtcgcgtcgggccaagcgaagcagacggcacggcatctctgtcgctgcctctggacccctctcgagagttccgctccaccgttggacttgctccgctgtcggcatccagaaattgcgtggcggagcggcagacgtgagccggcacggcaggcggcctcctcctcctctcacggcaccggcagctacgggggattcctttcccaccgctccttcgctttcccttcctcgcccgccgtaataaatagacaccccctccacaccctctttccccaacctcgtgttgttcggagcgcacacacacacaaccagatctcccccaaatccacccgtcggcacctccgcttcaaggtacgccgctcgtcctcccccccccccctctctaccttctctagatcggcgttccggtccatgcatggttagggcccggtagttctacttctgttcatgtttgtgttagatccgtgtttgtgttagatccgtgctgctagcgttcgtacacggatgcgacctgtacgtcagacacgttctgattgctaacttgccagtgtttctctttggggaatcctgggatggctctagccgttccgcagacgggatcgatttcatgattttttttgtttcgttgcatagggtttggtttgcccttttcctttatttcaatatatgccgtgcacttgtttgtcgggtcatcttttcatgcttttttttgtcttggttgtgatgatgtggtctggttgggcggtcgttctagatcggagtagaattctgtttcaaactacctggtggatttattaattttggatctgtatgtgtgtgccatacatattcatagttacgaattgaagatgatggatggaaatatcgatctaggataggtatacatgttgatgcgggttttactgatgcatatacagagatgctttttgttcgcttggttgtgatgatgtggtgtggttgggcggtcgttcattcgttctagatcggagtagaatactgtttcaaactacctggtgtatttattaattttggaactgtatgtgtgtgtcatacatcttcatagttacgagtttaagatggatggaaatatcgatctaggataggtatacatgttgatgtgggttttactgatgcatatacatgatggcatatgcagcatctattcatatgctctaaccttgagtacctatctattataataaacaagtatgttttataattattttgatcttgatatacttggatgatggcatatgcagcagctatatgtggatttttttagccctgccttcatacgctatttatttgcttggtactgtttcttttgtcgatgctcaccctgttgtttggtgttacttctgcaggtcgactttaacttagcctaggatccatggagcggttcggcctggacggcggcggtggcggtggcgagctgccgccggggttccggttccacccgacggacgaggagctcatcacctactacctcctccgcaaggccgtggacggcagcttctgcggccgcgccatcgcggagatcgacctgaacaagtgcgagccatgggagctcccggacaaggcgaagatgggggagaaggagtggtacttctacagcctccgcgaccgcaagtacccgacgggcctgcgcaccaaccgcgccacggtggccggctactggaaggccaccggcaaggaccgcgagatccgcagcggccgcaccggcgcgctggtgggcatgaagaagacgctcgtcttctaccgcggccgcgcccccaagggacagaagacgcactgggtcatgcacgagtaccgcctcgagggcgcctacgcctaccatttcctccccagctccacaaggcaggacgagtgggtgatcgcgagggtgttccagaagcccggcgaggtcccacctgcagcccgcaagcaccgcctcggcgcccttagcagcactaccggcaccgccgcgggcgattcctgcttctcggactctacctcggcctccatcggcggcgcgtcgtcgtcatccacgcctggcccgctgttcgcgtcggcggccgccgccgtggccaatgccggcgccgccgacggcgacaccagctcctactgcggcggcgctgccaaccatggcaacctggtcaccggccgtgagctcgtgccctgcttctccactgccaccattaacggccccctagttgccgccgcgctcggcatcgggcagccgtacaacgcagccccgctgccgttcgagcagcagccgccgcctccggccttcctgccgagcctgcgttcccttcaggacaacctccagcttccaccgttcctctcagcaggcggtctgggcggcggcggggctctccactggctccccgccggcggcatggaggtcaaggtcgagggccgctcggcgccaccgcagatggctgtcggccccggccagctcgatggcgctttcggctggagcttctagggtaccgttaacagatctactaactatctatactgtaataatgttgtatagccgccggatagctagctagtttagtcattcagcggcgatgggtaataataaagtgtcatccatccatcaccatgcgtggcaacgtgagcaatgacctgattgaacaaattgaaatgaaaagaagaaatatgttatatgtcaacgagatttcctcataatgccactgacgacgtgtgtccaagaaatgtatcagtgatacgtatattcacaatttttttatgacttatactcacaatttgtttttttactacttatactcacaatttgttgtgcgtaccataacaatttcgatcgaatatatatcagaaagttgacgaaagtaagctcactcaaaaagttaaatgggctgcggaagctgcgtcaggcccaagttttggctattctatccggtatccacgattttgatggctgagggacatatgttcgcttaagcttcggtccgggcctagaaggccgatctcccgggcacccagctttcttgtacaaagtggccgttaacggatcggccagaatggcccggaccgggttaccgaattcgagctcggtaccctggttcacaaactcaatacaacacacagtggagtagggtattacgctccggcggcccgaaccactctaaatccttgtgtcctcgtgtgctcttccaccattaatgactgtaattgcagggacacgaagagttgtagcgcttttgccaacaagatccgctatatgctagtagagtggaacctgcacagcaacaagcatccaataatctgagaataagaattatgtgtggtgatggttctcatctctgcaactcgccattttcgcgagagaaccaaatccaagttggtgaagatcatgatttgggctcatgggctggcatagtagctattacctttgcaattgtggttcgaatctatccgatattctccttttcagggagagctaatgcttatgcttattgggtattttggtttgacactgcttcacgcccaaaaaaaggcaactatgtctgagttggatatggcccaaaaaaaggcagctatgtctgagttggatatggaagtcttctttcgtttagggtgaagtaagaccaagctcatgagcttattatcttaggtcggaacaaattagttgataggcatggcacatttatcaaattataatgattttaacagaaaagcaacacctctttttcagcagcaccagctttgcaagctgcaattgacactccaagcatagtatttgctccaaactcagcctgcatttcgcacaatatcatatctatttccatttggataaaatatattttccagaaatatgggaacagaatcaagatacagaaaaaagttgtggtagtagtggtaagtggaaacacaagtacagtgaaaagatagcattatttctgaacagtcaaattaaccgaaataagtagtatcacatactgcccctaaattgactacacccaatgtaaagaattgcttgagcatattgagccatcagttgtttgtttgtgtaacggatttgacaatgcagagttcaggagcaaaaaaccgcaaaggagagaaagagggaaaggatctcctagtatcccaccttgtggcgcgccctgtcaagtgcatgatggcctggtcgatctgcgtctgctgctgcggttccatcccaacgagtgcctccgacaccttgtcgttgatcacccgcaccgcgtaggcgacccccctggcgaggaacttccgcctctcggaggccccggccgcgtcggcggcggcgccctcgagcgcgcccacgctagccgtagatgctcggtgcacggccttgttggtgtgcaactcgacctcaacggccggtgcgctacgcccgtcaaggatctggcgcgcccgcaccctcgtgatcacggtgggcgcctcccgcctcatgtggccgacgatgaaaagcgccgggttaggggccttggcgcgcaccgccgtattcagggcctcctcgctcttgcgcgagagcaggtgcttccccaggtactcctgcactgacaaggctgccacagcggtggaatttgtcctcacgacttcgccacgtcgtcctcacctccctggcttcccacgactccgccgtatcgaggtgctcggtgggtcgtcttaatccgaagtccgaactaggaagacgagacagagaggtctgaggaatgggcctcgtttgatgttgagctgaattatttttccagcataagcccaggtcttggtccatgaacaaaattactagaaacccagcccagtactacgatctaaaagagggactgccactggatagctctctctagcattctccacgctccaatacagcggcgtcgtgtctatccgggtctatccgcgaacacgtgagaactctccagaaactgctttctcctccacttcatctctctcgctttccctctataaaaagaccccttctaggaattgagggagacagcaagcaccaagcagcgatccgaagctcaatcaattcactcaaacctcttccccaaatcttcgattagatcttcgttgacaagaagactagaaccgaacctgacatgtccaacctgctcacggttcaccagaaccttccggctcttccagtggacgcgacgtccgatgaagtcaggaagaacctcatggacatgttccgcgacaggcaagcgttcagcgagcacacctggaagatgctgctctccgtctgccgctcctgggctgcatggtgcaagctgaacaacaggaagtggttccccgctgagcccgaggacgtgagggattaccttctgtacctgcaagcgcgaggtttgtttctgcttctacctttgatatatatataataattatcattaattagtagtaatataatatttcaaatatttttttcaaaataaaagaatgtagtatatagcaattgcttttctgtagtttataagtgtgtatattttaatttataacttttctaatatatgaccaaaacatggtgatgcctaggtctggcagtgaagaccatccagcaacaccttggacaactgaacatgcttcacaggcgctccggcctcccgcgccccagcgactcgaacgccgtgagcctcgtcatgcgccgcatcaggaaggaaaacgtcgatgccggcgaaagggcaaagcaggccctcgcgttcgagaggaccgatttcgaccaggtccgcagcctgatggagaacagcgacaggtgccaggacattaggaacctggcgttcctcggaattgcatacaacacgctcctcaggatcgcggaaattgcccgcattcgcgtgaaggacattagccgcaccgacggcggcaggatgcttatccacattggcaggaccaagacgctcgtttccaccgcaggcgtcgaaaaggccctcagcctcggagtgaccaagctcgtcgaacgctggatctccgtgtccggcgtcgcggacgacccaaacaactacctcttctgccgcgtccgcaagaacggggtggctgcccctagcgccaccagccaactcagcacgagggccttggaaggtattttcgaggccacccaccgcctgatctacggcgcgaaggatgacagcggtcaacgctacctcgcatggtccgggcactccgcccgcgttggagctgctagggacatggcccgcgccggtgtttccatccccgaaatcatgcaggcgggtggatggacgaacgtgaacattgtcatgaactacattcgcaaccttgacagcgagacgggcgcaatggttcgcctcctggaagatggtgactgaggtacccaacctagacttgtccatcttctggattggccaacttaattaatgtatgaaataaaaggatgcacacatagtgacatgctaatcactataatgtgggcatcaaagttgtgtgttatgtgtaattactagttatctgaataaaagagaaagagatcatccatatttcttatcctaaatgaatgtcacgtgtctttataattctttgatgaaccagatgcatttcattaaccaaatccatatacatataaatattaatcatatataattaatatcaattgggttagcaaaacaaatctagtctaggtgtgttttgcgatccgatatcgaattggccacggtaccagctgctgctgttctagggttcacaagtctgcctatttgtcttccccaatggagctatggttgtctggtctggtccttggtcgtgtcccgtttcattgtgtactatttacctgtaatgtgtatccttaagtctggtttgatggtgtctgaaacgttttgctgtggtagagcagcatggaagaactataatgaataagtgatccctaatcattgtgtccaaattttgcttctgctatacccttttgtgctgtttcttatgttttgcttaaaaatttgatctgacaaacaaatttgtctaaattatgctcttgttctgactgtgtactgtacacatttgtattgctaccggtttggcacatagttttctctttgattgcagatcaaacccttctgattgcagattgcttggctatggctgatgtgctcactgttcttctttagcttgtatattgctgatggtggcttggctacggctgaaaaagttgctgctgcgccgacttggcaactgttgctccagtaatgctttgtcctctcttcctagccgccgacttggcacttggcagctgttgctcctgtaatgcgttgttatctcttatctcttgagatgtactatgattttgaggctgtttgacttgtgccagattgccagtgctgatgctatattatctcaggtttttatgctagtatatgttttactgtgtgctgcctgtgtcgagttacgtaatctattgaaccgctatgcgtgttgatgccctgttgttgcttgccagattgatgcccctgttgcttgcagcttgcaagctgtagtgaaatcctaaaattccaaaccaaatctattctgaacttttgaagatctgtgatgtccggaagaaaagattcaaacagataaacgggactctccagaatctataaaataaatgatcgacaaacgctttgctttggtaggcttcaagcttggtcacccggtccgggcctagaaggccagcttcggccgccccgggcaactttattatacaaagttgatagataaatcagatatctggttcctaaggacccggcggaccgattaaactgattcggtccgacgcgttacctaataacttcgtatagcatacattatacgaagttattagctaactaactagtaagcttaagccatgggtcgacggatccgttaactagcgtggcatttggcaccgccgcacactatgcgagctaggagtgctagtttacagatgaaactatgaaaccaagaaaacacaattgtccgtagctagcgcgtggcgtcgtgtcaagcttcacacagtatcttcgttcttcactataaatcgcgcctgttgttcgtgagacccaccaccgtggataacagtcccctaataataagcgatcaacagcactgctgatggctgaacaccgaggcgccgccgcgcgtaaccatccgccggagcagcccgtcgtgccggcgaacgacgccttccccgaccgcgcccagcagctctgcctcgacgccgggcgcgcgctcgcgatgtgcggcgtgctcgtcgccgtccctcccgcattttacgcgtcgacgtcgcggacgacaccgcacttgccttcgtcggcttcgtcctctggatcatcggtgcgtggctgtgcctcctggcgctcacgcccttggctccacgggcggtgagggcgggcggggccgccgccagcaccttgctgatcaggtgcctgtccctttcatgaactactagcgcccgcgcccgcggccgccgggcacaagagaacacatcgatgttcgctgcgtacgtcagcaataaggcactctttgtcagtagtcgagtgcatatgttgggtgtttgccctgggagatttcaagtgttgtggccattatcccgcaggataaaaaatcggcggcttttggattgatacggaaaataacgatgtttcatgctcgtgttgtgtgtgtgacatcttgtcagccaagtttttaaccgttgctactccccctctgtgggctcagtgtgtggaccggaatacgtcgtacataggccgtagcctaagcccaatatgccgtttttcaggttggcctgtgtgacgacaagcgggtctcaaaagcccatcacgcaactggcctgcaattattggaggagagcgcgtcgagttggttccagaggctgcgtggtggggccggactctgcgacgacctctcgttcgcgtccgatttggttgccgtgagccgtgacgtaacgcctccttccgttcctccctatataagttccacccccgggtccggtttccccaagccccagtgacccccgatcccgatcgcgaaatctccgcacccgccggcaagggaccgaagcaagcctctctcccgaccgtcgcatcaaggtacgcgtccgctcgatctgtcctcttccttctcgatttgacttgctgtggtgcccgatcacgggatcagaatcgcaccagtgtagatttcgcatgttctaagatgtgttagtttccaggctaatccagttctcttgacgcccgatccgatcgagctccgtgtttatttcagcctaatcgtagtattcccctaaaatttcctcattagggggttcgcaagattgttggtcgacaggttcacttatgctcgatcgcttacttttagtcgattcatgctgcgtactattgttgccccccgtggttttatcttttctcgtgtgaaatccagtagatatagtagatatcgtagcattaggttttaattcaatcgattgattattgtatcatcaaaattgagaagttcgaatcatgcctatcatgctgcctcaaccgaaatcctgtatattgaagtttcaattcaattgattgatcattcattagattcaaccaaaatctagaaggttagatgacgcatgtcatgctgcctgcgtagtttacctttgatctgtttatgattaccttatcagtaggatatttgtgattttgggaagtagcactaactgattcatgctgacatgatgttccctttcagattatactgttgagtcctatctaattgatgctttgtatgctatatgaatacgtcatggtaaattagcagttaattagcatattagcaattgggcgtacctcatcaggattgctcttgtagatgtgtgtggtgatgtttcttgttcaattcatgttctgctttaaaagtatgtgttctctgtttgttaattaagattcatggttataatgatttggacctaattaatcagggttgcccttttagatgcgtggttacttgttgagttcatttttttcctgctatagttgtatgcgtttgttcattcatggttagatttgatttgtttcttctctattccatgccttccatatacttcaattgtagcttaacatgagatttctgtatatgcaggtcgaccgccggggatccacacgacaccatggcccagtccaagcacggcctgaccaaggagatgaccatgaagtaccgcatggagggctgcgtggacggccacaagttcgtgatcaccggcgagggcatcggctaccccttcaagggcaagcaggccatcaacctgtgcgtggtggagggcggccccttgcccttcgccgaggacatcttgtccgccgccttcatgtacggcaaccgcgtgttcaccgagtacccccaggacatcgtcgactacttcaagaactcctgccccgccggctacacctgggaccgctccttcctgttcgaggacggcgccgtgtgcatctgcaacgccgacatcaccgtgagcgtggaggagaactgcatgtaccacgagtccaagttctacggcgtgaacttccccgccgacggccccgtgatgaagaagatgaccgacaactgggagccctcctgcgagaagatcatccccgtgcccaagcagggcatcttgaagggcgacgtgagcatgtacctgctgctgaaggacggtggccgcttgcgctgccagttcgacaccgtgtacaaggccaagtccgtgccccgcaagatgcccgactggcacttcatccagcacaagctgacccgcgaggaccgcagcgacgccaagaaccagaagtggcacctgaccgagcacgccatcgcctccggctccgccttgccctccggactcagatctcgatagagtcaacctagacttgtccatcttctggattggccaacttaattaatgtatgaaataaaaggatgcacacatagtgacatgctaatcactataatgtgggcatcaaagttgtgtgttatgtgtaattactagttatctgaataaaagagaaagagatcatccatatttcttatcctaaatgaatgtcacgtgtctttataattctttgatgaaccagatgcatttcattaaccaaatccatatacatataaatattaatcatatataattaatatcaattgggttagcaaaacaaatctagtctaggtgtgttttgcgaattgcggcgcccttactttaacgcctctaaccaacacccctttatctttataaggaacaataaacagaatttgccccactgttctaaatcacctaataatatccccagctaaaaacaataaaggtttcctagaattaagacaagcatgactgttcctccaggagggtttggaacattgttgcagtcttgcagatacgggcgaagggtgagaaacagagcggagggctggaggtgacctcggtagtcgacgccggagttgagcttgacaacgacggggcggcccctgatggacttgaggaagtccgatggcgtcttcaccgtcccgccggcgcccgaggcgggcctgtcgctgccgccgccgccgctgctcatcttgcgcgctgtgcccccggcggtgtccctgtgttgcggatcgcgggtgggccaggtggatgcgagggcgacccgtttggactccggccggagccgccggatccctggtcggtgtcagtgccgtttactctgggccccacgtgtcagtaccgtctgtagatgacaacaacccgtcgtccacagtcatgtccaaaatatcctttcttcttttttttcgattcggatatctatcttccttttttttttccaaaaatcttcttgacgcaccagcgcgcacgtttgtggtaaacgccgacacgtcggtcccacgtcgatagaccccacccaccagtgagtagcgtgtacgtattcgggggtgacggacgtgtcgccgtcgtcttgctagtcccattcccatctgagccacacatctctgaacaaaaaaaaggagggaggcctccacgcacatccccctccgtgccacccgccccaaaccctcgcgccgcctccgagacagccgccgcaaccatggccaccgccgccgccgcgtctaccgcgctcactggcgccactaccgctgcgcccaaggcgaggcgccgggcgcacctcctggccacccgccgcgccctcgccgcgcccatcaggtgctcagcggcgtcacccgccatgccgatggctcccccggccaccccgctccggccgtggggccccaccgagccccgcaagggtgctgacatcctcgtcgagtccctcgagcgctgcggcgtccgcgacgtcttcgcctaccccggcggcgcgtccatggagatccaccaggcactcacccgctcccccgtcatcgccaaccacctcttccgccacgagcaaggggaggcctttgccgcctccggctacgcgcgctcctcgggccgcgtcggcgtctgcatcgccacctccggccccggcgccaccaacctagtctccgcgctcgccgacgcgctgctcgattccgtccccatggtcgccatcacgggacaggtggcgcgacgcatgattggcaccgacgccttccaggagacgcccatcgtcgaggtcacccgctccatcaccaagcacaactacctggtcctcgacgtcgacgacatcccccgcgtcgtgcaggaggctttcttcctcgcctcctctggtcgaccagggccggtgcttgtcgacatccccaaggacatccagcagcagatggcggtgcctgtctgggacaagcccatgagtctgcctgggtacattgcgcgccttcccaagccccctgcgactgagttgcttgagcaggtgctgcgtcttgttggtgaatcgcggcgccctgttctttatgtgggcggtggctgcgcagcatctggtgaggagttgcgacgctttgtggagctgactggaatcccggtcacaactactcttatgggcctcggcaacttccccagcgacgacccactgtctctgcgcatgctaggtatgcatgggacggtgtatgcaaattatgcagtggataaggccgatctgttgcttgcacttggtgtgcggtttgatgatcgcgtgacagggaagattgaggcttttgcaagcagggctaagattgtgcacgttgatattgatccggctgagattggcaagaacaagcagccacatgtgtccatctgtgcagatgttaagcttgctttgcagggcatgaatgctcttcttgaaggaagcacatcaaagaagagctttgactttggctcatggaacgatgagttggatcagcagaagagggaattcccccttgggtataaaacatctaatgaggagatccagccacaatatgctattcaggttcttgatgagctgacgaaaggcgaggccatcatcggcacaggtgttgggcagcaccagatgtgggcggcacagtactacacttacaagcggccaaggcagtggttgtcttcagctggtcttggggctatgggatttggtttgccggctgctgctggtgcttctgtggcaaacccaggtgtcactgttgttgacatcgatggagatggtagctttctcatgaacgttcaggagctagctatgatccgaattgagaacctcccagtgaaggtctttgtgctaaacaaccagcacctggggatggtggtgcagttggaggacaggttctataaggccaacagagcgcacacatacttgggaaacccagagaatgaaagtgagatatatccagatttcgtgacgatcgccaaagggttcaacattccagcggtccgtgtgacaaagaagaacgaagtccgcgcagcgataaagaagatgctcgagactccagggccgtacctcttggatataatcgtcccacaccaggagcatgtgttgcctatgatccctagtggtggggctttcaaggatatgatcctggatggtgatggcaggactgtgtactgactagctagtcagttaacagatctgccagatcctcggtgtacaaataacccgtcttatcctatgagacgggccggcgtcagtgtgttctggaggaatttttatgtcagagcctttttctttgtgtgcttgatgtagatgccaagggaagcttattggctgttgaagcttgatgcaaaataaattatggaactctgttttttgtttatctaataataactagcaaatatgcttccattgcattgaaactaacagccttttgtgtttccaagttttattttgtgacaatgtcatctatttcaattagttgtggaatcggaaacttgcaggactaacttggaaactccaatccctcagcatcctggactttttcctggtgtaatccatgtagatattattttaatcatcattttagttctggaggtttttccatctccggttttgctcccctttcttcaaaaaaaaaaaaaaaatgccgtaggcgccgcaacgcccacctgttgttcaaactcatgggcacgagtggctcgaagattttatacaacaattgctgtagtttcaccgttgctggtgaagaagcatttttttaaaaaaatatagtggtattcattttaattagtttagttgtgcagcgagcaaaatttggacatgctctgctcggaatctgatcgacctagacacagattagcagcagtagctttgtcatctgttccaagagttgcgatctgatagaagaaaaaaaaaccttcccttcaatgtaaaaccgaaactaacaagaaagaagcacagtgccgtttaggcaagtatggagtacgtattaagcatgtagaaggccatgcatgaaccactaacaagaaagaagcgcagtgccattcaggcaagcataagcatgtagattggcatgcatgaacaactaacagtagatcgtctctggtctgattagaagttttttgggaagccaagaaatcatgtacaactggttccatctcaaattccgtggcaaaaagaggcctaagcaacatacctcgagtagatcacattcaagcttggtcacccggtccgtcaatattctgattccgatgacttcgtaggttcctagctcaagccgctcgtgtccaagcgtcacttacgattagctaatgattacggcatctaggaccgactagtggcgcgccgactagctagctaaggtaccgagctcgaattcattccgattaatcgtggcctcttgctcttcaggatgaagagctatgtttaaacgtgcaagcgctactagacaattcagtacattaaaaacgtccgcaatgtgttattaagttgtctaagcgtcaatttgtttacaccacaatatatcctgcca

SEQ ID NO: 39 - DNA, 20746 bp, synthetic construct
  misc_feature 1..20746: note = PHP95069
  source 1..20746: mol_type = other DNA
gtttacccgccaatatatcctgtcaaacactgatagtttaaactgaaggcgggaaacgacaatctgatcatgagcggagaattaagggagtcacgttatgacccccgccgatgacgcgggacaagccgttttacgtttggaactgacagaaccgcaacgttgaaggagccactcagcaagctggtacgattgtaatacgactcactatagggcgaattgagcgctgtttaaacgctcttcaactggaagagcggttacgctgtttaaacgctcttcaactggaagagcggttactaccggttcactagctagctgctaatcgagctagttaccctatgaggtgacatgaagcgctcacggttactatgacggttagcttcacgactgttggtggcagtagcgtacgacttagctatagttccggacttacccttaagcgatttaaatctgcggttaccgaattcgagctcggtacctagtacccttgtacttttggtttcacctgcatagagaaaacccacaagaatatgacagtctgatttgtcagtctcattctcaagcaacatttctctatccgttactttcatggtgaataacacaatccatcatcaatactttgtgttactcagaaactgaaagttattccgagtcttgcatatctttggacctactcgtttttctaccattattgctgattgttaagctctcgctacttgaatcggcattgttggagtgggaaggttcaaaaaattggagttatgactagttgtctctttctatgtacgatggagaaaatgaataaacaactgagaaaatggctcttgtttagttgatgatgctcttaagctttccactggttgccatatatgatttgggcatttcactttgatcttaatgggccttgtaaagcccaagactcatgattatctttagttgatgctcttaattaggtgtgggcaaataattcaaactgtatgtacccgaccaaaaccaaagcaaaaataatcgaaccaaaccgaaaatttaaaaataaccgaatgaaaactaaatcctataactgaaagaactgaaaccgaatcaaaatatttaatgtaaccaaaaatatccgaaatataattatattgtcaaaaatattaataatttctagattaaataattaaaaatacttaaaaatttatataaaatagtaaaaatactcgaaaataaccacaaatattcaaaaacaaccgaaatatcccaaaatattcaaagcaaaataaccgaatggataccaaattttaaaaccgaaaaaactggaacaaaaccaaaatcgaaccaaaatttcaaaaatcgaataaatactaaactttagaacaaaaaaaaacgataaccgaatgtatacgaaccaaagccgaattagataaccgaacgtccaggactactcttaatctttccgccacttatgatttgggctattactttgtttataatgagccttttcaagctcaagttcatgattgtccgtgagatgagaaactgacttgttggattcgaaaccctagctagtattggttaatacttaatacataaatgacctgcattgacatcatcatccaagaaaataaaaattgtatgcttgagatatttagttttcctagctaggttttctttattttagtaccgaatctttaggtgtgccacgttaatttagacccattttttcatacttaccaactgagtctagtttaatcatgactataatcgtataaaatgattcagtcgacgtcattgcgaacgtatataaaatcatccaaattgacgtcattccaaagaggtaagcatgcttatctaagagtccgagcatactaaacaagacgacattttatttgcactccaaatcaaattttgtattgcctaaagaaaaacaatcaaactcaagtttcttaaaattaatttcattcaaactaatcactttcaatatctcacatattattcatgccatttctatttgtctaaacatgatttaaaaaaaaaagtaaaatacaaagattactatgcaaaaactctataaaaaaaaattcaaatttcttatttatttgtgacatcaaattttcaaaataatttttttaattatcggttgatccggtcagtcgataaaaacataaactttcagcgaccgttaaaactttcctactaccgatttagagaaaatcttagcttgaaacgtaattgtaacctgccttcatgcaagtcgcaagatatgtcatcctaagttgtatatgttttctcaaaagatgtatttacttgagaaaatacgtttcaacgttgatggacaaccaattaagaatcaagcacctttcgtaatcaatttaggcttatcgtctaaggtatactgatttacgacagttgactagacttataaggaacaaaataatagaatagtttctaaacacttcacctaatcatagagactaagatggtaattcgtaaacgacaaagcctagtgacactgtccattgtaaaattccacatcatattagtattaaacatatacatgtagtttcctgaacacatgtagtatcaaacacacttcgtggcttcttcctcgaaacctgcggccgcgctatagttccggacttacccttaagataacttcgtatagcatacattatacgaagttatgggcccacgcgtgaagagcggttaccagagctggtcacctttgtccaccaagatggaactgtcttcggccagaatggccatctggattcagcaggcctagaaggccatttatcgctatcaactttgtatagaaaagttgggccgaattcgagctcggtacggccagaatggcccggaccgaagcttgcggccgcacactgatagtttaaactgaaggcgggaaacgacaatctgatcatgagcggagaattaagggagtcacgttatgacccccgccgatgacgcgggacaagccgttttacgtttggaactgacagaaccgcaacgttgaaggagccactcagccgcgggtttctggagtttaatgagctaagcacatacgtcagaaaccattattgcgcgttcaaaagtcgcctaaggtcactatcagctagcaaatatttcttgtcaaaaatgctccactgacgttccataaattcccctcggtatccaattagagtctcatattcactctcccgggggatctcgactctagaggatcgctcaggaaggccgctgagatagaggcatggcggccaatgcgggcggcggtggagcgggaggaggcagcggcagcggcagcgtggctgcgccggcggtgtgccgccccagcggctcgcggtggacgccgacgccggagcagatcaggatgctgaaggagctctactacggctgcggcatccggtcgcccagctcggagcagatccagcgcatcaccgccatgctgcggcagcacggcaagatcgagggcaagaacgtcttctactggttccagaaccacaaggcccgcgagcgccagaagcgccgcctcaccagcctcgacgtcaacgtgcccgccgccggcgcggccgacgccaccaccagccaactcggcgtcctctcgctgtcgtcgccgccgccttcaggcgcggcgcctccctcgcccaccctcggcttctacgccgccggcaatggcggcggatcggctgtgctgctggacacgagttccgactggggcagcagcggcgctgccatggccaccgagacatgcttcctgcaggactacatgggcgtgacggacacgggcagctcgtcgcagtggccacgcttctcgtcgtcggacacgataatggcggcggccgcggcgcgggcggcgacgacgcgggcgcccgagacgctccctctcttcccgacctgcggcgacgacggcggcagcggtagcagcagctacttgccgttctggggtgccgcgtccacaactgccggcgccacttcttccgttgcgatccagcagcaacaccagctgcaggagcagtacagcttttacagcaacagcaacagcacccagctggccggcaccggcaaccaagacgtatcggcaacagcagcagcagccgccgccctggagctgagcctcagctcatggtgctccccttaccctgctgcagggagtatgtgagagcaacgcgagctgccactgctcttcactgatgtctctggaatggaaggaggaggaagtgagcatagcgttggtgcgttgctgtcaagggcgaattcacatggttaacctagacttgtccatcttctggattggccaacttaattaatgtatgaaataaaaggatgcacacatagtgacatgctaatcactataatgtgggcatcaaagttgtgtgttatgtgtaattactagttatctgaataaaagagaaagagatcatccatatttcttatcctaaatgaatgtcacgtgtctttataattctttgatgaaccagatgcatttcattaaccaaatccatatacatataaatattaatcatatataattaatatcaattgggttagcaaaacaaatctagtctaggtgtgttttgcgaatgcggccgccaccgcggtggagctcgaattccggtccgggcctagaaggccagcttcaagtttgtacaaaaaagcaggctccggccagagttacccggaccgaagcttgcatgcctgcagtgcagcgtgacccggtcgtgcccctctctagagataatgagcattgcatgtctaagttataaaaaattaccacatattttttttgtcacacttgtttgaagtgcagtttatctatctttatacatatatttaaactttactctacgaataatataatctatagtactacaataatatcagtgttttagagaatcatataaatgaacagttagacatggtctaaaggacaattgagtattttgacaacaggactctacagttttatctttttagtgtgcatgtgttctcctttttttttgcaaatagcttcacctatataatacttcatccattttattagtacatccatttagggtttagggttaatggtttttatagactaatttttttagtacatctattttattctattttagcctctaaattaagaaaactaaaactctattttagtttttttatttaataatttagatataaaatagaataaaataaagtgactaaaaattaaacaaataccctttaagaaattaaaaaaactaaggaaacatttttcttgtttcgagtagataatgccagcctgttaaacgccgtcgacgagtctaacggacaccaaccagcgaaccagcagcgtcgcgtcgggccaagcgaagcagacggcacggcatctctgtcgctgcctctggacccctctcgagagttccgctccaccgttggacttgctccgctgtcggcatccagaaattgcgtggcggagcggcagacgtgagccggcacggcaggcggcctcctcctcctctcacggcaccggcagctacgggggattcctttcccaccgctccttcgctttcccttcctcgcccgccgtaataaatagacaccccctccacaccctctttccccaacctcgtgttgttcggagcgcacacacacacaaccagatctcccccaaatccacccgtcggcacctccgcttcaaggtacgccgctcgtcctcccccccccccctctctaccttctctagatcggcgttccggtccatgcatggttagggcccggtagttctacttctgttcatgtttgtgttagatccgtgtttgtgttagatccgtgctgctagcgttcgtacacggatgcgacctgtacgtcagacacgttctgattgctaacttgccagtgtttctctttggggaatcctgggatggctctagccgttccgcagacgggatcgatttcatgattttttttgtttcgttgcatagggtttggtttgcccttttcctttatttcaatatatgccgtgcacttgtttgtcgggtcatcttttcatgcttttttttgtcttggttgtgatgatgtggtctggttgggcggtcgttctagatcggagtagaattctgtttcaaactacctggtggatttattaattttggatctgtatgtgtgtgccatacatattcatagttacgaattgaagatgatggatggaaatatcgatctaggataggtatacatgttgatgcgggttttactgatgcatatacagagatgctttttgttcgcttggttgtgatgatgtggtgtggttgggcggtcgttcattcgttctagatcggagtagaatactgtttcaaactacctggtgtatttattaattttggaactgtatgtgtgtgtcatacatcttcatagttacgagtttaagatggatggaaatatcgatctaggataggtatacatgttgatgtgggttttactgatgcatatacatgatggcatatgcagcatctattcatatgctctaaccttgagtacctatctattataataaacaagtatgttttataattattttgatcttgatatacttggatgatggcatatgcagcagctatatgtggatttttttagccctgccttcatacgctatttatttgcttggtactgtttcttttgtcgatgctcaccctgttgtttggtgttacttctgcaggtcgactttaacttagcctaggatggtcttatggaggacaggaggagcatggtggtgctacctagcaagagctccccactataaagcgcccccacacaccataccacagctcagagcttcttctcatcatctggtagaaagaaagagtgagagtgaggttggcaagggtatagggttcttggtcgatcaaatacctttcccctcttggattctcatcttcctgcttcgttctcaccagatcgatctcaccacgtgcctgcgtagcaagccactctgtatgcaccatcaccaccaggaccaggccatgggcgacgcgctgtgggacctgctcggggaggagatggcagcggcgggcggggagcacgggctgcccccggggtttcggttccaccccaccgacgaggagctggtcaccttctacctcgccgccaaggtgttcaacggcgcctgctgcggcatcgacatcgccgaggtggacctcaaccggtgcgagccgtgggagctccccgacgcggcgcgcatgggggagcgcgagtggtacttcttcagcctccgcgaccgcaagtaccccacgggcctccgtaccaaccgcgccaccggcgccggatactggaaggccaccgggaaggaccgcgaggtgctcaacgccgccaccggcgcgctcctcggcatgaagaagacgctcgtcttctacaagggccgggcgccgcgcggcgagaagaccaagtgggtcctgcacgagtaccgcctcgacggcgacttcgccgccgctcgccgcccctgcaaggaggaatgggtcatctgcaggatactgcacaaggcaggcgaccagtatagcaagctgatgatggtgaagagcccctactacctgcccatggcgatggacccttccagcttctgcttccaggaggacccaaccgggcatcccctcccgaaccctagcggctgcacccccttccaccacggccacccccaccatagcatgcagccgccgcctccattgccgccgagcaaccatgctggcaaggccgtcttcaccggagcagcagcagcctgctgcatgcaacaagagccggcagacggcagcaacagcgccgtgctgcccatgccgccgttccctcccttcacccccatcgtcgccggcaagccggcggccccggcgccgccgccccaggttgtcaacgccggtccacaggagccaccgccacctacctggctggaggcctacctgcagcacactggtgggatcctttatgagatgggtccaactgcagcgcccaggggcgcgtgaggtaccgttaacagatctactaactatctatactgtaataatgttgtatagccgccggatagctagctagtttagtcattcagcggcgatgggtaataataaagtgtcatccatccatcaccatgcgtggcaacgtgagcaatgacctgattgaacaaattgaaatgaaaagaagaaatatgttatatgtcaacgagatttcctcataatgccactgacgacgtgtgtccaagaaatgtatcagtgatacgtatattcacaatttttttatgacttatactcacaatttgtttttttactacttatactcacaatttgttgtgcgtaccataacaatttcgatcgaatatatatcagaaagttgacgaaagtaagctcactcaaaaagttaaatgggctgcggaagctgcgtcaggcccaagttttggctattctatccggtatccacgattttgatggctgagggacatatgttcgcttaagcttcggtccgggcctagaaggccgatctcccgggcacccagctttcttgtacaaagtggccgttaacggatcggccagaatggcccggaccgggttaccgaattcgagctcggtaccctggttcacaaactcaatacaacacacagtggagtagggtattacgctccggcggcccgaaccactctaaatccttgtgtcctcgtgtgctcttccaccattaatgactgtaattgcagggacacgaagagttgtagcgcttttgccaacaagatccgctatatgctagtagagtggaacctgcacagcaacaagcatccaataatctgagaataagaattatgtgtggtgatggttctcatctctgcaactcgccattttcgcgagagaaccaaatccaagttggtgaagatcatgatttgggctcatgggctggcatagtagctattacctttgcaattgtggttcgaatctatccgatattctccttttcagggagagctaatgcttatgcttattgggtattttggtttgacactgcttcacgcccaaaaaaaggcaactatgtctgagttggatatggcccaaaaaaaggcagctatgtctgagttggatatggaagtcttctttcgtttagggtgaagtaagaccaagctcatgagcttattatcttaggtcggaacaaattagttgataggcatggcacatttatcaaattataatgattttaacagaaaagcaacacctctttttcagcagcaccagctttgcaagctgcaattgacactccaagcatagtatttgctccaaactcagcctgcatttcgcacaatatcatatctatttccatttggataaaatatattttccagaaatatgggaacagaatcaagatacagaaaaaagttgtggtagtagtggtaagtggaaacacaagtacagtgaaaagatagcattatttctgaacagtcaaattaaccgaaataagtagtatcacatactgcccctaaattgactacacccaatgtaaagaattgcttgagcatattgagccatcagttgtttgtttgtgtaacggatttgacaatgcagagttcaggagcaaaaaaccgcaaaggagagaaagagggaaaggatctcctagtatcccaccttgtggcgcgccctgtcaagtgcatgatggcctggtcgatctgcgtctgctgctgcggttccatcccaacgagtgcctccgacaccttgtcgttgatcacccgcaccgcgtaggcgacccccctggcgaggaacttccgcctctcggaggccccggccgcgtcggcggcggcgccctcgagcgcgcccacgctagccgtagatgctcggtgcacggccttgttggtgtgcaactcgacctcaacggccggtgcgctacgcccgtcaaggatctggcgcgcccgcaccctcgtgatcacggtgggcgcctcccgcctcatgtggccgacgatgaaaagcgccgggttaggggccttggcgcgcaccgccgtattcagggcctcctcgctcttgcgcgagagcaggtgcttccccaggtactcctgcactgacaaggctgccacagcggtggaatttgtcctcacgacttcgccacgtcgtcctcacctccctggcttcccacgactccgccgtatcgaggtgctcggtgggtcgtcttaatccgaagtccgaactaggaagacgagacagagaggtctgaggaatgggcctcgtttgatgttgagctgaattatttttccagcataagcccaggtcttggtccatgaacaaaattactagaaacccagcccagtactacgatctaaaagagggactgccactggatagctctctctagcattctccacgctccaatacagcggcgtcgtgtctatccgggtctatccgcgaacacgtgagaactctccagaaactgctttctcctccacttcatctctctcgctttccctctataaaaagaccccttctaggaattgagggagacagcaagcaccaagcagcgatccgaagctcaatcaattcactcaaacctcttccccaaatcttcgattagatcttcgttgacaagaagactagaaccgaacctgacatgtccaacctgctcacggttcaccagaaccttccggctcttccagtggacgcgacgtccgatgaagtcaggaagaacctcatggacatgttccgcgacaggcaagcgttcagcgagcacacctggaagatgctgctctccgtctgccgctcctgggctgcatggtgcaagctgaacaacaggaagtggttccccgctgagcccgaggacgtgagggattaccttctgtacctgcaagcgcgaggtttgtttctgcttctacctttgatatatatataataattatcattaattagtagtaatataatatttcaaatatttttttcaaaataaaagaatgtagtatatagcaattgcttttctgtagtttataagtgtgtatattttaatttataacttttctaatatatgaccaaaacatggtgatgcctaggtctggcagtgaagaccatccagcaacaccttggacaactgaacatgcttcacaggcgctccggcctcccgcgccccagcgactcgaacgccgtgagcctcgtcatgcgccgcatcaggaaggaaaacgtcgatgccggcgaaagggcaaagcaggccctcgcgttcgagaggaccgatttcgaccaggtccgcagcctgatggagaacagcgacaggtgccaggacattaggaacctggcgttcctcggaattgcatacaacacgctcctcaggatcgcggaaattgcccgcattcgcgtgaaggacattagccgcaccgacggcggcaggatgcttatccacattggcaggaccaagacgctcgtttccaccgcaggcgtcgaaaaggccctcagcctcggagtgaccaagctcgtcgaacgctggatctccgtgtccggcgtcgcggacgacccaaacaactacctcttctgccgcgtccgcaagaacggggtggctgcccctagcgccaccagccaactcagcacgagggccttggaaggtattttcgaggccacccaccgcctgatctacggcgcgaaggatgacagcggtcaacgctacctcgcatggtccgggcactccgcccgcgttggagctgctagggacatggcccgcgccggtgtttccatccccgaaatcatgcaggcgggtggatggacgaacgtgaacattgtcatgaactacattcgcaaccttgacagcgagacgggcgcaatggttcgcctcctggaagatggtgactgaggtacccaacctagacttgtccatcttctggattggccaacttaattaatgtatgaaataaaaggatgcacacatagtgacatgctaatcactataatgtgggcatcaaagttgtgtgttatgtgtaattactagttatctgaataaaagagaaagagatcatccatatttcttatcctaaatgaatgtcacgtgtctttataattctttgatgaaccagatgcatttcattaaccaaatccatatacatataaatattaatcatatataattaatatcaattgggttagcaaaacaaatctagtctaggtgtgttttgcgatccgatatcgaattggccacggtaccagctgctgctgttctagggttcacaagtctgcctatttgtcttccccaatggagctatggttgtctggtctggtccttggtcgtgtcccgtttcattgtgtactatttacctgtaatgtgtatccttaagtctggtttgatggtgtctgaaacgttttgctgtggtagagcagcatggaagaactataatgaataagtgatccctaatcattgtgtccaaattttgcttctgctatacccttttgtgctgtttcttatgttttgcttaaaaatttgatctgacaaacaaatttgtctaaattatgctcttgttctgactgtgtactgtacacatttgtattgctaccggtttggcacatagttttctctttgattgcagatcaaacccttctgattgcagattgcttggctatggctgatgtgctcactgttcttctttagcttgtatattgctgatggtggcttggctacggctgaaaaagttgctgctgcgccgacttggcaactgttgctccagtaatgctttgtcctctcttcctagccgccgacttggcacttggcagctgttgctcctgtaatgcgttgttatctcttatctcttgagatgtactatgattttgaggctgtttgacttgtgccagattgccagtgctgatgctatattatctcaggtttttatgctagtatatgttttactgtgtgctgcctgtgtcgagttacgtaatctattgaaccgctatgcgtgttgatgccctgttgttgcttgccagattgatgcccctgttgcttgcagcttgcaagctgtagtgaaatcctaaaattccaaaccaaatctattctgaacttttgaagatctgtgatgtccggaagaaaagattcaaacagataaacgggactctccagaatctataaaataaatgatcgacaaacgctttgctttggtaggcttcaagcttggtcacccggtccgggcctagaaggccagcttcggccgccccgggcaactttattatacaaagttgatagataaatcagatatctggttcctaaggacccggcggaccgattaaactgattcggtccgacgcgttacctaataacttcgtatagcatacattatacgaagttattagctaactaactagtaagcttaagccatgggtcgacggatccgttaactagcgtggcatttggcaccgccgcacactatgcgagctaggagtgctagtttacagatgaaactatgaaaccaagaaaacacaattgtccgtagctagcgcgtggcgtcgtgtcaagcttcacacagtatcttcgttcttcactataaatcgcgcctgttgttcgtgagacccaccaccgtggataacagtcccctaataataagcgatcaacagcactgctgatggctgaacaccgaggcgccgccgcgcgtaaccatccgccggagcagcccgtcgtgccggcgaacgacgccttccccgaccgcgcccagcagctctgcctcgacgccgggcgcgcgctcgcgatgtgcggcgtgctcgtcgccgtccctcccgcattttacgcgtcgacgtcgcggacgacaccgcacttgccttcgtcggcttcgtcctctggatcatcggtgcgtggctgtgcctcctggcgctcacgcccttggctccacgggcggtgagggcgggcggggccgccgccagcaccttgctgatcaggtgcctgtccctttcatgaactactagcgcccgcgcccgcggccgccgggcacaagagaacacatcgatgttcgctgcgtacgtcagcaataaggcactctttgtcagtagtcgagtgcatatgttgggtgtttgccctgggagatttcaagtgttgtggccattatcccgcaggataaaaaatcggcggcttttggattgatacggaaaataacgatgtttcatgctcgtgttgtgtgtgtgacatcttgtcagccaagtttttaaccgttgctactccccctctgtgggctcagtgtgtggaccggaatacgtcgtacataggccgtagcctaagcccaatatgccgtttttcaggttggcctgtgtgacgacaagcgggtctcaaaagcccatcacgcaactggcctgcaattattggaggagagcgcgtcgagttggttccagaggctgcgtggtggggccggactctgcgacgacctctcgttcgcgtccgatttggttgccgtgagccgtgacgtaacgcctccttccgttcctccctatataagttccacccccgggtccggtttccccaagccccagtgacccccgatcccgatcgcgaaatctccgcacccgccggcaagggaccgaagcaagcctctctcccgaccgtcgcatcaaggtacgcgtccgctcgatctgtcctcttccttctcgatttgacttgctgtggtgcccgatcacgggatcagaatcgcaccagtgtagatttcgcatgttctaagatgtgttagtttccaggctaatccagttctcttgacgcccgatccgatcgagctccgtgtttatttcagcctaatcgtagtattcccctaaaatttcctcattagggggttcgcaagattgttggtcgacaggttcacttatgctcgatcgcttacttttagtcgattcatgctgcgtactattgttgccccccgtggttttatcttttctcgtgtgaaatccagtagatatagtagatatcgtagcattaggttttaattcaatcgattgattattgtatcatcaaaattgagaagttcgaatcatgcctatcatgctgcctcaaccgaaatcctgtatattgaagtttcaattcaattgattgatcattcattagattcaaccaaaatctagaaggttagatgacgcatgtcatgctgcctgcgtagtttacctttgatctgtttatgattaccttatcagtaggatatttgtgattttgggaagtagcactaactgattcatgctgacatgatgttccctttcagattatactgttgagtcctatctaattgatgctttgtatgctatatgaatacgtcatggtaaattagcagttaattagcatattagcaattgggcgtacctcatcaggattgctcttgtagatgtgtgtggtgatgtttcttgttcaattcatgttctgctttaaaagtatgtgttctctgtttgttaattaagattcatggttataatgatttggacctaattaatcagggttgcccttttagatgcgtggttacttgttgagttcatttttttcctgctatagttgtatgcgtttgttcattcatggttagatttgatttgtttcttctctattccatgccttccatatacttcaattgtagcttaacatgagatttctgtatatgcaggtcgaccgccggggatccacacgacaccatggcccagtccaagcacggcctgaccaaggagatgaccatgaagtaccgcatggagggctgcgtggacggccacaagttcgtgatcaccggcgagggcatcggctaccccttcaagggcaagcaggccatcaacctgtgcgtggtggagggcggccccttgcccttcgccgaggacatcttgtccgccgccttcatgtacggcaaccgcgtgttcaccgagtacccccaggacatcgtcgactacttcaagaactcctgccccgccggctacacctgggaccgctccttcctgttcgaggacggcgccgtgtgcatctgcaacgccgacatcaccgtgagcgtggaggagaactgcatgtaccacgagtccaagttctacggcgtgaacttccccgccgacggccccgtgatgaagaagatgaccgacaactgggagccctcctgcgagaagatcatccccgtgcccaagcagggcatcttgaagggcgacgtgagcatgtacctgctgctgaaggacggtggccgcttgcgctgccagttcgacaccgtgtacaaggccaagtccgtgccccgcaagatgcccgactggcacttcatccagcacaagctgacccgcgaggaccgcagcgacgccaagaaccagaagtggcacctgaccgagcacgccatcgcctccggctccgccttgccctccggactcagatctcgatagagtcaacctagacttgtccatcttctggattggccaacttaattaatgtatgaaataaaaggatgcacacatagtgacatgctaatcactataatgtgggcatcaaagttgtgtgttatgtgtaattactagttatctgaataaaagagaaagagatcatccatatttcttatcctaaatgaatgtcacgtgtctttataattctttgatgaaccagatgcatttcattaaccaaatccatatacatataaatattaatcatatataattaatatcaattgggttagcaaaacaaatctagtctaggtgtgttttgcgaattgcggcgcccttactttaacgcctctaaccaacacccctttatctttataaggaacaataaacagaatttgccccactgttctaaatcacctaataatatccccagctaaaaacaataaaggtttcctagaattaagacaagcatgactgttcctccaggagggtttggaacattgttgcagtcttgcagatacgggcgaagggtgagaaacagagcggagggctggaggtgacctcggtagtcgacgccggagttgagcttgacaacgacggggcggcccctgatggacttgaggaagtccgatggcgtcttcaccgtcccgccggcgcccgaggcgggcctgtcgctgccgccgccgccgctgctcatcttgcgcgctgtgcccccggcggtgtccctgtgttgcggatcgcgggtgggccaggtggatgcgagggcgacccgtttggactccggccggagccgccggatccctggtcggtgtcagtgccgtttactctgggccccacgtgtcagtaccgtctgtagatgacaacaacccgtcgtccacagtcatgtccaaaatatcctttcttcttttttttcgattcggatatctatcttccttttttttttccaaaaatcttcttgacgcaccagcgcgcacgtttgtggtaaacgccgacacgtcggtcccacgtcgatagaccccacccaccagtgagtagcgtgtacgtattcgggggtgacggacgtgtcgccgtcgtcttgctagtcccattcccatctgagccacacatctctgaacaaaaaaaaggagggaggcctccacgcacatccccctccgtgccacccgccccaaaccctcgcgccgcctccgagacagccgccgcaaccatggccaccgccgccgccgcgtctaccgcgctcactggcgccactaccgctgcgcccaaggcgaggcgccgggcgcacctcctggccacccgccgcgccctcgccgcgcccatcaggtgctcagcggcgtcacccgccatgccgatggctcccccggccaccccgctccggccgtggggccccaccgagccccgcaagggtgctgacatcctcgtcgagtccctcgagcgctgcggcgtccgcgacgtcttcgcctaccccggcggcgcgtccatggagatccaccaggcactcacccgctcccccgtcatcgccaaccacctcttccgccacgagcaaggggaggcctttgccgcctccggctacgcgcgctcctcgggccgcgtcggcgtctgcatcgccacctccggccccggcgccaccaacctagtctccgcgctcgccgacgcgctgctcgattccgtccccatggtcgccatcacgggacaggtggcgcgacgcatgattggcaccgacgccttccaggagacgcccatcgtcgaggtcacccgctccatcaccaagcacaactacctggtcctcgacgtcgacgacatcccccgcgtcgtgcaggaggctttcttcctcgcctcctctggtcgaccagggccggtgcttgtcgacatccccaaggacatccagcagcagatggcggtgcctgtctgggacaagcccatgagtctgcctgggtacattgcgcgccttcccaagccccctgcgactgagttgcttgagcaggtgctgcgtcttgttggtgaatcgcggcgccctgttctttatgtgggcggtggctgcgcagcatctggtgaggagttgcgacgctttgtggagctgactggaatcccggtcacaactactcttatgggcctcggcaacttccccagcgacgacccactgtctctgcgcatgctaggtatgcatgggacggtgtatgcaaattatgcagtggataaggccgatctgttgcttgcacttggtgtgcggtttgatgatcgcgtgacagggaagattgaggcttttgcaagcagggctaagattgtgcacgttgatattgatccggctgagattggcaagaacaagcagccacatgtgtccatctgtgcagatgttaagcttgctttgcagggcatgaatgctcttcttgaaggaagcacatcaaagaagagctttgactttggctcatggaacgatgagttggatcagcagaagagggaattcccccttgggtataaaacatctaatgaggagatccagccacaatatgctattcaggttcttgatgagctgacgaaaggcgaggccatcatcggcacaggtgttgggcagcaccagatgtgggcggcacagtactacacttacaagcggccaaggcagtggttgtcttcagctggtcttggggctatgggatttggtttgccggctgctgctggtgcttctgtggcaaacccaggtgtcactgttgttgacatcgatggagatggtagctttctcatgaacgttcaggagctagctatgatccgaattgagaacctcccagtgaaggtctttgtgctaaacaaccagcacctggggatggtggtgcagttggaggacaggttctataaggccaacagagcgcacacatacttgggaaacccagagaatgaaagtgagatatatccagatttcgtgacgatcgccaaagggttcaacattccagcggtccgtgtgacaaagaagaacgaagtccgcgcagcgataaagaagatgctcgagactccagggccgtacctcttggatataatcgtcccacaccaggagcatgtgttgcctatgatccctagtggtggggctttcaaggatatgatcctggatggtgatggcaggactgtgtactgactagctagtcagttaacagatctgccagatcctcggtgtacaaataacccgtcttatcctatgagacgggccggcgtcagtgtgttctggaggaatttttatgtcagagcctttttctttgtgtgcttgatgtagatgccaagggaagcttattggctgttgaagcttgatgcaaaataaattatggaactctgttttttgtttatctaataataactagcaaatatgcttccattgcattgaaactaacagccttttgtgtttccaagttttattttgtgacaatgtcatctatttcaattagttgtggaatcggaaacttgcaggactaacttggaaactccaatccctcagcatcctggactttttcctggtgtaatccatgtagatattattttaatcatcattttagttctggaggtttttccatctccggttttgctcccctttcttcaaaaaaaaaaaaaaaatgccgtaggcgccgcaacgcccacctgttgttcaaactcatgggcacgagtggctcgaagattttatacaacaattgctgtagtttcaccgttgctggtgaagaagcatttttttaaaaaaatatagtggtattcattttaattagtttagttgtgcagcgagcaaaatttggacatgctctgctcggaatctgatcgacctagacacagattagcagcagtagctttgtcatctgttccaagagttgcgatctgatagaagaaaaaaaaaccttcccttcaatgtaaaaccgaaactaacaagaaagaagcacagtgccgtttaggcaagtatggagtacgtattaagcatgtagaaggccatgcatgaaccactaacaagaaagaagcgcagtgccattcaggcaagcataagcatgtagattggcatgcatgaacaactaacagtagatcgtctctggtctgattagaagttttttgggaagccaagaaatcatgtacaactggttccatctcaaattccgtggcaaaaagaggcctaagcaacatacctcgagtagatcacattcaagcttggtcacccggtccgtcaatattctgattccgatgacttcgtaggttcctagctcaagccgctcgtgtccaagcgtcacttacgattagctaatgattacggcatctaggaccgactagtggcgcgccgactagctagctaaggtaccgagctcgaattcattccgattaatcgtggcctcttgctcttcaggatgaagagctatgtttaaacgtgcaagcgctactagacaattcagtacattaaaaacgtccgcaatgtgttattaagttgtctaagcgtcaatttgtttacaccacaatatatcctgcca

SEQ ID NO: 40 - DNA, 20714 bp, synthetic construct
  misc_feature 1..20714: note = PHP95070
  source 1..20714: mol_type = other DNA
gtttacccgccaatatatcctgtcaaacactgatagtttaaactgaaggcgggaaacgacaatctgatcatgagcggagaattaagggagtcacgttatgacccccgccgatgacgcgggacaagccgttttacgtttggaactgacagaaccgcaacgttgaaggagccactcagcaagctggtacgattgtaatacgactcactatagggcgaattgagcgctgtttaaacgctcttcaactggaagagcggttacgctgtttaaacgctcttcaactggaagagcggttactaccggttcactagctagctgctaatcgagctagttaccctatgaggtgacatgaagcgctcacggttactatgacggttagcttcacgactgttggtggcagtagcgtacgacttagctatagttccggacttacccttaagcgatttaaatctgcggttaccgaattcgagctcggtacctagtacccttgtacttttggtttcacctgcatagagaaaacccacaagaatatgacagtctgatttgtcagtctcattctcaagcaacatttctctatccgttactttcatggtgaataacacaatccatcatcaatactttgtgttactcagaaactgaaagttattccgagtcttgcatatctttggacctactcgtttttctaccattattgctgattgttaagctctcgctacttgaatcggcattgttggagtgggaaggttcaaaaaattggagttatgactagttgtctctttctatgtacgatggagaaaatgaataaacaactgagaaaatggctcttgtttagttgatgatgctcttaagctttccactggttgccatatatgatttgggcatttcactttgatcttaatgggccttgtaaagcccaagactcatgattatctttagttgatgctcttaattaggtgtgggcaaataattcaaactgtatgtacccgaccaaaaccaaagcaaaaataatcgaaccaaaccgaaaatttaaaaataaccgaatgaaaactaaatcctataactgaaagaactgaaaccgaatcaaaatatttaatgtaaccaaaaatatccgaaatataattatattgtcaaaaatattaataatttctagattaaataattaaaaatacttaaaaatttatataaaatagtaaaaatactcgaaaataaccacaaatattcaaaaacaaccgaaatatcccaaaatattcaaagcaaaataaccgaatggataccaaattttaaaaccgaaaaaactggaacaaaaccaaaatcgaaccaaaatttcaaaaatcgaataaatactaaactttagaacaaaaaaaaacgataaccgaatgtatacgaaccaaagccgaattagataaccgaacgtccaggactactcttaatctttccgccacttatgatttgggctattactttgtttataatgagccttttcaagctcaagttcatgattgtccgtgagatgagaaactgacttgttggattcgaaaccctagctagtattggttaatacttaatacataaatgacctgcattgacatcatcatccaagaaaataaaaattgtatgcttgagatatttagttttcctagctaggttttctttattttagtaccgaatctttaggtgtgccacgttaatttagacccattttttcatacttaccaactgagtctagtttaatcatgactataatcgtataaaatgattcagtcgacgtcattgcgaacgtatataaaatcatccaaattgacgtcattccaaagaggtaagcatgcttatctaagagtccgagcatactaaacaagacgacattttatttgcactccaaatcaaattttgtattgcctaaagaaaaacaatcaaactcaagtttcttaaaattaatttcattcaaactaatcactttcaatatctcacatattattcatgccatttctatttgtctaaacatgatttaaaaaaaaaagtaaaatacaaagattactatgcaaaaactctataaaaaaaaattcaaatttcttatttatttgtgacatcaaattttcaaaataatttttttaattatcggttgatccggtcagtcgataaaaacataaactttcagcgaccgttaaaactttcctactaccgatttagagaaaatcttagcttgaaacgtaattgtaacctgccttcatgcaagtcgcaagatatgtcatcctaagttgtatatgttttctcaaaagatgtatttacttgagaaaatacgtttcaacgttgatggacaaccaattaagaatcaagcacctttcgtaatcaatttaggcttatcgtctaaggtatactgatttacgacagttgactagacttataaggaacaaaataatagaatagtttctaaacacttcacctaatcatagagactaagatggtaattcgtaaacgacaaagcctagtgacactgtccattgtaaaattccacatcatattagtattaaacatatacatgtagtttcctgaacacatgtagtatcaaacacacttcgtggcttcttcctcgaaacctgcggccgcgctatagttccggacttacccttaagataacttcgtatagcatacattatacgaagttatgggcccacgcgtgaagagcggttaccagagctggtcacctttgtccaccaagatggaactgtcttcggccagaatggccatctggattcagcaggcctagaaggccatttatcgctatcaactttgtatagaaaagttgggccgaattcgagctcggtacggccagaatggcccggaccgaagcttgcggccgcacactgatagtttaaactgaaggcgggaaacgacaatctgatcatgagcggagaattaagggagtcacgttatgacccccgccgatgacgcgggacaagccgttttacgtttggaactgacagaaccgcaacgttgaaggagccactcagccgcgggtttctggagtttaatgagctaagcacatacgtcagaaaccattattgcgcgttcaaaagtcgcctaaggtcactatcagctagcaaatatttcttgtcaaaaatgctccactgacgttccataaattcccctcggtatccaattagagtctcatattcactctcccgggggatctcgactctagaggatcgctcaggaaggccgctgagatagaggcatggcggccaatgcgggcggcggtggagcgggaggaggcagcggcagcggcagcgtggctgcgccggcggtgtgccgccccagcggctcgcggtggacgccgacgccggagcagatcaggatgctgaaggagctctactacggctgcggcatccggtcgcccagctcggagcagatccagcgcatcaccgccatgctgcggcagcacggcaagatcgagggcaagaacgtcttctactggttccagaaccacaaggcccgcgagcgccagaagcgccgcctcaccagcctcgacgtcaacgtgcccgccgccggcgcggccgacgccaccaccagccaactcggcgtcctctcgctgtcgtcgccgccgccttcaggcgcggcgcctccctcgcccaccctcggcttctacgccgccggcaatggcggcggatcggctgtgctgctggacacgagttccgactggggcagcagcggcgctgccatggccaccgagacatgcttcctgcaggactacatgggcgtgacggacacgggcagctcgtcgcagtggccacgcttctcgtcgtcggacacgataatggcggcggccgcggcgcgggcggcgacgacgcgggcgcccgagacgctccctctcttcccgacctgcggcgacgacggcggcagcggtagcagcagctacttgccgttctggggtgccgcgtccacaactgccggcgccacttcttccgttgcgatccagcagcaacaccagctgcaggagcagtacagcttttacagcaacagcaacagcacccagctggccggcaccggcaaccaagacgtatcggcaacagcagcagcagccgccgccctggagctgagcctcagctcatggtgctccccttaccctgctgcagggagtatgtgagagcaacgcgagctgccactgctcttcactgatgtctctggaatggaaggaggaggaagtgagcatagcgttggtgcgttgctgtcaagggcgaattcacatggttaacctagacttgtccatcttctggattggccaacttaattaatgtatgaaataaaaggatgcacacatagtgacatgctaatcactataatgtgggcatcaaagttgtgtgttatgtgtaattactagttatctgaataaaagagaaagagatcatccatatttcttatcctaaatgaatgtcacgtgtctttataattctttgatgaaccagatgcatttcattaaccaaatccatatacatataaatattaatcatatataattaatatcaattgggttagcaaaacaaatctagtctaggtgtgttttgcgaatgcggccgccaccgcggtggagctcgaattccggtccgggcctagaaggccagcttcaagtttgtacaaaaaagcaggctccggccagagttacccggaccgaagcttgcatgcctgcagtgcagcgtgacccggtcgtgcccctctctagagataatgagcattgcatgtctaagttataaaaaattaccacatattttttttgtcacacttgtttgaagtgcagtttatctatctttatacatatatttaaactttactctacgaataatataatctatagtactacaataatatcagtgttttagagaatcatataaatgaacagttagacatggtctaaaggacaattgagtattttgacaacaggactctacagttttatctttttagtgtgcatgtgttctcctttttttttgcaaatagcttcacctatataatacttcatccattttattagtacatccatttagggtttagggttaatggtttttatagactaatttttttagtacatctattttattctattttagcctctaaattaagaaaactaaaactctattttagtttttttatttaataatttagatataaaatagaataaaataaagtgactaaaaattaaacaaataccctttaagaaattaaaaaaactaaggaaacatttttcttgtttcgagtagataatgccagcctgttaaacgccgtcgacgagtctaacggacaccaaccagcgaaccagcagcgtcgcgtcgggccaagcgaagcagacggcacggcatctctgtcgctgcctctggacccctctcgagagttccgctccaccgttggacttgctccgctgtcggcatccagaaattgcgtggcggagcggcagacgtgagccggcacggcaggcggcctcctcctcctctcacggcaccggcagctacgggggattcctttcccaccgctccttcgctttcccttcctcgcccgccgtaataaatagacaccccctccacaccctctttccccaacctcgtgttgttcggagcgcacacacacacaaccagatctcccccaaatccacccgtcggcacctccgcttcaaggtacgccgctcgtcctcccccccccccctctctaccttctctagatcggcgttccggtccatgcatggttagggcccggtagttctacttctgttcatgtttgtgttagatccgtgtttgtgttagatccgtgctgctagcgttcgtacacggatgcgacctgtacgtcagacacgttctgattgctaacttgccagtgtttctctttggggaatcctgggatggctctagccgttccgcagacgggatcgatttcatgattttttttgtttcgttgcatagggtttggtttgcccttttcctttatttcaatatatgccgtgcacttgtttgtcgggtcatcttttcatgcttttttttgtcttggttgtgatgatgtggtctggttgggcggtcgttctagatcggagtagaattctgtttcaaactacctggtggatttattaattttggatctgtatgtgtgtgccatacatattcatagttacgaattgaagatgatggatggaaatatcgatctaggataggtatacatgttgatgcgggttttactgatgcatatacagagatgctttttgttcgcttggttgtgatgatgtggtgtggttgggcggtcgttcattcgttctagatcggagtagaatactgtttcaaactacctggtgtatttattaattttggaactgtatgtgtgtgtcatacatcttcatagttacgagtttaagatggatggaaatatcgatctaggataggtatacatgttgatgtgggttttactgatgcatatacatgatggcatatgcagcatctattcatatgctctaaccttgagtacctatctattataataaacaagtatgttttataattattttgatcttgatatacttggatgatggcatatgcagcagctatatgtggatttttttagccctgccttcatacgctatttatttgcttggtactgtttcttttgtcgatgctcaccctgttgtttggtgttacttctgcaggtcgactttaacttagcctaggatccatgaggtccatggagagcacggactcgtcgtccggtgagctaccaccaccgcagaagcagccgagctcggcgccggatctcccgccgggcttccggttccaccccacggacgaggagctggtcgtccactacctcaagaagaaggccgcgtccgtgccactccccgtcgccatcatcgcggaggtcgacctctacaagttcgatccgtgggagctacctgataaggcgacattcggcgagcaggagtggtacttcttcagcccgagggaccgcaagtaccccaacggagcgcggccgaacagggcggcgacgtccggctactggaaggcgactggcacagacaagcccatcatggcgtccggcggcaaccgcgagaaggtcggcgtcaagaaggctctcgtgttctaccgcgggaagccgccaaagggcctcaagaccaactggatcatgcacgagtaccgcctcgcggatgcggcgagctcaaccaccagccggccgccgccgccttgcaacgccggaggcaaggccacgtctctcaggctcgacgactgggtgttatgccgcatctacaagaagatcgacaaacttggagtcggcgatccgccgcggatcatggagtgcggcgaggactccgtggagaatgcggtggcagcctacccgacgcatgccgcggctgctgccatggccgtcgcagtcgcaggcggaggaggggcttaccataccggcaattacacttcgctgatccaccaccatcacgaggacagcttcctggtggatgggctgctcacagcagaggacgcgggcggcagctccctgagccagctagccgcggcagccagggcagctgctccaacagacaccaccaagcagctcctcgtcccgtcctccaccaccccgttcaactggctcgacgcgtcggcactcacgattcttccgccggcaaagaggttccatgggtacaacagagacaccactgacggcggcggcacgtccctcccgtcgccgtccgagaggaataacctgcaggcggctgtcggcgccgtcgatagtggcgccagcggtggcactagtgccgtcattccatcatttctcaatccgctcggcgtgcaaggtgcgacaagctatcaccaccacgccattttcggcacaccggtgacgccggaagccgccgcggccgccgcatgcagtttccagcacccctaccagctgtccggcgtgaactggaacccgtaaggtaccgttaacagatctactaactatctatactgtaataatgttgtatagccgccggatagctagctagtttagtcattcagcggcgatgggtaataataaagtgtcatccatccatcaccatgcgtggcaacgtgagcaatgacctgattgaacaaattgaaatgaaaagaagaaatatgttatatgtcaacgagatttcctcataatgccactgacgacgtgtgtccaagaaatgtatcagtgatacgtatattcacaatttttttatgacttatactcacaatttgtttttttactacttatactcacaatttgttgtgcgtaccataacaatttcgatcgaatatatatcagaaagttgacgaaagtaagctcactcaaaaagttaaatgggctgcggaagctgcgtcaggcccaagttttggctattctatccggtatccacgattttgatggctgagggacatatgttcgcttaagcttcggtccgggcctagaaggccgatctcccgggcacccagctttcttgtacaaagtggccgttaacggatcggccagaatggcccggaccgggttaccgaattcgagctcggtaccctggttcacaaactcaatacaacacacagtggagtagggtattacgctccggcggcccgaaccactctaaatccttgtgtcctcgtgtgctcttccaccattaatgactgtaattgcagggacacgaagagttgtagcgcttttgccaacaagatccgctatatgctagtagagtggaacctgcacagcaacaagcatccaataatctgagaataagaattatgtgtggtgatggttctcatctctgcaactcgccattttcgcgagagaaccaaatccaagttggtgaagatcatgatttgggctcatgggctggcatagtagctattacctttgcaattgtggttcgaatctatccgatattctccttttcagggagagctaatgcttatgcttattgggtattttggtttgacactgcttcacgcccaaaaaaaggcaactatgtctgagttggatatggcccaaaaaaaggcagctatgtctgagttggatatggaagtcttctttcgtttagggtgaagtaagaccaagctcatgagcttattatcttaggtcggaacaaattagttgataggcatggcacatttatcaaattataatgattttaacagaaaagcaacacctctttttcagcagcaccagctttgcaagctgcaattgacactccaagcatagtatttgctccaaactcagcctgcatttcgcacaatatcatatctatttccatttggataaaatatattttccagaaatatgggaacagaatcaagatacagaaaaaagttgtggtagtagtggtaagtggaaacacaagtacagtgaaaagatagcattatttctgaacagtcaaattaaccgaaataagtagtatcacatactgcccctaaattgactacacccaatgtaaagaattgcttgagcatattgagccatcagttgtttgtttgtgtaacggatttgacaatgcagagttcaggagcaaaaaaccgcaaaggagagaaagagggaaaggatctcctagtatcccaccttgtggcgcgccctgtcaagtgcatgatggcctggtcgatctgcgtctgctgctgcggttccatcccaacgagtgcctccgacaccttgtcgttgatcacccgcaccgcgtaggcgacccccctggcgaggaacttccgcctctcggaggccccggccgcgtcggcggcggcgccctcgagcgcgcccacgctagccgtagatgctcggtgcacggccttgttggtgtgcaactcgacctcaacggccggtgcgctacgcccgtcaaggatctggcgcgcccgcaccctcgtgatcacggtgggcgcctcccgcctcatgtggccgacgatgaaaagcgccgggttaggggccttggcgcgcaccgccgtattcagggcctcctcgctcttgcgcgagagcaggtgcttccccaggtactcctgcactgacaaggctgccacagcggtggaatttgtcctcacgacttcgccacgtcgtcctcacctccctggcttcccacgactccgccgtatcgaggtgctcggtgggtcgtcttaatccgaagtccgaactaggaagacgagacagagaggtctgaggaatgggcctcgtttgatgttgagctgaattatttttccagcataagcccaggtcttggtccatgaacaaaattactagaaacccagcccagtactacgatctaaaagagggactgccactggatagctctctctagcattctccacgctccaatacagcggcgtcgtgtctatccgggtctatccgcgaacacgtgagaactctccagaaactgctttctcctccacttcatctctctcgctttccctctataaaaagaccccttctaggaattgagggagacagcaagcaccaagcagcgatccgaagctcaatcaattcactcaaacctcttccccaaatcttcgattagatcttcgttgacaagaagactagaaccgaacctgacatgtccaacctgctcacggttcaccagaaccttccggctcttccagtggacgcgacgtccgatgaagtcaggaagaacctcatggacatgttccgcgacaggcaagcgttcagcgagcacacctggaagatgctgctctccgtctgccgctcctgggctgcatggtgcaagctgaacaacaggaagtggttccccgctgagcccgaggacgtgagggattaccttctgtacctgcaagcgcgaggtttgtttctgcttctacctttgatatatatataataattatcattaattagtagtaatataatatttcaaatatttttttcaaaataaaagaatgtagtatatagcaattgcttttctgtagtttataagtgtgtatattttaatttataacttttctaatatatgaccaaaacatggtgatgcctaggtctggcagtgaagaccatccagcaacaccttggacaactgaacatgcttcacaggcgctccggcctcccgcgccccagcgactcgaacgccgtgagcctcgtcatgcgccgcatcaggaaggaaaacgtcgatgccggcgaaagggcaaagcaggccctcgcgttcgagaggaccgatttcgaccaggtccgcagcctgatggagaacagcgacaggtgccaggacattaggaacctggcgttcctcggaattgcatacaacacgctcctcaggatcgcggaaattgcccgcattcgcgtgaaggacattagccgcaccgacggcggcaggatgcttatccacattggcaggaccaagacgctcgtttccaccgcaggcgtcgaaaaggccctcagcctcggagtgaccaagctcgtcgaacgctggatctccgtgtccggcgtcgcggacgacccaaacaactacctcttctgccgcgtccgcaagaacggggtggctgcccctagcgccaccagccaactcagcacgagggccttggaaggtattttcgaggccacccaccgcctgatctacggcgcgaaggatgacagcggtcaacgctacctcgcatggtccgggcactccgcccgcgttggagctgctagggacatggcccgcgccggtgtttccatccccgaaatcatgcaggcgggtggatggacgaacgtgaacattgtcatgaactacattcgcaaccttgacagcgagacgggcgcaatggttcgcctcctggaagatggtgactgaggtacccaacctagacttgtccatcttctggattggccaacttaattaatgtatgaaataaaaggatgcacacatagtgacatgctaatcactataatgtgggcatcaaagttgtgtgttatgtgtaattactagttatctgaataaaagagaaagagatcatccatatttcttatcctaaatgaatgtcacgtgtctttataattctttgatgaaccagatgcatttcattaaccaaatccatatacatataaatattaatcatatataattaatatcaattgggttagcaaaacaaatctagtctaggtgtgttttgcgatccgatatcgaattggccacggtaccagctgctgctgttctagggttcacaagtctgcctatttgtcttccccaatggagctatggttgtctggtctggtccttggtcgtgtcccgtttcattgtgtactatttacctgtaatgtgtatccttaagtctggtttgatggtgtctgaaacgttttgctgtggtagagcagcatggaagaactataatgaataagtgatccctaatcattgtgtccaaattttgcttctgctatacccttttgtgctgtttcttatgttttgcttaaaaatttgatctgacaaacaaatttgtctaaattatgctcttgttctgactgtgtactgtacacatttgtattgctaccggtttggcacatagttttctctttgattgcagatcaaacccttctgattgcagattgcttggctatggctgatgtgctcactgttcttctttagcttgtatattgctgatggtggcttggctacggctgaaaaagttgctgctgcgccgacttggcaactgttgctccagtaatgctttgtcctctcttcctagccgccgacttggcacttggcagctgttgctcctgtaatgcgttgttatctcttatctcttgagatgtactatgattttgaggctgtttgacttgtgccagattgccagtgctgatgctatattatctcaggtttttatgctagtatatgttttactgtgtgctgcctgtgtcgagttacgtaatctattgaaccgctatgcgtgttgatgccctgttgttgcttgccagattgatgcccctgttgcttgcagcttgcaagctgtagtgaaatcctaaaattccaaaccaaatctattctgaacttttgaagatctgtgatgtccggaagaaaagattcaaacagataaacgggactctccagaatctataaaataaatgatcgacaaacgctttgctttggtaggcttcaagcttggtcacccggtccgggcctagaaggccagcttcggccgccccgggcaactttattatacaaagttgatagataaatcagatatctggttcctaaggacccggcggaccgattaaactgattcggtccgacgcgttacctaataacttcgtatagcatacattatacgaagttattagctaactaactagtaagcttaagccatgggtcgacggatccgttaactagcgtggcatttggcaccgccgcacactatgcgagctaggagtgctagtttacagatgaaactatgaaaccaagaaaacacaattgtccgtagctagcgcgtggcgtcgtgtcaagcttcacacagtatcttcgttcttcactataaatcgcgcctgttgttcgtgagacccaccaccgtggataacagtcccctaataataagcgatcaacagcactgctgatggctgaacaccgaggcgccgccgcgcgtaaccatccgccggagcagcccgtcgtgccggcgaacgacgccttccccgaccgcgcccagcagctctgcctcgacgccgggcgcgcgctcgcgatgtgcggcgtgctcgtcgccgtccctcccgcattttacgcgtcgacgtcgcggacgacaccgcacttgccttcgtcggcttcgtcctctggatcatcggtgcgtggctgtgcctcctggcgctcacgcccttggctccacgggcggtgagggcgggcggggccgccgccagcaccttgctgatcaggtgcctgtccctttcatgaactactagcgcccgcgcccgcggccgccgggcacaagagaacacatcgatgttcgctgcgtacgtcagcaataaggcactctttgtcagtagtcgagtgcatatgttgggtgtttgccctgggagatttcaagtgttgtggccattatcccgcaggataaaaaatcggcggcttttggattgatacggaaaataacgatgtttcatgctcgtgttgtgtgtgtgacatcttgtcagccaagtttttaaccgttgctactccccctctgtgggctcagtgtgtggaccggaatacgtcgtacataggccgtagcctaagcccaatatgccgtttttcaggttggcctgtgtgacgacaagcgggtctcaaaagcccatcacgcaactggcctgcaattattggaggagagcgcgtcgagttggttccagaggctgcgtggtggggccggactctgcgacgacctctcgttcgcgtccgatttggttgccgtgagccgtgacgtaacgcctccttccgttcctccctatataagttccacccccgggtccggtttccccaagccccagtgacccccgatcccgatcgcgaaatctccgcacccgccggcaagggaccgaagcaagcctctctcccgaccgtcgcatcaaggtacgcgtccgctcgatctgtcctcttccttctcgatttgacttgctgtggtgcccgatcacgggatcagaatcgcaccagtgtagatttcgcatgttctaagatgtgttagtttccaggctaatccagttctcttgacgcccgatccgatcgagctccgtgtttatttcagcctaatcgtagtattcccctaaaatttcctcattagggggttcgcaagattgttggtcgacaggttcacttatgctcgatcgcttacttttagtcgattcatgctgcgtactattgttgccccccgtggttttatcttttctcgtgtgaaatccagtagatatagtagatatcgtagcattaggttttaattcaatcgattgattattgtatcatcaaaattgagaagttcgaatcatgcctatcatgctgcctcaaccgaaatcctgtatattgaagtttcaattcaattgattgatcattcattagattcaaccaaaatctagaaggttagatgacgcatgtcatgctgcctgcgtagtttacctttgatctgtttatgattaccttatcagtaggatatttgtgattttgggaagtagcactaactgattcatgctgacatgatgttccctttcagattatactgttgagtcctatctaattgatgctttgtatgctatatgaatacgtcatggtaaattagcagttaattagcatattagcaattgggcgtacctcatcaggattgctcttgtagatgtgtgtggtgatgtttcttgttcaattcatgttctgctttaaaagtatgtgttctctgtttgttaattaagattcatggttataatgatttggacctaattaatcagggttgcccttttagatgcgtggttacttgttgagttcatttttttcctgctatagttgtatgcgtttgttcattcatggttagatttgatttgtttcttctctattccatgccttccatatacttcaattgtagcttaacatgagatttctgtatatgcaggtcgaccgccggggatccacacgacaccatggcccagtccaagcacggcctgaccaaggagatgaccatgaagtaccgcatggagggctgcgtggacggccacaagttcgtgatcaccggcgagggcatcggctaccccttcaagggcaagcaggccatcaacctgtgcgtggtggagggcggccccttgcccttcgccgaggacatcttgtccgccgccttcatgtacggcaaccgcgtgttcaccgagtacccccaggacatcgtcgactacttcaagaactcctgccccgccggctacacctgggaccgctccttcctgttcgaggacggcgccgtgtgcatctgcaacgccgacatcaccgtgagcgtggaggagaactgcatgtaccacgagtccaagttctacggcgtgaacttccccgccgacggccccgtgatgaagaagatgaccgacaactgggagccctcctgcgagaagatcatccccgtgcccaagcagggcatcttgaagggcgacgtgagcatgtacctgctgctgaaggacggtggccgcttgcgctgccagttcgacaccgtgtacaaggccaagtccgtgccccgcaagatgcccgactggcacttcatccagcacaagctgacccgcgaggaccgcagcgacgccaagaaccagaagtggcacctgaccgagcacgccatcgcctccggctccgccttgccctccggactcagatctcgatagagtcaacctagacttgtccatcttctggattggccaacttaattaatgtatgaaataaaaggatgcacacatagtgacatgctaatcactataatgtgggcatcaaagttgtgtgttatgtgtaattactagttatctgaataaaagagaaagagatcatccatatttcttatcctaaatgaatgtcacgtgtctttataattctttgatgaaccagatgcatttcattaaccaaatccatatacatataaatattaatcatatataattaatatcaattgggttagcaaaacaaatctagtctaggtgtgttttgcgaattgcggcgcccttactttaacgcctctaaccaacacccctttatctttataaggaacaataaacagaatttgccccactgttctaaatcacctaataatatccccagctaaaaacaataaaggtttcctagaattaagacaagcatgactgttcctccaggagggtttggaacattgttgcagtcttgcagatacgggcgaagggtgagaaacagagcggagggctggaggtgacctcggtagtcgacgccggagttgagcttgacaacgacggggcggcccctgatggacttgaggaagtccgatggcgtcttcaccgtcccgccggcgcccgaggcgggcctgtcgctgccgccgccgccgctgctcatcttgcgcgctgtgcccccggcggtgtccctgtgttgcggatcgcgggtgggccaggtggatgcgagggcgacccgtttggactccggccggagccgccggatccctggtcggtgtcagtgccgtttactctgggccccacgtgtcagtaccgtctgtagatgacaacaacccgtcgtccacagtcatgtccaaaatatcctttcttcttttttttcgattcggatatctatcttccttttttttttccaaaaatcttcttgacgcaccagcgcgcacgtttgtggtaaacgccgacacgtcggtcccacgtcgatagaccccacccaccagtgagtagcgtgtacgtattcgggggtgacggacgtgtcgccgtcgtcttgctagtcccattcccatctgagccacacatctctgaacaaaaaaaaggagggaggcctccacgcacatccccctccgtgccacccgccccaaaccctcgcgccgcctccgagacagccgccgcaaccatggccaccgccgccgccgcgtctaccgcgctcactggcgccactaccgctgcgcccaaggcgaggcgccgggcgcacctcctggccacccgccgcgccctcgccgcgcccatcaggtgctcagcggcgtcacccgccatgccgatggctcccccggccaccccgctccggccgtggggccccaccgagccccgcaagggtgctgacatcctcgtcgagtccctcgagcgctgcggcgtccgcgacgtcttcgcctaccccggcggcgcgtccatggagatccaccaggcactcacccgctcccccgtcatcgccaaccacctcttccgccacgagcaaggggaggcctttgccgcctccggctacgcgcgctcctcgggccgcgtcggcgtctgcatcgccacctccggccccggcgccaccaacctagtctccgcgctcgccgacgcgctgctcgattccgtccccatggtcgccatcacgggacaggtggcgcgacgcatgattggcaccgacgccttccaggagacgcccatcgtcgaggtcacccgctccatcaccaagcacaactacctggtcctcgacgtcgacgacatcccccgcgtcgtgcaggaggctttcttcctcgcctcctctggtcgaccagggccggtgcttgtcgacatccccaaggacatccagcagcagatggcggtgcctgtctgggacaagcccatgagtctgcctgggtacattgcgcgccttcccaagccccctgcgactgagttgcttgagcaggtgctgcgtcttgttggtgaatcgcggcgccctgttctttatgtgggcggtggctgcgcagcatctggtgaggagttgcgacgctttgtggagctgactggaatcccggtcacaactactcttatgggcctcggcaacttccccagcgacgacccactgtctctgcgcatgctaggtatgcatgggacggtgtatgcaaattatgcagtggataaggccgatctgttgcttgcacttggtgtgcggtttgatgatcgcgtgacagggaagattgaggcttttgcaagcagggctaagattgtgcacgttgatattgatccggctgagattggcaagaacaagcagccacatgtgtccatctgtgcagatgttaagcttgctttgcagggcatgaatgctcttcttgaaggaagcacatcaaagaagagctttgactttggctcatggaacgatgagttggatcagcagaagagggaattcccccttgggtataaaacatctaatgaggagatccagccacaatatgctattcaggttcttgatgagctgacgaaaggcgaggccatcatcggcacaggtgttgggcagcaccagatgtgggcggcacagtactacacttacaagcggccaaggcagtggttgtcttcagctggtcttggggctatgggatttggtttgccggctgctgctggtgcttctgtggcaaacccaggtgtcactgttgttgacatcgatggagatggtagctttctcatgaacgttcaggagctagctatgatccgaattgagaacctcccagtgaaggtctttgtgctaaacaaccagcacctggggatggtggtgcagttggaggacaggttctataaggccaacagagcgcacacatacttgggaaacccagagaatgaaagtgagatatatccagatttcgtgacgatcgccaaagggttcaacattccagcggtccgtgtgacaaagaagaacgaagtccgcgcagcgataaagaagatgctcgagactccagggccgtacctcttggatataatcgtcccacaccaggagcatgtgttgcctatgatccctagtggtggggctttcaaggatatgatcctggatggtgatggcaggactgtgtactgactagctagtcagttaacagatctgccagatcctcggtgtacaaataacccgtcttatcctatgagacgggccggcgtcagtgtgttctggaggaatttttatgtcagagcctttttctttgtgtgcttgatgtagatgccaagggaagcttattggctgttgaagcttgatgcaaaataaattatggaactctgttttttgtttatctaataataactagcaaatatgcttccattgcattgaaactaacagccttttgtgtttccaagttttattttgtgacaatgtcatctatttcaattagttgtggaatcggaaacttgcaggactaacttggaaactccaatccctcagcatcctggactttttcctggtgtaatccatgtagatattattttaatcatcattttagttctggaggtttttccatctccggttttgctcccctttcttcaaaaaaaaaaaaaaaatgccgtaggcgccgcaacgcccacctgttgttcaaactcatgggcacgagtggctcgaagattttatacaacaattgctgtagtttcaccgttgctggtgaagaagcatttttttaaaaaaatatagtggtattcattttaattagtttagttgtgcagcgagcaaaatttggacatgctctgctcggaatctgatcgacctagacacagattagcagcagtagctttgtcatctgttccaagagttgcgatctgatagaagaaaaaaaaaccttcccttcaatgtaaaaccgaaactaacaagaaagaagcacagtgccgtttaggcaagtatggagtacgtattaagcatgtagaaggccatgcatgaaccactaacaagaaagaagcgcagtgccattcaggcaagcataagcatgtagattggcatgcatgaacaactaacagtagatcgtctctggtctgattagaagttttttgggaagccaagaaatcatgtacaactggttccatctcaaattccgtggcaaaaagaggcctaagcaacatacctcgagtagatcacattcaagcttggtcacccggtccgtcaatattctgattccgatgacttcgtaggttcctagctcaagccgctcgtgtccaagcgtcacttacgattagctaatgattacggcatctaggaccgactagtggcgcgccgactagctagctaaggtaccgagctcgaattcattccgattaatcgtggcctcttgctcttcaggatgaagagctatgtttaaacgtgcaagcgctactagacaattcagtacattaaaaacgtccgcaatgtgttattaagttgtctaagcgtcaatttgtttacaccacaatatatcctgcca

SEQ ID NO: 41 - DNA, 20252 bp, synthetic construct
  misc_feature 1..20252: note = PHP95071
  source 1..20252: mol_type = other DNA
gtttacccgccaatatatcctgtcaaacactgatagtttaaactgaaggcgggaaacgacaatctgatcatgagcggagaattaagggagtcacgttatgacccccgccgatgacgcgggacaagccgttttacgtttggaactgacagaaccgcaacgttgaaggagccactcagcaagctggtacgattgtaatacgactcactatagggcgaattgagcgctgtttaaacgctcttcaactggaagagcggttacgctgtttaaacgctcttcaactggaagagcggttactaccggttcactagctagctgctaatcgagctagttaccctatgaggtgacatgaagcgctcacggttactatgacggttagcttcacgactgttggtggcagtagcgtacgacttagctatagttccggacttacccttaagcgatttaaatctgcggttaccgaattcgagctcggtacctagtacccttgtacttttggtttcacctgcatagagaaaacccacaagaatatgacagtctgatttgtcagtctcattctcaagcaacatttctctatccgttactttcatggtgaataacacaatccatcatcaatactttgtgttactcagaaactgaaagttattccgagtcttgcatatctttggacctactcgtttttctaccattattgctgattgttaagctctcgctacttgaatcggcattgttggagtgggaaggttcaaaaaattggagttatgactagttgtctctttctatgtacgatggagaaaatgaataaacaactgagaaaatggctcttgtttagttgatgatgctcttaagctttccactggttgccatatatgatttgggcatttcactttgatcttaatgggccttgtaaagcccaagactcatgattatctttagttgatgctcttaattaggtgtgggcaaataattcaaactgtatgtacccgaccaaaaccaaagcaaaaataatcgaaccaaaccgaaaatttaaaaataaccgaatgaaaactaaatcctataactgaaagaactgaaaccgaatcaaaatatttaatgtaaccaaaaatatccgaaatataattatattgtcaaaaatattaataatttctagattaaataattaaaaatacttaaaaatttatataaaatagtaaaaatactcgaaaataaccacaaatattcaaaaacaaccgaaatatcccaaaatattcaaagcaaaataaccgaatggataccaaattttaaaaccgaaaaaactggaacaaaaccaaaatcgaaccaaaatttcaaaaatcgaataaatactaaactttagaacaaaaaaaaacgataaccgaatgtatacgaaccaaagccgaattagataaccgaacgtccaggactactcttaatctttccgccacttatgatttgggctattactttgtttataatgagccttttcaagctcaagttcatgattgtccgtgagatgagaaactgacttgttggattcgaaaccctagctagtattggttaatacttaatacataaatgacctgcattgacatcatcatccaagaaaataaaaattgtatgcttgagatatttagttttcctagctaggttttctttattttagtaccgaatctttaggtgtgccacgttaatttagacccattttttcatacttaccaactgagtctagtttaatcatgactataatcgtataaaatgattcagtcgacgtcattgcgaacgtatataaaatcatccaaattgacgtcattccaaagaggtaagcatgcttatctaagagtccgagcatactaaacaagacgacattttatttgcactccaaatcaaattttgtattgcctaaagaaaaacaatcaaactcaagtttcttaaaattaatttcattcaaactaatcactttcaatatctcacatattattcatgccatttctatttgtctaaacatgatttaaaaaaaaaagtaaaatacaaagattactatgcaaaaactctataaaaaaaaattcaaatttcttatttatttgtgacatcaaattttcaaaataatttttttaattatcggttgatccggtcagtcgataaaaacataaactttcagcgaccgttaaaactttcctactaccgatttagagaaaatcttagcttgaaacgtaattgtaacctgccttcatgcaagtcgcaagatatgtcatcctaagttgtatatgttttctcaaaagatgtatttacttgagaaaatacgtttcaacgttgatggacaaccaattaagaatcaagcacctttcgtaatcaatttaggcttatcgtctaaggtatactgatttacgacagttgactagacttataaggaacaaaataatagaatagtttctaaacacttcacctaatcatagagactaagatggtaattcgtaaacgacaaagcctagtgacactgtccattgtaaaattccacatcatattagtattaaacatatacatgtagtttcctgaacacatgtagtatcaaacacacttcgtggcttcttcctcgaaacctgcggccgcgctatagttccggacttacccttaagataacttcgtatagcatacattatacgaagttatgggcccacgcgtgaagagcggttaccagagctggtcacctttgtccaccaagatggaactgtcttcggccagaatggccatctggattcagcaggcctagaaggccatttatcgctatcaactttgtatagaaaagttgggccgaattcgagctcggtacggccagaatggcccggaccgaagcttgcggccgcacactgatagtttaaactgaaggcgggaaacgacaatctgatcatgagcggagaattaagggagtcacgttatgacccccgccgatgacgcgggacaagccgttttacgtttggaactgacagaaccgcaacgttgaaggagccactcagccgcgggtttctggagtttaatgagctaagcacatacgtcagaaaccattattgcgcgttcaaaagtcgcctaaggtcactatcagctagcaaatatttcttgtcaaaaatgctccactgacgttccataaattcccctcggtatccaattagagtctcatattcactctcccgggggatctcgactctagaggatcgctcaggaaggccgctgagatagaggcatggcggccaatgcgggcggcggtggagcgggaggaggcagcggcagcggcagcgtggctgcgccggcggtgtgccgccccagcggctcgcggtggacgccgacgccggagcagatcaggatgctgaaggagctctactacggctgcggcatccggtcgcccagctcggagcagatccagcgcatcaccgccatgctgcggcagcacggcaagatcgagggcaagaacgtcttctactggttccagaaccacaaggcccgcgagcgccagaagcgccgcctcaccagcctcgacgtcaacgtgcccgccgccggcgcggccgacgccaccaccagccaactcggcgtcctctcgctgtcgtcgccgccgccttcaggcgcggcgcctccctcgcccaccctcggcttctacgccgccggcaatggcggcggatcggctgtgctgctggacacgagttccgactggggcagcagcggcgctgccatggccaccgagacatgcttcctgcaggactacatgggcgtgacggacacgggcagctcgtcgcagtggccacgcttctcgtcgtcggacacgataatggcggcggccgcggcgcgggcggcgacgacgcgggcgcccgagacgctccctctcttcccgacctgcggcgacgacggcggcagcggtagcagcagctacttgccgttctggggtgccgcgtccacaactgccggcgccacttcttccgttgcgatccagcagcaacaccagctgcaggagcagtacagcttttacagcaacagcaacagcacccagctggccggcaccggcaaccaagacgtatcggcaacagcagcagcagccgccgccctggagctgagcctcagctcatggtgctccccttaccctgctgcagggagtatgtgagagcaacgcgagctgccactgctcttcactgatgtctctggaatggaaggaggaggaagtgagcatagcgttggtgcgttgctgtcaagggcgaattcacatggttaacctagacttgtccatcttctggattggccaacttaattaatgtatgaaataaaaggatgcacacatagtgacatgctaatcactataatgtgggcatcaaagttgtgtgttatgtgtaattactagttatctgaataaaagagaaagagatcatccatatttcttatcctaaatgaatgtcacgtgtctttataattctttgatgaaccagatgcatttcattaaccaaatccatatacatataaatattaatcatatataattaatatcaattgggttagcaaaacaaatctagtctaggtgtgttttgcgaatgcggccgccaccgcggtggagctcgaattccggtccgggcctagaaggccagcttcaagtttgtacaaaaaagcaggctccggccagagttacccggaccgaagcttgcatgcctgcagtgcagcgtgacccggtcgtgcccctctctagagataatgagcattgcatgtctaagttataaaaaattaccacatattttttttgtcacacttgtttgaagtgcagtttatctatctttatacatatatttaaactttactctacgaataatataatctatagtactacaataatatcagtgttttagagaatcatataaatgaacagttagacatggtctaaaggacaattgagtattttgacaacaggactctacagttttatctttttagtgtgcatgtgttctcctttttttttgcaaatagcttcacctatataatacttcatccattttattagtacatccatttagggtttagggttaatggtttttatagactaatttttttagtacatctattttattctattttagcctctaaattaagaaaactaaaactctattttagtttttttatttaataatttagatataaaatagaataaaataaagtgactaaaaattaaacaaataccctttaagaaattaaaaaaactaaggaaacatttttcttgtttcgagtagataatgccagcctgttaaacgccgtcgacgagtctaacggacaccaaccagcgaaccagcagcgtcgcgtcgggccaagcgaagcagacggcacggcatctctgtcgctgcctctggacccctctcgagagttccgctccaccgttggacttgctccgctgtcggcatccagaaattgcgtggcggagcggcagacgtgagccggcacggcaggcggcctcctcctcctctcacggcaccggcagctacgggggattcctttcccaccgctccttcgctttcccttcctcgcccgccgtaataaatagacaccccctccacaccctctttccccaacctcgtgttgttcggagcgcacacacacacaaccagatctcccccaaatccacccgtcggcacctccgcttcaaggtacgccgctcgtcctcccccccccccctctctaccttctctagatcggcgttccggtccatgcatggttagggcccggtagttctacttctgttcatgtttgtgttagatccgtgtttgtgttagatccgtgctgctagcgttcgtacacggatgcgacctgtacgtcagacacgttctgattgctaacttgccagtgtttctctttggggaatcctgggatggctctagccgttccgcagacgggatcgatttcatgattttttttgtttcgttgcatagggtttggtttgcccttttcctttatttcaatatatgccgtgcacttgtttgtcgggtcatcttttcatgcttttttttgtcttggttgtgatgatgtggtctggttgggcggtcgttctagatcggagtagaattctgtttcaaactacctggtggatttattaattttggatctgtatgtgtgtgccatacatattcatagttacgaattgaagatgatggatggaaatatcgatctaggataggtatacatgttgatgcgggttttactgatgcatatacagagatgctttttgttcgcttggttgtgatgatgtggtgtggttgggcggtcgttcattcgttctagatcggagtagaatactgtttcaaactacctggtgtatttattaattttggaactgtatgtgtgtgtcatacatcttcatagttacgagtttaagatggatggaaatatcgatctaggataggtatacatgttgatgtgggttttactgatgcatatacatgatggcatatgcagcatctattcatatgctctaaccttgagtacctatctattataataaacaagtatgttttataattattttgatcttgatatacttggatgatggcatatgcagcagctatatgtggatttttttagccctgccttcatacgctatttatttgcttggtactgtttcttttgtcgatgctcaccctgttgtttggtgttacttctgcaggtcgactttaacttagcctaggatccatgagcagcagcaagcacagcagcgtgttcaactacagcgccctgttcctgagcctgttcctgcagcagatggaccagaacagcctgcaccacctggacagcccgaagatcgagaacgagtacgagccggacagcctgtacgacatgctggacaagctgccgccgctggacagcctgctggacatggaggacctgaagccgaacgccggcctgcacttccagttccactacaacagcttcgaggacttcttcgagaacatcgaggtggacaacaccatcccgagcgacatccacctgctgacccaggagccgtacttcagcagcgacagcagcagcagcagcccgctggccatccagaacgacggcctgatcagcaacgtgaaggtggagaaggtgaccgtgaagaagaagaggaacctgaagaagaagaggcaggacaagctggagatgagcgagatcaagcagttcttcgacaggccgatcatgaaggccgccaaggagctgaacgtgggcctgaccgtgctgaagaagaggtgcagggagctgggcatctacaggtggccgcacaggaagctgaagagcctgaacagcctgatcaagaacctgaagaacgtgggcatggaggaggaggtgaagaacctggaggagcacaggttcctgatcgagcaggagccggacgccgagctgagcgacggcaccaagaagctgaggcaggcctgcttcaaggccaactacaagaggaggaagagcctgggcgacgactactactaaggtaccgttaacagatctactaactatctatactgtaataatgttgtatagccgccggatagctagctagtttagtcattcagcggcgatgggtaataataaagtgtcatccatccatcaccatgcgtggcaacgtgagcaatgacctgattgaacaaattgaaatgaaaagaagaaatatgttatatgtcaacgagatttcctcataatgccactgacgacgtgtgtccaagaaatgtatcagtgatacgtatattcacaatttttttatgacttatactcacaatttgtttttttactacttatactcacaatttgttgtgcgtaccataacaatttcgatcgaatatatatcagaaagttgacgaaagtaagctcactcaaaaagttaaatgggctgcggaagctgcgtcaggcccaagttttggctattctatccggtatccacgattttgatggctgagggacatatgttcgcttaagcttcggtccgggcctagaaggccgatctcccgggcacccagctttcttgtacaaagtggccgttaacggatcggccagaatggcccggaccgggttaccgaattcgagctcggtaccctggttcacaaactcaatacaacacacagtggagtagggtattacgctccggcggcccgaaccactctaaatccttgtgtcctcgtgtgctcttccaccattaatgactgtaattgcagggacacgaagagttgtagcgcttttgccaacaagatccgctatatgctagtagagtggaacctgcacagcaacaagcatccaataatctgagaataagaattatgtgtggtgatggttctcatctctgcaactcgccattttcgcgagagaaccaaatccaagttggtgaagatcatgatttgggctcatgggctggcatagtagctattacctttgcaattgtggttcgaatctatccgatattctccttttcagggagagctaatgcttatgcttattgggtattttggtttgacactgcttcacgcccaaaaaaaggcaactatgtctgagttggatatggcccaaaaaaaggcagctatgtctgagttggatatggaagtcttctttcgtttagggtgaagtaagaccaagctcatgagcttattatcttaggtcggaacaaattagttgataggcatggcacatttatcaaattataatgattttaacagaaaagcaacacctctttttcagcagcaccagctttgcaagctgcaattgacactccaagcatagtatttgctccaaactcagcctgcatttcgcacaatatcatatctatttccatttggataaaatatattttccagaaatatgggaacagaatcaagatacagaaaaaagttgtggtagtagtggtaagtggaaacacaagtacagtgaaaagatagcattatttctgaacagtcaaattaaccgaaataagtagtatcacatactgcccctaaattgactacacccaatgtaaagaattgcttgagcatattgagccatcagttgtttgtttgtgtaacggatttgacaatgcagagttcaggagcaaaaaaccgcaaaggagagaaagagggaaaggatctcctagtatcccaccttgtggcgcgccctgtcaagtgcatgatggcctggtcgatctgcgtctgctgctgcggttccatcccaacgagtgcctccgacaccttgtcgttgatcacccgcaccgcgtaggcgacccccctggcgaggaacttccgcctctcggaggccccggccgcgtcggcggcggcgccctcgagcgcgcccacgctagccgtagatgctcggtgcacggccttgttggtgtgcaactcgacctcaacggccggtgcgctacgcccgtcaaggatctggcgcgcccgcaccctcgtgatcacggtgggcgcctcccgcctcatgtggccgacgatgaaaagcgccgggttaggggccttggcgcgcaccgccgtattcagggcctcctcgctcttgcgcgagagcaggtgcttccccaggtactcctgcactgacaaggctgccacagcggtggaatttgtcctcacgacttcgccacgtcgtcctcacctccctggcttcccacgactccgccgtatcgaggtgctcggtgggtcgtcttaatccgaagtccgaactaggaagacgagacagagaggtctgaggaatgggcctcgtttgatgttgagctgaattatttttccagcataagcccaggtcttggtccatgaacaaaattactagaaacccagcccagtactacgatctaaaagagggactgccactggatagctctctctagcattctccacgctccaatacagcggcgtcgtgtctatccgggtctatccgcgaacacgtgagaactctccagaaactgctttctcctccacttcatctctctcgctttccctctataaaaagaccccttctaggaattgagggagacagcaagcaccaagcagcgatccgaagctcaatcaattcactcaaacctcttccccaaatcttcgattagatcttcgttgacaagaagactagaaccgaacctgacatgtccaacctgctcacggttcaccagaaccttccggctcttccagtggacgcgacgtccgatgaagtcaggaagaacctcatggacatgttccgcgacaggcaagcgttcagcgagcacacctggaagatgctgctctccgtctgccgctcctgggctgcatggtgcaagctgaacaacaggaagtggttccccgctgagcccgaggacgtgagggattaccttctgtacctgcaagcgcgaggtttgtttctgcttctacctttgatatatatataataattatcattaattagtagtaatataatatttcaaatatttttttcaaaataaaagaatgtagtatatagcaattgcttttctgtagtttataagtgtgtatattttaatttataacttttctaatatatgaccaaaacatggtgatgcctaggtctggcagtgaagaccatccagcaacaccttggacaactgaacatgcttcacaggcgctccggcctcccgcgccccagcgactcgaacgccgtgagcctcgtcatgcgccgcatcaggaaggaaaacgtcgatgccggcgaaagggcaaagcaggccctcgcgttcgagaggaccgatttcgaccaggtccgcagcctgatggagaacagcgacaggtgccaggacattaggaacctggcgttcctcggaattgcatacaacacgctcctcaggatcgcggaaattgcccgcattcgcgtgaaggacattagccgcaccgacggcggcaggatgcttatccacattggcaggaccaagacgctcgtttccaccgcaggcgtcgaaaaggccctcagcctcggagtgaccaagctcgtcgaacgctggatctccgtgtccggcgtcgcggacgacccaaacaactacctcttctgccgcgtccgcaagaacggggtggctgcccctagcgccaccagccaactcagcacgagggccttggaaggtattttcgaggccacccaccgcctgatctacggcgcgaaggatgacagcggtcaacgctacctcgcatggtccgggcactccgcccgcgttggagctgctagggacatggcccgcgccggtgtttccatccccgaaatcatgcaggcgggtggatggacgaacgtgaacattgtcatgaactacattcgcaaccttgacagcgagacgggcgcaatggttcgcctcctggaagatggtgactgaggtacccaacctagacttgtccatcttctggattggccaacttaattaatgtatgaaataaaaggatgcacacatagtgacatgctaatcactataatgtgggcatcaaagttgtgtgttatgtgtaattactagttatctgaataaaagagaaagagatcatccatatttcttatcctaaatgaatgtcacgtgtctttataattctttgatgaaccagatgcatttcattaaccaaatccatatacatataaatattaatcatatataattaatatcaattgggttagcaaaacaaatctagtctaggtgtgttttgcgatccgatatcgaattggccacggtaccagctgctgctgttctagggttcacaagtctgcctatttgtcttccccaatggagctatggttgtctggtctggtccttggtcgtgtcccgtttcattgtgtactatttacctgtaatgtgtatccttaagtctggtttgatggtgtctgaaacgttttgctgtggtagagcagcatggaagaactataatgaataagtgatccctaatcattgtgtccaaattttgcttctgctatacccttttgtgctgtttcttatgttttgcttaaaaatttgatctgacaaacaaatttgtctaaattatgctcttgttctgactgtgtactgtacacatttgtattgctaccggtttggcacatagttttctctttgattgcagatcaaacccttctgattgcagattgcttggctatggctgatgtgctcactgttcttctttagcttgtatattgctgatggtggcttggctacggctgaaaaagttgctgctgcgccgacttggcaactgttgctccagtaatgctttgtcctctcttcctagccgccgacttggcacttggcagctgttgctcctgtaatgcgttgttatctcttatctcttgagatgtactatgattttgaggctgtttgacttgtgccagattgccagtgctgatgctatattatctcaggtttttatgctagtatatgttttactgtgtgctgcctgtgtcgagttacgtaatctattgaaccgctatgcgtgttgatgccctgttgttgcttgccagattgatgcccctgttgcttgcagcttgcaagctgtagtgaaatcctaaaattccaaaccaaatctattctgaacttttgaagatctgtgatgtccggaagaaaagattcaaacagataaacgggactctccagaatctataaaataaatgatcgacaaacgctttgctttggtaggcttcaagcttggtcacccggtccgggcctagaaggccagcttcggccgccccgggcaactttattatacaaagttgatagataaatcagatatctggttcctaaggacccggcggaccgattaaactgattcggtccgacgcgttacctaataacttcgtatagcatacattatacgaagttattagctaactaactagtaagcttaagccatgggtcgacggatccgttaactagcgtggcatttggcaccgccgcacactatgcgagctaggagtgctagtttacagatgaaactatgaaaccaagaaaacacaattgtccgtagctagcgcgtggcgtcgtgtcaagcttcacacagtatcttcgttcttcactataaatcgcgcctgttgttcgtgagacccaccaccgtggataacagtcccctaataataagcgatcaacagcactgctgatggctgaacaccgaggcgccgccgcgcgtaaccatccgccggagcagcccgtcgtgccggcgaacgacgccttccccgaccgcgcccagcagctctgcctcgacgccgggcgcgcgctcgcgatgtgcggcgtgctcgtcgccgtccctcccgcattttacgcgtcgacgtcgcggacgacaccgcacttgccttcgtcggcttcgtcctctggatcatcggtgcgtggctgtgcctcctggcgctcacgcccttggctccacgggcggtgagggcgggcggggccgccgccagcaccttgctgatcaggtgcctgtccctttcatgaactactagcgcccgcgcccgcggccgccgggcacaagagaacacatcgatgttcgctgcgtacgtcagcaataaggcactctttgtcagtagtcgagtgcatatgttgggtgtttgccctgggagatttcaagtgttgtggccattatcccgcaggataaaaaatcggcggcttttggattgatacggaaaataacgatgtttcatgctcgtgttgtgtgtgtgacatcttgtcagccaagtttttaaccgttgctactccccctctgtgggctcagtgtgtggaccggaatacgtcgtacataggccgtagcctaagcccaatatgccgtttttcaggttggcctgtgtgacgacaagcgggtctcaaaagcccatcacgcaactggcctgcaattattggaggagagcgcgtcgagttggttccagaggctgcgtggtggggccggactctgcgacgacctctcgttcgcgtccgatttggttgccgtgagccgtgacgtaacgcctccttccgttcctccctatataagttccacccccgggtccggtttccccaagccccagtgacccccgatcccgatcgcgaaatctccgcacccgccggcaagggaccgaagcaagcctctctcccgaccgtcgcatcaaggtacgcgtccgctcgatctgtcctcttccttctcgatttgacttgctgtggtgcccgatcacgggatcagaatcgcaccagtgtagatttcgcatgttctaagatgtgttagtttccaggctaatccagttctcttgacgcccgatccgatcgagctccgtgtttatttcagcctaatcgtagtattcccctaaaatttcctcattagggggttcgcaagattgttggtcgacaggttcacttatgctcgatcgcttacttttagtcgattcatgctgcgtactattgttgccccccgtggttttatcttttctcgtgtgaaatccagtagatatagtagatatcgtagcattaggttttaattcaatcgattgattattgtatcatcaaaattgagaagttcgaatcatgcctatcatgctgcctcaaccgaaatcctgtatattgaagtttcaattcaattgattgatcattcattagattcaaccaaaatctagaaggttagatgacgcatgtcatgctgcctgcgtagtttacctttgatctgtttatgattaccttatcagtaggatatttgtgattttgggaagtagcactaactgattcatgctgacatgatgttccctttcagattatactgttgagtcctatctaattgatgctttgtatgctatatgaatacgtcatggtaaattagcagttaattagcatattagcaattgggcgtacctcatcaggattgctcttgtagatgtgtgtggtgatgtttcttgttcaattcatgttctgctttaaaagtatgtgttctctgtttgttaattaagattcatggttataatgatttggacctaattaatcagggttgcccttttagatgcgtggttacttgttgagttcatttttttcctgctatagttgtatgcgtttgttcattcatggttagatttgatttgtttcttctctattccatgccttccatatacttcaattgtagcttaacatgagatttctgtatatgcaggtcgaccgccggggatccacacgacaccatggcccagtccaagcacggcctgaccaaggagatgaccatgaagtaccgcatggagggctgcgtggacggccacaagttcgtgatcaccggcgagggcatcggctaccccttcaagggcaagcaggccatcaacctgtgcgtggtggagggcggccccttgcccttcgccgaggacatcttgtccgccgccttcatgtacggcaaccgcgtgttcaccgagtacccccaggacatcgtcgactacttcaagaactcctgccccgccggctacacctgggaccgctccttcctgttcgaggacggcgccgtgtgcatctgcaacgccgacatcaccgtgagcgtggaggagaactgcatgtaccacgagtccaagttctacggcgtgaacttccccgccgacggccccgtgatgaagaagatgaccgacaactgggagccctcctgcgagaagatcatccccgtgcccaagcagggcatcttgaagggcgacgtgagcatgtacctgctgctgaaggacggtggccgcttgcgctgccagttcgacaccgtgtacaaggccaagtccgtgccccgcaagatgcccgactggcacttcatccagcacaagctgacccgcgaggaccgcagcgacgccaagaaccagaagtggcacctgaccgagcacgccatcgcctccggctccgccttgccctccggactcagatctcgatagagtcaacctagacttgtccatcttctggattggccaacttaattaatgtatgaaataaaaggatgcacacatagtgacatgctaatcactataatgtgggcatcaaagttgtgtgttatgtgtaattactagttatctgaataaaagagaaagagatcatccatatttcttatcctaaatgaatgtcacgtgtctttataattctttgatgaaccagatgcatttcattaaccaaatccatatacatataaatattaatcatatataattaatatcaattgggttagcaaaacaaatctagtctaggtgtgttttgcgaattgcggcgcccttactttaacgcctctaaccaacacccctttatctttataaggaacaataaacagaatttgccccactgttctaaatcacctaataatatccccagctaaaaacaataaaggtttcctagaattaagacaagcatgactgttcctccaggagggtttggaacattgttgcagtcttgcagatacgggcgaagggtgagaaacagagcggagggctggaggtgacctcggtagtcgacgccggagttgagcttgacaacgacggggcggcccctgatggacttgaggaagtccgatggcgtcttcaccgtcccgccggcgcccgaggcgggcctgtcgctgccgccgccgccgctgctcatcttgcgcgctgtgcccccggcggtgtccctgtgttgcggatcgcgggtgggccaggtggatgcgagggcgacccgtttggactccggccggagccgccggatccctggtcggtgtcagtgccgtttactctgggccccacgtgtcagtaccgtctgtagatgacaacaacccgtcgtccacagtcatgtccaaaatatcctttcttcttttttttcgattcggatatctatcttccttttttttttccaaaaatcttcttgacgcaccagcgcgcacgtttgtggtaaacgccgacacgtcggtcccacgtcgatagaccccacccaccagtgagtagcgtgtacgtattcgggggtgacggacgtgtcgccgtcgtcttgctagtcccattcccatctgagccacacatctctgaacaaaaaaaaggagggaggcctccacgcacatccccctccgtgccacccgccccaaaccctcgcgccgcctccgagacagccgccgcaaccatggccaccgccgccgccgcgtctaccgcgctcactggcgccactaccgctgcgcccaaggcgaggcgccgggcgcacctcctggccacccgccgcgccctcgccgcgcccatcaggtgctcagcggcgtcacccgccatgccgatggctcccccggccaccccgctccggccgtggggccccaccgagccccgcaagggtgctgacatcctcgtcgagtccctcgagcgctgcggcgtccgcgacgtcttcgcctaccccggcggcgcgtccatggagatccaccaggcactcacccgctcccccgtcatcgccaaccacctcttccgccacgagcaaggggaggcctttgccgcctccggctacgcgcgctcctcgggccgcgtcggcgtctgcatcgccacctccggccccggcgccaccaacctagtctccgcgctcgccgacgcgctgctcgattccgtccccatggtcgccatcacgggacaggtggcgcgacgcatgattggcaccgacgccttccaggagacgcccatcgtcgaggtcacccgctccatcaccaagcacaactacctggtcctcgacgtcgacgacatcccccgcgtcgtgcaggaggctttcttcctcgcctcctctggtcgaccagggccggtgcttgtcgacatccccaaggacatccagcagcagatggcggtgcctgtctgggacaagcccatgagtctgcctgggtacattgcgcgccttcccaagccccctgcgactgagttgcttgagcaggtgctgcgtcttgttggtgaatcgcggcgccctgttctttatgtgggcggtggctgcgcagcatctggtgaggagttgcgacgctttgtggagctgactggaatcccggtcacaactactcttatgggcctcggcaacttccccagcgacgacccactgtctctgcgcatgctaggtatgcatgggacggtgtatgcaaattatgcagtggataaggccgatctgttgcttgcacttggtgtgcggtttgatgatcgcgtgacagggaagattgaggcttttgcaagcagggctaagattgtgcacgttgatattgatccggctgagattggcaagaacaagcagccacatgtgtccatctgtgcagatgttaagcttgctttgcagggcatgaatgctcttcttgaaggaagcacatcaaagaagagctttgactttggctcatggaacgatgagttggatcagcagaagagggaattcccccttgggtataaaacatctaatgaggagatccagccacaatatgctattcaggttcttgatgagctgacgaaaggcgaggccatcatcggcacaggtgttgggcagcaccagatgtgggcggcacagtactacacttacaagcggccaaggcagtggttgtcttcagctggtcttggggctatgggatttggtttgccggctgctgctggtgcttctgtggcaaacccaggtgtcactgttgttgacatcgatggagatggtagctttctcatgaacgttcaggagctagctatgatccgaattgagaacctcccagtgaaggtctttgtgctaaacaaccagcacctggggatggtggtgcagttggaggacaggttctataaggccaacagagcgcacacatacttgggaaacccagagaatgaaagtgagatatatccagatttcgtgacgatcgccaaagggttcaacattccagcggtccgtgtgacaaagaagaacgaagtccgcgcagcgataaagaagatgctcgagactccagggccgtacctcttggatataatcgtcccacaccaggagcatgtgttgcctatgatccctagtggtggggctttcaaggatatgatcctggatggtgatggcaggactgtgtactgactagctagtcagttaacagatctgccagatcctcggtgtacaaataacccgtcttatcctatgagacgggccggcgtcagtgtgttctggaggaatttttatgtcagagcctttttctttgtgtgcttgatgtagatgccaagggaagcttattggctgttgaagcttgatgcaaaataaattatggaactctgttttttgtttatctaataataactagcaaatatgcttccattgcattgaaactaacagccttttgtgtttccaagttttattttgtgacaatgtcatctatttcaattagttgtggaatcggaaacttgcaggactaacttggaaactccaatccctcagcatcctggactttttcctggtgtaatccatgtagatattattttaatcatcattttagttctggaggtttttccatctccggttttgctcccctttcttcaaaaaaaaaaaaaaaatgccgtaggcgccgcaacgcccacctgttgttcaaactcatgggcacgagtggctcgaagattttatacaacaattgctgtagtttcaccgttgctggtgaagaagcatttttttaaaaaaatatagtggtattcattttaattagtttagttgtgcagcgagcaaaatttggacatgctctgctcggaatctgatcgacctagacacagattagcagcagtagctttgtcatctgttccaagagttgcgatctgatagaagaaaaaaaaaccttcccttcaatgtaaaaccgaaactaacaagaaagaagcacagtgccgtttaggcaagtatggagtacgtattaagcatgtagaaggccatgcatgaaccactaacaagaaagaagcgcagtgccattcaggcaagcataagcatgtagattggcatgcatgaacaactaacagtagatcgtctctggtctgattagaagttttttgggaagccaagaaatcatgtacaactggttccatctcaaattccgtggcaaaaagaggcctaagcaacatacctcgagtagatcacattcaagcttggtcacccggtccgtcaatattctgattccgatgacttcgtaggttcctagctcaagccgctcgtgtccaagcgtcacttacgattagctaatgattacggcatctaggaccgactagtggcgcgccgactagctagctaaggtaccgagctcgaattcattccgattaatcgtggcctcttgctcttcaggatgaagagctatgtttaaacgtgcaagcgctactagacaattcagtacattaaaaacgtccgcaatgtgttattaagttgtctaagcgtcaatttgtttacaccacaatatatcctgcca

SEQ ID NO: 42 - DNA, 21585 bp, synthetic construct
  misc_feature 1..21585: note = PHP95072
  source 1..21585: mol_type = other DNA
gtttacccgccaatatatcctgtcaaacactgatagtttaaactgaaggcgggaaacgacaatctgatcatgagcggagaattaagggagtcacgttatgacccccgccgatgacgcgggacaagccgttttacgtttggaactgacagaaccgcaacgttgaaggagccactcagcaagctggtacgattgtaatacgactcactatagggcgaattgagcgctgtttaaacgctcttcaactggaagagcggttacgctgtttaaacgctcttcaactggaagagcggttactaccggttcactagctagctgctaatcgagctagttaccctatgaggtgacatgaagcgctcacggttactatgacggttagcttcacgactgttggtggcagtagcgtacgacttagctatagttccggacttacccttaagcgatttaaatctgcggttaccgaattcgagctcggtacctagtacccttgtacttttggtttcacctgcatagagaaaacccacaagaatatgacagtctgatttgtcagtctcattctcaagcaacatttctctatccgttactttcatggtgaataacacaatccatcatcaatactttgtgttactcagaaactgaaagttattccgagtcttgcatatctttggacctactcgtttttctaccattattgctgattgttaagctctcgctacttgaatcggcattgttggagtgggaaggttcaaaaaattggagttatgactagttgtctctttctatgtacgatggagaaaatgaataaacaactgagaaaatggctcttgtttagttgatgatgctcttaagctttccactggttgccatatatgatttgggcatttcactttgatcttaatgggccttgtaaagcccaagactcatgattatctttagttgatgctcttaattaggtgtgggcaaataattcaaactgtatgtacccgaccaaaaccaaagcaaaaataatcgaaccaaaccgaaaatttaaaaataaccgaatgaaaactaaatcctataactgaaagaactgaaaccgaatcaaaatatttaatgtaaccaaaaatatccgaaatataattatattgtcaaaaatattaataatttctagattaaataattaaaaatacttaaaaatttatataaaatagtaaaaatactcgaaaataaccacaaatattcaaaaacaaccgaaatatcccaaaatattcaaagcaaaataaccgaatggataccaaattttaaaaccgaaaaaactggaacaaaaccaaaatcgaaccaaaatttcaaaaatcgaataaatactaaactttagaacaaaaaaaaacgataaccgaatgtatacgaaccaaagccgaattagataaccgaacgtccaggactactcttaatctttccgccacttatgatttgggctattactttgtttataatgagccttttcaagctcaagttcatgattgtccgtgagatgagaaactgacttgttggattcgaaaccctagctagtattggttaatacttaatacataaatgacctgcattgacatcatcatccaagaaaataaaaattgtatgcttgagatatttagttttcctagctaggttttctttattttagtaccgaatctttaggtgtgccacgttaatttagacccattttttcatacttaccaactgagtctagtttaatcatgactataatcgtataaaatgattcagtcgacgtcattgcgaacgtatataaaatcatccaaattgacgtcattccaaagaggtaagcatgcttatctaagagtccgagcatactaaacaagacgacattttatttgcactccaaatcaaattttgtattgcctaaagaaaaacaatcaaactcaagtttcttaaaattaatttcattcaaactaatcactttcaatatctcacatattattcatgccatttctatttgtctaaacatgatttaaaaaaaaaagtaaaatacaaagattactatgcaaaaactctataaaaaaaaattcaaatttcttatttatttgtgacatcaaattttcaaaataatttttttaattatcggttgatccggtcagtcgataaaaacataaactttcagcgaccgttaaaactttcctactaccgatttagagaaaatcttagcttgaaacgtaattgtaacctgccttcatgcaagtcgcaagatatgtcatcctaagttgtatatgttttctcaaaagatgtatttacttgagaaaatacgtttcaacgttgatggacaaccaattaagaatcaagcacctttcgtaatcaatttaggcttatcgtctaaggtatactgatttacgacagttgactagacttataaggaacaaaataatagaatagtttctaaacacttcacctaatcatagagactaagatggtaattcgtaaacgacaaagcctagtgacactgtccattgtaaaattccacatcatattagtattaaacatatacatgtagtttcctgaacacatgtagtatcaaacacacttcgtggcttcttcctcgaaacctgcggccgcgctatagttccggacttacccttaagataacttcgtatagcatacattatacgaagttatgggcccacgcgtgaagagcggttaccagagctggtcacctttgtccaccaagatggaactgtcttcggccagaatggccatctggattcagcaggcctagaaggccatttatcgctatcaactttgtatagaaaagttgggccgaattcgagctcggtacggccagaatggcccggaccgaagcttgtgaatttatgagagctgtacttactcactaaaacaaacaaacactgatagtttaaactgaaggcgggaaacgacaatctgatcatgagcggagaattaagggagtcacgttatgacccccgccgatgacgcgggacaagccgttttacgtttggaactgacagaaccgcaacgattgaaggagccactcagccgcgggtttctggagtttaatgagctaagcacatacgtcagaaaccattattgcgcgttcaaaagtcgcctaaggtcactatcagctagcaaatatttcttgtcaaaaatgctccactgacgttccataaattcccctcggtatccaattagagtctcatattcactccccgggggatctcgactctagaggatcgctcaggaaggccgctgagatagaggcatggcggccaatgcgggcggcggtggagcgggaggaggcagcggcagcggcagcgtggctgcgccggcggtgtgccgccccagcggctcgcggtggacgccgacgccggagcagatcaggatgctgaaggagctctactacggctgcggcatccggtcgcccagctcggagcagatccagcgcatcaccgccatgctgcggcagcacggcaagatcgagggcaagaacgtcttctactggttccagaaccacaaggcccgcgagcgccagaagcgccgcctcaccagcctcgacgtcaacgtgcccgccgccggcgcggccgacgccaccaccagccaactcggcgtcctctcgctgtcgtcgccgccgccttcaggcgcggcgcctccctcgcccaccctcggcttctacgccgccggcaatggcggcggatcggctgtgctgctggacacgagttccgactggggcagcagcggcgctgccatggccaccgagacatgcttcctgcaggactacatgggcgtgacggacacgggcagctcgtcgcagtggccacgcttctcgtcgtcggacacgataatggcggcggccgcggcgcgggcggcgacgacgcgggcgcccgagacgctccctctcttcccgacctgcggcgacgacggcggcagcggtagcagcagctacttgccgttctggggtgccgcgtccacaactgccggcgccacttcttccgttgcgatccagcagcaacaccagctgcaggagcagtacagcttttacagcaacagcaacagcacccagctggccggcaccggcaaccaagacgtatcggcaacagcagcagcagccgccgccctggagctgagcctcagctcatggtgctccccttaccctgctgcagggagtatgtgagagcaacgcgagctgccactgctcttcactgatgtctctggaatggaaggaggaggaagtgagcatagcgttggtgcgttgctgtcaagggcgaattcacatggttaacctagacttgtccatcttctggattggccaacttaattaatgtatgaaataaaaggatgcacacatagtgacatgctaatcactataatgtgggcatcaaagttgtgtgttatgtgtaattactagttatctgaataaaagagaaagagatcatccatatttcttatcctaaatgaatgtcacgtgtctttataattctttgatgaaccagatgcatttcattaaccaaatccatatacatataaatattaatcatatataattaatatcaattgggttagcaaaacaaatctagtctaggtgtgttttgcgaatgcggccgccaccgcggtggagctcgaattccggtccgggcctagaaggccagcttcaagtttgtacaaaaaagcaggctccggccagaatggcccggaccgggttaccgaattcgagctcggtaccatttaaattgcgcccgccacggccgtggaggtcgtattccggtcagcttgcatccctgcagtgcagcgtgacccggtcgtgcccctctctagagataatgagcattgcatgtctaagttataaaaaattaccacatattttttttgtcacacttgtttgaagtgcagtttatctatctttatacatatatttaaactttactctacgaataatataatctatagtactacaataatatcagtgttttagagaatcatataaatgaacagttagacatggtctaaaggacaattgagtattttgacaacaggactctacagttttatctttttagtgtgcatgtgttctcctttttttttgcaaatagcttcacctatataatacttcatccattttattagtacatccatttagggtttagggttaatggtttttatagactaatttttttagtacatctattttattctattttagcctctaaattaagaaaactaaaactctattttagtttttttatttaataatttagatataaaatagaataaaataaagtgactaaaaattaaacaaataccctttaagaaattaaaaaaactaaggaaacatttttcttgtttcgagtagataatgccagcctgttaaacgccgtcgacgagtctaacggacaccaaccagcgaaccagcagcgtcgcgtcgggccaagcgaagcagacggcacggcatctctgtcgctgcctctggacccctctcgagagttccgctccaccgttggacttgctccgctgtcggcatccagaaattgcgtggcggagcggcagacgtgagccggcacggcaggcggcctcctcctcctctcacggcaccggcagctacgggggattcctttcccaccgctccttcgctttcccttcctcgcccgccgtaataaatagacaccccctccacaccctctttccccaacctcgtgttgttcggagcgcacacacacacaaccagatctcccccaaatccacccgtcggcacctccgcttcaaggtacgccgctcgtcctcccccccccccctctctaccttctctagatcggcgttccggtccatgcatggttagggcccggtagttctacttctgttcatgtttgtgttagatccgtgtttgtgttagatccgtgctgctagcgttcgtacacggatgcgacctgtacgtcagacacgttctgattgctaacttgccagtgtttctctttggggaatcctgggatggctctagccgttccgcagacgggatcgatttcatgattttttttgtttcgttgcatagggtttggtttgcccttttcctttatttcaatatatgccgtgcacttgtttgtcgggtcatcttttcatgcttttttttgtcttggttgtgatgatgtggtctggttgggcggtcgttctagatcggagtagaattctgtttcaaactacctggtggatttattaattttggatctgtatgtgtgtgccatacatattcatagttacgaattgaagatgatggatggaaatatcgatctaggataggtatacatgttgatgcgggttttactgatgcatatacagagatgctttttgttcgcttggttgtgatgatgtggtgtggttgggcggtcgttcattcgttctagatcggagtagaatactgtttcaaactacctggtgtatttattaattttggaactgtatgtgtgtgtcatacatcttcatagttacgagtttaagatggatggaaatatcgatctaggataggtatacatgttgatgtgggttttactgatgcatatacatgatggcatatgcagcatctattcatatgctctaaccttgagtacctatctattataataaacaagtatgttttataattattttgatcttgatatacttggatgatggcatatgcagcagctatatgtggatttttttagccctgccttcatacgctatttatttgcttggtactgtttcttttgtcgatgctcaccctgttgtttggtgttacttctgcaggtcgactctagaggatccatggccactgtgaacaactggctcgctttctccctctccccgcaggagctgccgccctcccagacgacggactccacactcatctcggccgccaccgccgaccatgtctccggcgatgtctgcttcaacatcccccaagattggagcatgaggggatcagagctttcggcgctcgtcgcggagccgaagctggaggacttcctcggcggcatctccttctccgagcagcatcacaaggccaactgcaacatgatacccagcactagcagcacagtttgctacgcgagctcaggtgctagcaccggctaccatcaccagctgtaccaccagcccaccagctcagcgctccacttcgcggactccgtaatggtggcttcctcggccggtgtccacgacggcggtgccatgctcagcgcggccgccgctaacggtgtcgctggcgctgccagtgccaacggcggcggcatcgggctgtccatgattaagaactggctgcggagccaaccggcgcccatgcagccgagggtggcggcggctgagggcgcgcaggggctctctttgtccatgaacatggcggggacgacccaaggcgctgctggcatgccacttctcgctggagagcgcgcacgggcgcccgagagtgtatcgacgtcagcacagggtggagccgtcgtcgtcacggcgccgaaggaggatagcggtggcagcggtgttgccggcgctctagtagccgtgagcacggacacgggtggcagcggcggcgcgtcggctgacaacacggcaaggaagacggtggacacgttcgggcagcgcacgtcgatttaccgtggcgtgacaaggcatagatggactgggagatatgaggcacatctttgggataacagttgcagaagggaagggcaaactcgtaagggtcgtcaagtctatttaggtggctatgataaagaggagaaagctgctagggcttatgatcttgctgctctgaagtactggggtgccacaacaacaacaaattttccagtgagtaactacgaaaaggagctcgaggacatgaagcacatgacaaggcaggagtttgtagcgtctctgagaaggaagagcagtggtttctccagaggtgcatccatttacaggggagtgactaggcatcaccaacatggaagatggcaagcacggattggacgagttgcagggaacaaggatctttacttgggcaccttcagcacccaggaggaggcagcggaggcgtacgacatcgcggcgatcaagttccgcggcctcaacgccgtcaccaacttcgacatgagccgctacgacgtgaagagcatcctggacagcagcgccctccccatcggcagcgccgccaagcgcctcaaggaggccgaggccgcagcgtccgcgcagcaccaccacgccggcgtggtgagctacgacgtcggccgcatcgcctcgcagctcggcgacggcggagccctggcggcggcgtacggcgcgcactaccacggcgccgcctggccgaccatcgcgttccagccgggcgccgccagcacaggcctgtaccacccgtacgcgcagcagccaatgcgcggcggcgggtggtgcaagcaggagcaggaccacgcggtgatcgcggccgcgcacagcctgcaggacctccaccacctgaacctgggcgcggccggcgcgcacgactttttctcggcagggcagcaggccgccgccgctgcgatgcacggcctgggtagcatcgacagtgcgtcgctcgagcacagcaccggctccaactccgtcgtctacaacggcggggtcggcgacagcaacggcgccagcgccgtcggcggcagtggcggtggctacatgatgccgatgagcgctgccggagcaaccactacatcggcaatggtgagccacgagcaggtgcatgcacgggcctacgacgaagccaagcaggctgctcagatggggtacgagagctacctggtgaacgcggagaacaatggtggcggaaggatgtctgcatgggggactgtcgtgtctgcagccgcggcggcagcagcaagcagcaacgacaacatggccgccgacgtcgggcatggcggcgcgcagctcttcagtgtctggaacgacacttaagcgtacgtgccggcctggctctccgaaagggcgtattccagcacactggcggccgttactagacccaacctagacttgtccatcttctggattggccaacttaattaatgtatgaaataaaaggatgcacacatagtgacatgctaatcactataatgtgggcatcaaagttgtgtgttatgtgtaattactagttatctgaataaaagagaaagagatcatccatatttcttatcctaaatgaatgtcacgtgtctttataattctttgatgaaccagatgcatttcattaaccaaatccatatacatataaatattaatcatatataattaatatcaattgggttagcaaaacaaatctagtctaggtgtgttttgcgaatgcggcctccgggcacccagctttcttgtacaaagtggccgttaacggatcggccagaatggcccggaccgggttaccgaattcgagctcggtaccctggttcacaaactcaatacaacacacagtggagtagggtattacgctccggcggcccgaaccactctaaatccttgtgtcctcgtgtgctcttccaccattaatgactgtaattgcagggacacgaagagttgtagcgcttttgccaacaagatccgctatatgctagtagagtggaacctgcacagcaacaagcatccaataatctgagaataagaattatgtgtggtgatggttctcatctctgcaactcgccattttcgcgagagaaccaaatccaagttggtgaagatcatgatttgggctcatgggctggcatagtagctattacctttgcaattgtggttcgaatctatccgatattctccttttcagggagagctaatgcttatgcttattgggtattttggtttgacactgcttcacgcccaaaaaaaggcaactatgtctgagttggatatggcccaaaaaaaggcagctatgtctgagttggatatggaagtcttctttcgtttagggtgaagtaagaccaagctcatgagcttattatcttaggtcggaacaaattagttgataggcatggcacatttatcaaattataatgattttaacagaaaagcaacacctctttttcagcagcaccagctttgcaagctgcaattgacactccaagcatagtatttgctccaaactcagcctgcatttcgcacaatatcatatctatttccatttggataaaatatattttccagaaatatgggaacagaatcaagatacagaaaaaagttgtggtagtagtggtaagtggaaacacaagtacagtgaaaagatagcattatttctgaacagtcaaattaaccgaaataagtagtatcacatactgcccctaaattgactacacccaatgtaaagaattgcttgagcatattgagccatcagttgtttgtttgtgtaacggatttgacaatgcagagttcaggagcaaaaaaccgcaaaggagagaaagagggaaaggatctcctagtatcccaccttgtggcgcgccctgtcaagtgcatgatggcctggtcgatctgcgtctgctgctgcggttccatcccaacgagtgcctccgacaccttgtcgttgatcacccgcaccgcgtaggcgacccccctggcgaggaacttccgcctctcggaggccccggccgcgtcggcggcggcgccctcgagcgcgcccacgctagccgtagatgctcggtgcacggccttgttggtgtgcaactcgacctcaacggccggtgcgctacgcccgtcaaggatctggcgcgcccgcaccctcgtgatcacggtgggcgcctcccgcctcatgtggccgacgatgaaaagcgccgggttaggggccttggcgcgcaccgccgtattcagggcctcctcgctcttgcgcgagagcaggtgcttccccaggtactcctgcactgacaaggctgccacagcggtggaatttgtcctcacgacttcgccacgtcgtcctcacctccctggcttcccacgactccgccgtatcgaggtgctcggtgggtcgtcttaatccgaagtccgaactaggaagacgagacagagaggtctgaggaatgggcctcgtttgatgttgagctgaattatttttccagcataagcccaggtcttggtccatgaacaaaattactagaaacccagcccagtactacgatctaaaagagggactgccactggatagctctctctagcattctccacgctccaatacagcggcgtcgtgtctatccgggtctatccgcgaacacgtgagaactctccagaaactgctttctcctccacttcatctctctcgctttccctctataaaaagaccccttctaggaattgagggagacagcaagcaccaagcagcgatccgaagctcaatcaattcactcaaacctcttccccaaatcttcgattagatcttcgttgacaagaagactagaaccgaacctgacatgtccaacctgctcacggttcaccagaaccttccggctcttccagtggacgcgacgtccgatgaagtcaggaagaacctcatggacatgttccgcgacaggcaagcgttcagcgagcacacctggaagatgctgctctccgtctgccgctcctgggctgcatggtgcaagctgaacaacaggaagtggttccccgctgagcccgaggacgtgagggattaccttctgtacctgcaagcgcgaggtttgtttctgcttctacctttgatatatatataataattatcattaattagtagtaatataatatttcaaatatttttttcaaaataaaagaatgtagtatatagcaattgcttttctgtagtttataagtgtgtatattttaatttataacttttctaatatatgaccaaaacatggtgatgcctaggtctggcagtgaagaccatccagcaacaccttggacaactgaacatgcttcacaggcgctccggcctcccgcgccccagcgactcgaacgccgtgagcctcgtcatgcgccgcatcaggaaggaaaacgtcgatgccggcgaaagggcaaagcaggccctcgcgttcgagaggaccgatttcgaccaggtccgcagcctgatggagaacagcgacaggtgccaggacattaggaacctggcgttcctcggaattgcatacaacacgctcctcaggatcgcggaaattgcccgcattcgcgtgaaggacattagccgcaccgacggcggcaggatgcttatccacattggcaggaccaagacgctcgtttccaccgcaggcgtcgaaaaggccctcagcctcggagtgaccaagctcgtcgaacgctggatctccgtgtccggcgtcgcggacgacccaaacaactacctcttctgccgcgtccgcaagaacggggtggctgcccctagcgccaccagccaactcagcacgagggccttggaaggtattttcgaggccacccaccgcctgatctacggcgcgaaggatgacagcggtcaacgctacctcgcatggtccgggcactccgcccgcgttggagctgctagggacatggcccgcgccggtgtttccatccccgaaatcatgcaggcgggtggatggacgaacgtgaacattgtcatgaactacattcgcaaccttgacagcgagacgggcgcaatggttcgcctcctggaagatggtgactgaggtacccaacctagacttgtccatcttctggattggccaacttaattaatgtatgaaataaaaggatgcacacatagtgacatgctaatcactataatgtgggcatcaaagttgtgtgttatgtgtaattactagttatctgaataaaagagaaagagatcatccatatttcttatcctaaatgaatgtcacgtgtctttataattctttgatgaaccagatgcatttcattaaccaaatccatatacatataaatattaatcatatataattaatatcaattgggttagcaaaacaaatctagtctaggtgtgttttgcgatccgatatcgaattggccacggtaccagctgctgctgttctagggttcacaagtctgcctatttgtcttccccaatggagctatggttgtctggtctggtccttggtcgtgtcccgtttcattgtgtactatttacctgtaatgtgtatccttaagtctggtttgatggtgtctgaaacgttttgctgtggtagagcagcatggaagaactataatgaataagtgatccctaatcattgtgtccaaattttgcttctgctatacccttttgtgctgtttcttatgttttgcttaaaaatttgatctgacaaacaaatttgtctaaattatgctcttgttctgactgtgtactgtacacatttgtattgctaccggtttggcacatagttttctctttgattgcagatcaaacccttctgattgcagattgcttggctatggctgatgtgctcactgttcttctttagcttgtatattgctgatggtggcttggctacggctgaaaaagttgctgctgcgccgacttggcaactgttgctccagtaatgctttgtcctctcttcctagccgccgacttggcacttggcagctgttgctcctgtaatgcgttgttatctcttatctcttgagatgtactatgattttgaggctgtttgacttgtgccagattgccagtgctgatgctatattatctcaggtttttatgctagtatatgttttactgtgtgctgcctgtgtcgagttacgtaatctattgaaccgctatgcgtgttgatgccctgttgttgcttgccagattgatgcccctgttgcttgcagcttgcaagctgtagtgaaatcctaaaattccaaaccaaatctattctgaacttttgaagatctgtgatgtccggaagaaaagattcaaacagataaacgggactctccagaatctataaaataaatgatcgacaaacgctttgctttggtaggcttcaagcttggtcacccggtccgggcctagaaggccagcttcggccgccccgggcaactttattatacaaagttgatagataaatcagatatctggttcctaaggacccggcggaccgattaaactgattcggtccgacgcgttacctaataacttcgtatagcatacattatacgaagttattagctaactaactagtaagcttaagccatgggtcgacggatccgttaactagcgtggcatttggcaccgccgcacactatgcgagctaggagtgctagtttacagatgaaactatgaaaccaagaaaacacaattgtccgtagctagcgcgtggcgtcgtgtcaagcttcacacagtatcttcgttcttcactataaatcgcgcctgttgttcgtgagacccaccaccgtggataacagtcccctaataataagcgatcaacagcactgctgatggctgaacaccgaggcgccgccgcgcgtaaccatccgccggagcagcccgtcgtgccggcgaacgacgccttccccgaccgcgcccagcagctctgcctcgacgccgggcgcgcgctcgcgatgtgcggcgtgctcgtcgccgtccctcccgcattttacgcgtcgacgtcgcggacgacaccgcacttgccttcgtcggcttcgtcctctggatcatcggtgcgtggctgtgcctcctggcgctcacgcccttggctccacgggcggtgagggcgggcggggccgccgccagcaccttgctgatcaggtgcctgtccctttcatgaactactagcgcccgcgcccgcggccgccgggcacaagagaacacatcgatgttcgctgcgtacgtcagcaataaggcactctttgtcagtagtcgagtgcatatgttgggtgtttgccctgggagatttcaagtgttgtggccattatcccgcaggataaaaaatcggcggcttttggattgatacggaaaataacgatgtttcatgctcgtgttgtgtgtgtgacatcttgtcagccaagtttttaaccgttgctactccccctctgtgggctcagtgtgtggaccggaatacgtcgtacataggccgtagcctaagcccaatatgccgtttttcaggttggcctgtgtgacgacaagcgggtctcaaaagcccatcacgcaactggcctgcaattattggaggagagcgcgtcgagttggttccagaggctgcgtggtggggccggactctgcgacgacctctcgttcgcgtccgatttggttgccgtgagccgtgacgtaacgcctccttccgttcctccctatataagttccacccccgggtccggtttccccaagccccagtgacccccgatcccgatcgcgaaatctccgcacccgccggcaagggaccgaagcaagcctctctcccgaccgtcgcatcaaggtacgcgtccgctcgatctgtcctcttccttctcgatttgacttgctgtggtgcccgatcacgggatcagaatcgcaccagtgtagatttcgcatgttctaagatgtgttagtttccaggctaatccagttctcttgacgcccgatccgatcgagctccgtgtttatttcagcctaatcgtagtattcccctaaaatttcctcattagggggttcgcaagattgttggtcgacaggttcacttatgctcgatcgcttacttttagtcgattcatgctgcgtactattgttgccccccgtggttttatcttttctcgtgtgaaatccagtagatatagtagatatcgtagcattaggttttaattcaatcgattgattattgtatcatcaaaattgagaagttcgaatcatgcctatcatgctgcctcaaccgaaatcctgtatattgaagtttcaattcaattgattgatcattcattagattcaaccaaaatctagaaggttagatgacgcatgtcatgctgcctgcgtagtttacctttgatctgtttatgattaccttatcagtaggatatttgtgattttgggaagtagcactaactgattcatgctgacatgatgttccctttcagattatactgttgagtcctatctaattgatgctttgtatgctatatgaatacgtcatggtaaattagcagttaattagcatattagcaattgggcgtacctcatcaggattgctcttgtagatgtgtgtggtgatgtttcttgttcaattcatgttctgctttaaaagtatgtgttctctgtttgttaattaagattcatggttataatgatttggacctaattaatcagggttgcccttttagatgcgtggttacttgttgagttcatttttttcctgctatagttgtatgcgtttgttcattcatggttagatttgatttgtttcttctctattccatgccttccatatacttcaattgtagcttaacatgagatttctgtatatgcaggtcgaccgccggggatccacacgacaccatggcccagtccaagcacggcctgaccaaggagatgaccatgaagtaccgcatggagggctgcgtggacggccacaagttcgtgatcaccggcgagggcatcggctaccccttcaagggcaagcaggccatcaacctgtgcgtggtggagggcggccccttgcccttcgccgaggacatcttgtccgccgccttcatgtacggcaaccgcgtgttcaccgagtacccccaggacatcgtcgactacttcaagaactcctgccccgccggctacacctgggaccgctccttcctgttcgaggacggcgccgtgtgcatctgcaacgccgacatcaccgtgagcgtggaggagaactgcatgtaccacgagtccaagttctacggcgtgaacttccccgccgacggccccgtgatgaagaagatgaccgacaactgggagccctcctgcgagaagatcatccccgtgcccaagcagggcatcttgaagggcgacgtgagcatgtacctgctgctgaaggacggtggccgcttgcgctgccagttcgacaccgtgtacaaggccaagtccgtgccccgcaagatgcccgactggcacttcatccagcacaagctgacccgcgaggaccgcagcgacgccaagaaccagaagtggcacctgaccgagcacgccatcgcctccggctccgccttgccctccggactcagatctcgatagagtcaacctagacttgtccatcttctggattggccaacttaattaatgtatgaaataaaaggatgcacacatagtgacatgctaatcactataatgtgggcatcaaagttgtgtgttatgtgtaattactagttatctgaataaaagagaaagagatcatccatatttcttatcctaaatgaatgtcacgtgtctttataattctttgatgaaccagatgcatttcattaaccaaatccatatacatataaatattaatcatatataattaatatcaattgggttagcaaaacaaatctagtctaggtgtgttttgcgaattgcggcgcccttactttaacgcctctaaccaacacccctttatctttataaggaacaataaacagaatttgccccactgttctaaatcacctaataatatccccagctaaaaacaataaaggtttcctagaattaagacaagcatgactgttcctccaggagggtttggaacattgttgcagtcttgcagatacgggcgaagggtgagaaacagagcggagggctggaggtgacctcggtagtcgacgccggagttgagcttgacaacgacggggcggcccctgatggacttgaggaagtccgatggcgtcttcaccgtcccgccggcgcccgaggcgggcctgtcgctgccgccgccgccgctgctcatcttgcgcgctgtgcccccggcggtgtccctgtgttgcggatcgcgggtgggccaggtggatgcgagggcgacccgtttggactccggccggagccgccggatccctggtcggtgtcagtgccgtttactctgggccccacgtgtcagtaccgtctgtagatgacaacaacccgtcgtccacagtcatgtccaaaatatcctttcttcttttttttcgattcggatatctatcttccttttttttttccaaaaatcttcttgacgcaccagcgcgcacgtttgtggtaaacgccgacacgtcggtcccacgtcgatagaccccacccaccagtgagtagcgtgtacgtattcgggggtgacggacgtgtcgccgtcgtcttgctagtcccattcccatctgagccacacatctctgaacaaaaaaaaggagggaggcctccacgcacatccccctccgtgccacccgccccaaaccctcgcgccgcctccgagacagccgccgcaaccatggccaccgccgccgccgcgtctaccgcgctcactggcgccactaccgctgcgcccaaggcgaggcgccgggcgcacctcctggccacccgccgcgccctcgccgcgcccatcaggtgctcagcggcgtcacccgccatgccgatggctcccccggccaccccgctccggccgtggggccccaccgagccccgcaagggtgctgacatcctcgtcgagtccctcgagcgctgcggcgtccgcgacgtcttcgcctaccccggcggcgcgtccatggagatccaccaggcactcacccgctcccccgtcatcgccaaccacctcttccgccacgagcaaggggaggcctttgccgcctccggctacgcgcgctcctcgggccgcgtcggcgtctgcatcgccacctccggccccggcgccaccaacctagtctccgcgctcgccgacgcgctgctcgattccgtccccatggtcgccatcacgggacaggtggcgcgacgcatgattggcaccgacgccttccaggagacgcccatcgtcgaggtcacccgctccatcaccaagcacaactacctggtcctcgacgtcgacgacatcccccgcgtcgtgcaggaggctttcttcctcgcctcctctggtcgaccagggccggtgcttgtcgacatccccaaggacatccagcagcagatggcggtgcctgtctgggacaagcccatgagtctgcctgggtacattgcgcgccttcccaagccccctgcgactgagttgcttgagcaggtgctgcgtcttgttggtgaatcgcggcgccctgttctttatgtgggcggtggctgcgcagcatctggtgaggagttgcgacgctttgtggagctgactggaatcccggtcacaactactcttatgggcctcggcaacttccccagcgacgacccactgtctctgcgcatgctaggtatgcatgggacggtgtatgcaaattatgcagtggataaggccgatctgttgcttgcacttggtgtgcggtttgatgatcgcgtgacagggaagattgaggcttttgcaagcagggctaagattgtgcacgttgatattgatccggctgagattggcaagaacaagcagccacatgtgtccatctgtgcagatgttaagcttgctttgcagggcatgaatgctcttcttgaaggaagcacatcaaagaagagctttgactttggctcatggaacgatgagttggatcagcagaagagggaattcccccttgggtataaaacatctaatgaggagatccagccacaatatgctattcaggttcttgatgagctgacgaaaggcgaggccatcatcggcacaggtgttgggcagcaccagatgtgggcggcacagtactacacttacaagcggccaaggcagtggttgtcttcagctggtcttggggctatgggatttggtttgccggctgctgctggtgcttctgtggcaaacccaggtgtcactgttgttgacatcgatggagatggtagctttctcatgaacgttcaggagctagctatgatccgaattgagaacctcccagtgaaggtctttgtgctaaacaaccagcacctggggatggtggtgcagttggaggacaggttctataaggccaacagagcgcacacatacttgggaaacccagagaatgaaagtgagatatatccagatttcgtgacgatcgccaaagggttcaacattccagcggtccgtgtgacaaagaagaacgaagtccgcgcagcgataaagaagatgctcgagactccagggccgtacctcttggatataatcgtcccacaccaggagcatgtgttgcctatgatccctagtggtggggctttcaaggatatgatcctggatggtgatggcaggactgtgtactgactagctagtcagttaacagatctgccagatcctcggtgtacaaataacccgtcttatcctatgagacgggccggcgtcagtgtgttctggaggaatttttatgtcagagcctttttctttgtgtgcttgatgtagatgccaagggaagcttattggctgttgaagcttgatgcaaaataaattatggaactctgttttttgtttatctaataataactagcaaatatgcttccattgcattgaaactaacagccttttgtgtttccaagttttattttgtgacaatgtcatctatttcaattagttgtggaatcggaaacttgcaggactaacttggaaactccaatccctcagcatcctggactttttcctggtgtaatccatgtagatattattttaatcatcattttagttctggaggtttttccatctccggttttgctcccctttcttcaaaaaaaaaaaaaaaatgccgtaggcgccgcaacgcccacctgttgttcaaactcatgggcacgagtggctcgaagattttatacaacaattgctgtagtttcaccgttgctggtgaagaagcatttttttaaaaaaatatagtggtattcattttaattagtttagttgtgcagcgagcaaaatttggacatgctctgctcggaatctgatcgacctagacacagattagcagcagtagctttgtcatctgttccaagagttgcgatctgatagaagaaaaaaaaaccttcccttcaatgtaaaaccgaaactaacaagaaagaagcacagtgccgtttaggcaagtatggagtacgtattaagcatgtagaaggccatgcatgaaccactaacaagaaagaagcgcagtgccattcaggcaagcataagcatgtagattggcatgcatgaacaactaacagtagatcgtctctggtctgattagaagttttttgggaagccaagaaatcatgtacaactggttccatctcaaattccgtggcaaaaagaggcctaagcaacatacctcgagtagatcacattcaagcttggtcacccggtccgtcaatattctgattccgatgacttcgtaggttcctagctcaagccgctcgtgtccaagcgtcacttacgattagctaatgattacggcatctaggaccgactagtggcgcgccgactagctagctaaggtaccgagctcgaattcattccgattaatcgtggcctcttgctcttcaggatgaagagctatgtttaaacgtgcaagcgctactagacaattcagtacattaaaaacgtccgcaatgtgttattaagttgtctaagcgtcaatttgtttacaccacaatatatcctgcca

SEQ ID NO: 43 - DNA, 23389 bp, synthetic construct
  misc_feature 1..23389: note = PHP95073
  source 1..23389: mol_type = other DNA
gtttacccgccaatatatcctgtcaaacactgatagtttaaactgaaggcgggaaacgacaatctgatcatgagcggagaattaagggagtcacgttatgacccccgccgatgacgcgggacaagccgttttacgtttggaactgacagaaccgcaacgttgaaggagccactcagcaagctggtacgattgtaatacgactcactatagggcgaattgagcgctgtttaaacgctcttcaactggaagagcggttacgctgtttaaacgctcttcaactggaagagcggttactaccggttcactagctagctgctaatcgagctagttaccctatgaggtgacatgaagcgctcacggttactatgacggttagcttcacgactgttggtggcagtagcgtacgacttagctatagttccggacttacccttaagcgatttaaatctgcggttaccgaattcgagctcggtacctagtacccttgtacttttggtttcacctgcatagagaaaacccacaagaatatgacagtctgatttgtcagtctcattctcaagcaacatttctctatccgttactttcatggtgaataacacaatccatcatcaatactttgtgttactcagaaactgaaagttattccgagtcttgcatatctttggacctactcgtttttctaccattattgctgattgttaagctctcgctacttgaatcggcattgttggagtgggaaggttcaaaaaattggagttatgactagttgtctctttctatgtacgatggagaaaatgaataaacaactgagaaaatggctcttgtttagttgatgatgctcttaagctttccactggttgccatatatgatttgggcatttcactttgatcttaatgggccttgtaaagcccaagactcatgattatctttagttgatgctcttaattaggtgtgggcaaataattcaaactgtatgtacccgaccaaaaccaaagcaaaaataatcgaaccaaaccgaaaatttaaaaataaccgaatgaaaactaaatcctataactgaaagaactgaaaccgaatcaaaatatttaatgtaaccaaaaatatccgaaatataattatattgtcaaaaatattaataatttctagattaaataattaaaaatacttaaaaatttatataaaatagtaaaaatactcgaaaataaccacaaatattcaaaaacaaccgaaatatcccaaaatattcaaagcaaaataaccgaatggataccaaattttaaaaccgaaaaaactggaacaaaaccaaaatcgaaccaaaatttcaaaaatcgaataaatactaaactttagaacaaaaaaaaacgataaccgaatgtatacgaaccaaagccgaattagataaccgaacgtccaggactactcttaatctttccgccacttatgatttgggctattactttgtttataatgagccttttcaagctcaagttcatgattgtccgtgagatgagaaactgacttgttggattcgaaaccctagctagtattggttaatacttaatacataaatgacctgcattgacatcatcatccaagaaaataaaaattgtatgcttgagatatttagttttcctagctaggttttctttattttagtaccgaatctttaggtgtgccacgttaatttagacccattttttcatacttaccaactgagtctagtttaatcatgactataatcgtataaaatgattcagtcgacgtcattgcgaacgtatataaaatcatccaaattgacgtcattccaaagaggtaagcatgcttatctaagagtccgagcatactaaacaagacgacattttatttgcactccaaatcaaattttgtattgcctaaagaaaaacaatcaaactcaagtttcttaaaattaatttcattcaaactaatcactttcaatatctcacatattattcatgccatttctatttgtctaaacatgatttaaaaaaaaaagtaaaatacaaagattactatgcaaaaactctataaaaaaaaattcaaatttcttatttatttgtgacatcaaattttcaaaataatttttttaattatcggttgatccggtcagtcgataaaaacataaactttcagcgaccgttaaaactttcctactaccgatttagagaaaatcttagcttgaaacgtaattgtaacctgccttcatgcaagtcgcaagatatgtcatcctaagttgtatatgttttctcaaaagatgtatttacttgagaaaatacgtttcaacgttgatggacaaccaattaagaatcaagcacctttcgtaatcaatttaggcttatcgtctaaggtatactgatttacgacagttgactagacttataaggaacaaaataatagaatagtttctaaacacttcacctaatcatagagactaagatggtaattcgtaaacgacaaagcctagtgacactgtccattgtaaaattccacatcatattagtattaaacatatacatgtagtttcctgaacacatgtagtatcaaacacacttcgtggcttcttcctcgaaacctgcggccgcgctatagttccggacttacccttaagataacttcgtatagcatacattatacgaagttatgggcccacgcgtgaagagcggttaccagagctggtcacctttgtccaccaagatggaactgtcttcggccagaatggccatctggattcagcaggcctagaaggccatttatcgctatcaactttgtatagaaaagttgggccgaattcgagctcggtacggccagaatggcccggaccgaagcttttcgttaccaactgggttgcataggatttcatgattaagagtgtgtttggtttagctgtgagttttctcctatgaaaaaactgttgtgagaaaaaatagttggaagtcgtttagttcaaactgttgtgagttatccactgtaaacaaattgtatattgtttatatacactctgtttaaatatatctcttaatcagtatatataattaaaaaactaatttcacatttgtgttcctaatattttttacaaataaatcattgtttaattccatttgtaataagtttttattaaaattgcttttatttcatttattataaacatttaattgttttaatcctattttagttttaatttattgtatctatttattaatataacgaacttcgataagaaacaaaagcaaggtcaaggtgttttttcaaagtagttgtggaaaagctgaaccccttttattcaacttttagaagcaggaaaacagaaccaaacagaccctaaaaatgtgtgaatttttagcaggttaattattcgcatctctttggtcatgtttaagaggctggaatagatcaactgcaagaacacatagcagagtggatagggggggggggggggagggtcgtcgtctccctatctgacctctcttctgcattggattgcctttttcggtactctatttaaaacttaaaagtacaaatgaggtgccggattgatggagtgatatataagtttgatgtgtttttcacataagtgacaagtattattgaaagagaacatttgcattgctactgtttgcatatgggaaaattgagaattgtatcatgccttggccgatcagttctttacttagctcgatgtaatgcacaatgttgatagtatgtcgaggatctagcgatgtaatggtgttaggacacgtggttagctactaatataaatgtaaggtcattcgatggtttttctattttcaattacctagcattatctcatttctaattgtgataacaaatgcattagaccataattctgtaaatatgtacatttaagcacacagtctatattttaaaattcttctttttgtgtggatatcccaacccaaatccacctctctcttcaatccgtgcatgttcaccgctgccaagtgccaacaacacatcgcatcgtgcatatctttgttggcttgtgcacggtcggcgccaatggaggagacacctgtacggtgcccttggtagaacaacatccttatccctatatgtatggtgcccttcgtagaatgacaccccttatccctacaatagccatgtatgcataccaagaattaaatatactttttcttgaaccacaataatttattatagcggcacttcttgttcaggttgaacacttatttggaacaataaaatgccgagttcctaaccacaggttcacttttttttttccttatcctcctaggaaactaaattttaaaatcataaatttaatttaaatgttaatggaaacaaaaaattatctacaaagacgactcttagccacagccgcctcactgcaccctcaaccacatcctgcaaacagacaccctcgccacatccctccagattcttcactccgatgcagcctacttgctaacagacgccctctccacatcctgcaaagcattcctccaaattcttgcgatcccccgaatccagcattaactgctaagggacgccctctccacatcctgctacccaattagccaacggaataacacaagaaggcaggtgagcagtgacaaagcacgtcaacagcaccgagccaagccaaaaaggagcaaggaggagcaagcccaagccgcagccgcagctctccaggtccccttgcgattgccgccagcagtagcagacacccctctccacatcccctccggccgctaacagcagcaagccaagccaaaaaggagcctcagccgcagccggttccgttgcggttaccgccgatcacatgcccaaggccgcgcctttccgaacgccgagggccgcccgttcccgtgcacagccacacacacacccgcccgccaacgactccccatccctatttgaacccacccgcgcactgcattgatcaccaatcgcatcgcagcagcacgagcagcacgccgtgccgctccaaccatctcgcttccgtgcttagcttccccccgggggatctcgactctagaggatcgctcaggaaggccgctgagatagaggcatggcggccaatgcgggcggcggtggagcgggaggaggcagcggcagcggcagcgtggctgcgccggcggtgtgccgccccagcggctcgcggtggacgccgacgccggagcagatcaggatgctgaaggagctctactacggctgcggcatccggtcgcccagctcggagcagatccagcgcatcaccgccatgctgcggcagcacggcaagatcgagggcaagaacgtcttctactggttccagaaccacaaggcccgcgagcgccagaagcgccgcctcaccagcctcgacgtcaacgtgcccgccgccggcgcggccgacgccaccaccagccaactcggcgtcctctcgctgtcgtcgccgccgccttcaggcgcggcgcctccctcgcccaccctcggcttctacgccgccggcaatggcggcggatcggctgtgctgctggacacgagttccgactggggcagcagcggcgctgccatggccaccgagacatgcttcctgcaggactacatgggcgtgacggacacgggcagctcgtcgcagtggccacgcttctcgtcgtcggacacgataatggcggcggccgcggcgcgggcggcgacgacgcgggcgcccgagacgctccctctcttcccgacctgcggcgacgacggcggcagcggtagcagcagctacttgccgttctggggtgccgcgtccacaactgccggcgccacttcttccgttgcgatccagcagcaacaccagctgcaggagcagtacagcttttacagcaacagcaacagcacccagctggccggcaccggcaaccaagacgtatcggcaacagcagcagcagccgccgccctggagctgagcctcagctcatggtgctccccttaccctgctgcagggagtatgtgagagcaacgcgagctgccactgctcttcactgatgtctctggaatggaaggaggaggaagtgagcatagcgttggtgcgttgctgtcaagggcgaattcacatggttaacctagacttgtccatcttctggattggccaacttaattaatgtatgaaataaaaggatgcacacatagtgacatgctaatcactataatgtgggcatcaaagttgtgtgttatgtgtaattactagttatctgaataaaagagaaagagatcatccatatttcttatcctaaatgaatgtcacgtgtctttataattctttgatgaaccagatgcatttcattaaccaaatccatatacatataaatattaatcatatataattaatatcaattgggttagcaaaacaaatctagtctaggtgtgttttgcgaatgcggccgccaccgcggtggagctcgaattccggtccgggcctagaaggccagcttcaagtttgtacaaaaaagcaggctccggccagaatggcccggaccgggttaccgaattcgagctcggtaccatttaaattgcgcccgccacggccgtggaggtcgtattccggtcagcttgcatccctgcagtgcagcgtgacccggtcgtgcccctctctagagataatgagcattgcatgtctaagttataaaaaattaccacatattttttttgtcacacttgtttgaagtgcagtttatctatctttatacatatatttaaactttactctacgaataatataatctatagtactacaataatatcagtgttttagagaatcatataaatgaacagttagacatggtctaaaggacaattgagtattttgacaacaggactctacagttttatctttttagtgtgcatgtgttctcctttttttttgcaaatagcttcacctatataatacttcatccattttattagtacatccatttagggtttagggttaatggtttttatagactaatttttttagtacatctattttattctattttagcctctaaattaagaaaactaaaactctattttagtttttttatttaataatttagatataaaatagaataaaataaagtgactaaaaattaaacaaataccctttaagaaattaaaaaaactaaggaaacatttttcttgtttcgagtagataatgccagcctgttaaacgccgtcgacgagtctaacggacaccaaccagcgaaccagcagcgtcgcgtcgggccaagcgaagcagacggcacggcatctctgtcgctgcctctggacccctctcgagagttccgctccaccgttggacttgctccgctgtcggcatccagaaattgcgtggcggagcggcagacgtgagccggcacggcaggcggcctcctcctcctctcacggcaccggcagctacgggggattcctttcccaccgctccttcgctttcccttcctcgcccgccgtaataaatagacaccccctccacaccctctttccccaacctcgtgttgttcggagcgcacacacacacaaccagatctcccccaaatccacccgtcggcacctccgcttcaaggtacgccgctcgtcctcccccccccccctctctaccttctctagatcggcgttccggtccatgcatggttagggcccggtagttctacttctgttcatgtttgtgttagatccgtgtttgtgttagatccgtgctgctagcgttcgtacacggatgcgacctgtacgtcagacacgttctgattgctaacttgccagtgtttctctttggggaatcctgggatggctctagccgttccgcagacgggatcgatttcatgattttttttgtttcgttgcatagggtttggtttgcccttttcctttatttcaatatatgccgtgcacttgtttgtcgggtcatcttttcatgcttttttttgtcttggttgtgatgatgtggtctggttgggcggtcgttctagatcggagtagaattctgtttcaaactacctggtggatttattaattttggatctgtatgtgtgtgccatacatattcatagttacgaattgaagatgatggatggaaatatcgatctaggataggtatacatgttgatgcgggttttactgatgcatatacagagatgctttttgttcgcttggttgtgatgatgtggtgtggttgggcggtcgttcattcgttctagatcggagtagaatactgtttcaaactacctggtgtatttattaattttggaactgtatgtgtgtgtcatacatcttcatagttacgagtttaagatggatggaaatatcgatctaggataggtatacatgttgatgtgggttttactgatgcatatacatgatggcatatgcagcatctattcatatgctctaaccttgagtacctatctattataataaacaagtatgttttataattattttgatcttgatatacttggatgatggcatatgcagcagctatatgtggatttttttagccctgccttcatacgctatttatttgcttggtactgtttcttttgtcgatgctcaccctgttgtttggtgttacttctgcaggtcgactctagaggatccatggccactgtgaacaactggctcgctttctccctctccccgcaggagctgccgccctcccagacgacggactccacactcatctcggccgccaccgccgaccatgtctccggcgatgtctgcttcaacatcccccaagattggagcatgaggggatcagagctttcggcgctcgtcgcggagccgaagctggaggacttcctcggcggcatctccttctccgagcagcatcacaaggccaactgcaacatgatacccagcactagcagcacagtttgctacgcgagctcaggtgctagcaccggctaccatcaccagctgtaccaccagcccaccagctcagcgctccacttcgcggactccgtaatggtggcttcctcggccggtgtccacgacggcggtgccatgctcagcgcggccgccgctaacggtgtcgctggcgctgccagtgccaacggcggcggcatcgggctgtccatgattaagaactggctgcggagccaaccggcgcccatgcagccgagggtggcggcggctgagggcgcgcaggggctctctttgtccatgaacatggcggggacgacccaaggcgctgctggcatgccacttctcgctggagagcgcgcacgggcgcccgagagtgtatcgacgtcagcacagggtggagccgtcgtcgtcacggcgccgaaggaggatagcggtggcagcggtgttgccggcgctctagtagccgtgagcacggacacgggtggcagcggcggcgcgtcggctgacaacacggcaaggaagacggtggacacgttcgggcagcgcacgtcgatttaccgtggcgtgacaaggcatagatggactgggagatatgaggcacatctttgggataacagttgcagaagggaagggcaaactcgtaagggtcgtcaagtctatttaggtggctatgataaagaggagaaagctgctagggcttatgatcttgctgctctgaagtactggggtgccacaacaacaacaaattttccagtgagtaactacgaaaaggagctcgaggacatgaagcacatgacaaggcaggagtttgtagcgtctctgagaaggaagagcagtggtttctccagaggtgcatccatttacaggggagtgactaggcatcaccaacatggaagatggcaagcacggattggacgagttgcagggaacaaggatctttacttgggcaccttcagcacccaggaggaggcagcggaggcgtacgacatcgcggcgatcaagttccgcggcctcaacgccgtcaccaacttcgacatgagccgctacgacgtgaagagcatcctggacagcagcgccctccccatcggcagcgccgccaagcgcctcaaggaggccgaggccgcagcgtccgcgcagcaccaccacgccggcgtggtgagctacgacgtcggccgcatcgcctcgcagctcggcgacggcggagccctggcggcggcgtacggcgcgcactaccacggcgccgcctggccgaccatcgcgttccagccgggcgccgccagcacaggcctgtaccacccgtacgcgcagcagccaatgcgcggcggcgggtggtgcaagcaggagcaggaccacgcggtgatcgcggccgcgcacagcctgcaggacctccaccacctgaacctgggcgcggccggcgcgcacgactttttctcggcagggcagcaggccgccgccgctgcgatgcacggcctgggtagcatcgacagtgcgtcgctcgagcacagcaccggctccaactccgtcgtctacaacggcggggtcggcgacagcaacggcgccagcgccgtcggcggcagtggcggtggctacatgatgccgatgagcgctgccggagcaaccactacatcggcaatggtgagccacgagcaggtgcatgcacgggcctacgacgaagccaagcaggctgctcagatggggtacgagagctacctggtgaacgcggagaacaatggtggcggaaggatgtctgcatgggggactgtcgtgtctgcagccgcggcggcagcagcaagcagcaacgacaacatggccgccgacgtcgggcatggcggcgcgcagctcttcagtgtctggaacgacacttaagcgtacgtgccggcctggctctccgaaagggcgtattccagcacactggcggccgttactagacccaacctagacttgtccatcttctggattggccaacttaattaatgtatgaaataaaaggatgcacacatagtgacatgctaatcactataatgtgggcatcaaagttgtgtgttatgtgtaattactagttatctgaataaaagagaaagagatcatccatatttcttatcctaaatgaatgtcacgtgtctttataattctttgatgaaccagatgcatttcattaaccaaatccatatacatataaatattaatcatatataattaatatcaattgggttagcaaaacaaatctagtctaggtgtgttttgcgaatgcggcctccgggcacccagctttcttgtacaaagtggccgttaacggatcggccagaatggcccggaccgggttaccgaattcgagctcggtaccctggttcacaaactcaatacaacacacagtggagtagggtattacgctccggcggcccgaaccactctaaatccttgtgtcctcgtgtgctcttccaccattaatgactgtaattgcagggacacgaagagttgtagcgcttttgccaacaagatccgctatatgctagtagagtggaacctgcacagcaacaagcatccaataatctgagaataagaattatgtgtggtgatggttctcatctctgcaactcgccattttcgcgagagaaccaaatccaagttggtgaagatcatgatttgggctcatgggctggcatagtagctattacctttgcaattgtggttcgaatctatccgatattctccttttcagggagagctaatgcttatgcttattgggtattttggtttgacactgcttcacgcccaaaaaaaggcaactatgtctgagttggatatggcccaaaaaaaggcagctatgtctgagttggatatggaagtcttctttcgtttagggtgaagtaagaccaagctcatgagcttattatcttaggtcggaacaaattagttgataggcatggcacatttatcaaattataatgattttaacagaaaagcaacacctctttttcagcagcaccagctttgcaagctgcaattgacactccaagcatagtatttgctccaaactcagcctgcatttcgcacaatatcatatctatttccatttggataaaatatattttccagaaatatgggaacagaatcaagatacagaaaaaagttgtggtagtagtggtaagtggaaacacaagtacagtgaaaagatagcattatttctgaacagtcaaattaaccgaaataagtagtatcacatactgcccctaaattgactacacccaatgtaaagaattgcttgagcatattgagccatcagttgtttgtttgtgtaacggatttgacaatgcagagttcaggagcaaaaaaccgcaaaggagagaaagagggaaaggatctcctagtatcccaccttgtggcgcgccctgtcaagtgcatgatggcctggtcgatctgcgtctgctgctgcggttccatcccaacgagtgcctccgacaccttgtcgttgatcacccgcaccgcgtaggcgacccccctggcgaggaacttccgcctctcggaggccccggccgcgtcggcggcggcgccctcgagcgcgcccacgctagccgtagatgctcggtgcacggccttgttggtgtgcaactcgacctcaacggccggtgcgctacgcccgtcaaggatctggcgcgcccgcaccctcgtgatcacggtgggcgcctcccgcctcatgtggccgacgatgaaaagcgccgggttaggggccttggcgcgcaccgccgtattcagggcctcctcgctcttgcgcgagagcaggtgcttccccaggtactcctgcactgacaaggctgccacagcggtggaatttgtcctcacgacttcgccacgtcgtcctcacctccctggcttcccacgactccgccgtatcgaggtgctcggtgggtcgtcttaatccgaagtccgaactaggaagacgagacagagaggtctgaggaatgggcctcgtttgatgttgagctgaattatttttccagcataagcccaggtcttggtccatgaacaaaattactagaaacccagcccagtactacgatctaaaagagggactgccactggatagctctctctagcattctccacgctccaatacagcggcgtcgtgtctatccgggtctatccgcgaacacgtgagaactctccagaaactgctttctcctccacttcatctctctcgctttccctctataaaaagaccccttctaggaattgagggagacagcaagcaccaagcagcgatccgaagctcaatcaattcactcaaacctcttccccaaatcttcgattagatcttcgttgacaagaagactagaaccgaacctgacatgtccaacctgctcacggttcaccagaaccttccggctcttccagtggacgcgacgtccgatgaagtcaggaagaacctcatggacatgttccgcgacaggcaagcgttcagcgagcacacctggaagatgctgctctccgtctgccgctcctgggctgcatggtgcaagctgaacaacaggaagtggttccccgctgagcccgaggacgtgagggattaccttctgtacctgcaagcgcgaggtttgtttctgcttctacctttgatatatatataataattatcattaattagtagtaatataatatttcaaatatttttttcaaaataaaagaatgtagtatatagcaattgcttttctgtagtttataagtgtgtatattttaatttataacttttctaatatatgaccaaaacatggtgatgcctaggtctggcagtgaagaccatccagcaacaccttggacaactgaacatgcttcacaggcgctccggcctcccgcgccccagcgactcgaacgccgtgagcctcgtcatgcgccgcatcaggaaggaaaacgtcgatgccggcgaaagggcaaagcaggccctcgcgttcgagaggaccgatttcgaccaggtccgcagcctgatggagaacagcgacaggtgccaggacattaggaacctggcgttcctcggaattgcatacaacacgctcctcaggatcgcggaaattgcccgcattcgcgtgaaggacattagccgcaccgacggcggcaggatgcttatccacattggcaggaccaagacgctcgtttccaccgcaggcgtcgaaaaggccctcagcctcggagtgaccaagctcgtcgaacgctggatctccgtgtccggcgtcgcggacgacccaaacaactacctcttctgccgcgtccgcaagaacggggtggctgcccctagcgccaccagccaactcagcacgagggccttggaaggtattttcgaggccacccaccgcctgatctacggcgcgaaggatgacagcggtcaacgctacctcgcatggtccgggcactccgcccgcgttggagctgctagggacatggcccgcgccggtgtttccatccccgaaatcatgcaggcgggtggatggacgaacgtgaacattgtcatgaactacattcgcaaccttgacagcgagacgggcgcaatggttcgcctcctggaagatggtgactgaggtacccaacctagacttgtccatcttctggattggccaacttaattaatgtatgaaataaaaggatgcacacatagtgacatgctaatcactataatgtgggcatcaaagttgtgtgttatgtgtaattactagttatctgaataaaagagaaagagatcatccatatttcttatcctaaatgaatgtcacgtgtctttataattctttgatgaaccagatgcatttcattaaccaaatccatatacatataaatattaatcatatataattaatatcaattgggttagcaaaacaaatctagtctaggtgtgttttgcgatccgatatcgaattggccacggtaccagctgctgctgttctagggttcacaagtctgcctatttgtcttccccaatggagctatggttgtctggtctggtccttggtcgtgtcccgtttcattgtgtactatttacctgtaatgtgtatccttaagtctggtttgatggtgtctgaaacgttttgctgtggtagagcagcatggaagaactataatgaataagtgatccctaatcattgtgtccaaattttgcttctgctatacccttttgtgctgtttcttatgttttgcttaaaaatttgatctgacaaacaaatttgtctaaattatgctcttgttctgactgtgtactgtacacatttgtattgctaccggtttggcacatagttttctctttgattgcagatcaaacccttctgattgcagattgcttggctatggctgatgtgctcactgttcttctttagcttgtatattgctgatggtggcttggctacggctgaaaaagttgctgctgcgccgacttggcaactgttgctccagtaatgctttgtcctctcttcctagccgccgacttggcacttggcagctgttgctcctgtaatgcgttgttatctcttatctcttgagatgtactatgattttgaggctgtttgacttgtgccagattgccagtgctgatgctatattatctcaggtttttatgctagtatatgttttactgtgtgctgcctgtgtcgagttacgtaatctattgaaccgctatgcgtgttgatgccctgttgttgcttgccagattgatgcccctgttgcttgcagcttgcaagctgtagtgaaatcctaaaattccaaaccaaatctattctgaacttttgaagatctgtgatgtccggaagaaaagattcaaacagataaacgggactctccagaatctataaaataaatgatcgacaaacgctttgctttggtaggcttcaagcttggtcacccggtccgggcctagaaggccagcttcggccgccccgggcaactttattatacaaagttgatagataaatcagatatctggttcctaaggacccggcggaccgattaaactgattcggtccgacgcgttacctaataacttcgtatagcatacattatacgaagttattagctaactaactagtaagcttaagccatgggtcgacggatccgttaactagcgtggcatttggcaccgccgcacactatgcgagctaggagtgctagtttacagatgaaactatgaaaccaagaaaacacaattgtccgtagctagcgcgtggcgtcgtgtcaagcttcacacagtatcttcgttcttcactataaatcgcgcctgttgttcgtgagacccaccaccgtggataacagtcccctaataataagcgatcaacagcactgctgatggctgaacaccgaggcgccgccgcgcgtaaccatccgccggagcagcccgtcgtgccggcgaacgacgccttccccgaccgcgcccagcagctctgcctcgacgccgggcgcgcgctcgcgatgtgcggcgtgctcgtcgccgtccctcccgcattttacgcgtcgacgtcgcggacgacaccgcacttgccttcgtcggcttcgtcctctggatcatcggtgcgtggctgtgcctcctggcgctcacgcccttggctccacgggcggtgagggcgggcggggccgccgccagcaccttgctgatcaggtgcctgtccctttcatgaactactagcgcccgcgcccgcggccgccgggcacaagagaacacatcgatgttcgctgcgtacgtcagcaataaggcactctttgtcagtagtcgagtgcatatgttgggtgtttgccctgggagatttcaagtgttgtggccattatcccgcaggataaaaaatcggcggcttttggattgatacggaaaataacgatgtttcatgctcgtgttgtgtgtgtgacatcttgtcagccaagtttttaaccgttgctactccccctctgtgggctcagtgtgtggaccggaatacgtcgtacataggccgtagcctaagcccaatatgccgtttttcaggttggcctgtgtgacgacaagcgggtctcaaaagcccatcacgcaactggcctgcaattattggaggagagcgcgtcgagttggttccagaggctgcgtggtggggccggactctgcgacgacctctcgttcgcgtccgatttggttgccgtgagccgtgacgtaacgcctccttccgttcctccctatataagttccacccccgggtccggtttccccaagccccagtgacccccgatcccgatcgcgaaatctccgcacccgccggcaagggaccgaagcaagcctctctcccgaccgtcgcatcaaggtacgcgtccgctcgatctgtcctcttccttctcgatttgacttgctgtggtgcccgatcacgggatcagaatcgcaccagtgtagatttcgcatgttctaagatgtgttagtttccaggctaatccagttctcttgacgcccgatccgatcgagctccgtgtttatttcagcctaatcgtagtattcccctaaaatttcctcattagggggttcgcaagattgttggtcgacaggttcacttatgctcgatcgcttacttttagtcgattcatgctgcgtactattgttgccccccgtggttttatcttttctcgtgtgaaatccagtagatatagtagatatcgtagcattaggttttaattcaatcgattgattattgtatcatcaaaattgagaagttcgaatcatgcctatcatgctgcctcaaccgaaatcctgtatattgaagtttcaattcaattgattgatcattcattagattcaaccaaaatctagaaggttagatgacgcatgtcatgctgcctgcgtagtttacctttgatctgtttatgattaccttatcagtaggatatttgtgattttgggaagtagcactaactgattcatgctgacatgatgttccctttcagattatactgttgagtcctatctaattgatgctttgtatgctatatgaatacgtcatggtaaattagcagttaattagcatattagcaattgggcgtacctcatcaggattgctcttgtagatgtgtgtggtgatgtttcttgttcaattcatgttctgctttaaaagtatgtgttctctgtttgttaattaagattcatggttataatgatttggacctaattaatcagggttgcccttttagatgcgtggttacttgttgagttcatttttttcctgctatagttgtatgcgtttgttcattcatggttagatttgatttgtttcttctctattccatgccttccatatacttcaattgtagcttaacatgagatttctgtatatgcaggtcgaccgccggggatccacacgacaccatggcccagtccaagcacggcctgaccaaggagatgaccatgaagtaccgcatggagggctgcgtggacggccacaagttcgtgatcaccggcgagggcatcggctaccccttcaagggcaagcaggccatcaacctgtgcgtggtggagggcggccccttgcccttcgccgaggacatcttgtccgccgccttcatgtacggcaaccgcgtgttcaccgagtacccccaggacatcgtcgactacttcaagaactcctgccccgccggctacacctgggaccgctccttcctgttcgaggacggcgccgtgtgcatctgcaacgccgacatcaccgtgagcgtggaggagaactgcatgtaccacgagtccaagttctacggcgtgaacttccccgccgacggccccgtgatgaagaagatgaccgacaactgggagccctcctgcgagaagatcatccccgtgcccaagcagggcatcttgaagggcgacgtgagcatgtacctgctgctgaaggacggtggccgcttgcgctgccagttcgacaccgtgtacaaggccaagtccgtgccccgcaagatgcccgactggcacttcatccagcacaagctgacccgcgaggaccgcagcgacgccaagaaccagaagtggcacctgaccgagcacgccatcgcctccggctccgccttgccctccggactcagatctcgatagagtcaacctagacttgtccatcttctggattggccaacttaattaatgtatgaaataaaaggatgcacacatagtgacatgctaatcactataatgtgggcatcaaagttgtgtgttatgtgtaattactagttatctgaataaaagagaaagagatcatccatatttcttatcctaaatgaatgtcacgtgtctttataattctttgatgaaccagatgcatttcattaaccaaatccatatacatataaatattaatcatatataattaatatcaattgggttagcaaaacaaatctagtctaggtgtgttttgcgaattgcggcgcccttactttaacgcctctaaccaacacccctttatctttataaggaacaataaacagaatttgccccactgttctaaatcacctaataatatccccagctaaaaacaataaaggtttcctagaattaagacaagcatgactgttcctccaggagggtttggaacattgttgcagtcttgcagatacgggcgaagggtgagaaacagagcggagggctggaggtgacctcggtagtcgacgccggagttgagcttgacaacgacggggcggcccctgatggacttgaggaagtccgatggcgtcttcaccgtcccgccggcgcccgaggcgggcctgtcgctgccgccgccgccgctgctcatcttgcgcgctgtgcccccggcggtgtccctgtgttgcggatcgcgggtgggccaggtggatgcgagggcgacccgtttggactccggccggagccgccggatccctggtcggtgtcagtgccgtttactctgggccccacgtgtcagtaccgtctgtagatgacaacaacccgtcgtccacagtcatgtccaaaatatcctttcttcttttttttcgattcggatatctatcttccttttttttttccaaaaatcttcttgacgcaccagcgcgcacgtttgtggtaaacgccgacacgtcggtcccacgtcgatagaccccacccaccagtgagtagcgtgtacgtattcgggggtgacggacgtgtcgccgtcgtcttgctagtcccattcccatctgagccacacatctctgaacaaaaaaaaggagggaggcctccacgcacatccccctccgtgccacccgccccaaaccctcgcgccgcctccgagacagccgccgcaaccatggccaccgccgccgccgcgtctaccgcgctcactggcgccactaccgctgcgcccaaggcgaggcgccgggcgcacctcctggccacccgccgcgccctcgccgcgcccatcaggtgctcagcggcgtcacccgccatgccgatggctcccccggccaccccgctccggccgtggggccccaccgagccccgcaagggtgctgacatcctcgtcgagtccctcgagcgctgcggcgtccgcgacgtcttcgcctaccccggcggcgcgtccatggagatccaccaggcactcacccgctcccccgtcatcgccaaccacctcttccgccacgagcaaggggaggcctttgccgcctccggctacgcgcgctcctcgggccgcgtcggcgtctgcatcgccacctccggccccggcgccaccaacctagtctccgcgctcgccgacgcgctgctcgattccgtccccatggtcgccatcacgggacaggtggcgcgacgcatgattggcaccgacgccttccaggagacgcccatcgtcgaggtcacccgctccatcaccaagcacaactacctggtcctcgacgtcgacgacatcccccgcgtcgtgcaggaggctttcttcctcgcctcctctggtcgaccagggccggtgcttgtcgacatccccaaggacatccagcagcagatggcggtgcctgtctgggacaagcccatgagtctgcctgggtacattgcgcgccttcccaagccccctgcgactgagttgcttgagcaggtgctgcgtcttgttggtgaatcgcggcgccctgttctttatgtgggcggtggctgcgcagcatctggtgaggagttgcgacgctttgtggagctgactggaatcccggtcacaactactcttatgggcctcggcaacttccccagcgacgacccactgtctctgcgcatgctaggtatgcatgggacggtgtatgcaaattatgcagtggataaggccgatctgttgcttgcacttggtgtgcggtttgatgatcgcgtgacagggaagattgaggcttttgcaagcagggctaagattgtgcacgttgatattgatccggctgagattggcaagaacaagcagccacatgtgtccatctgtgcagatgttaagcttgctttgcagggcatgaatgctcttcttgaaggaagcacatcaaagaagagctttgactttggctcatggaacgatgagttggatcagcagaagagggaattcccccttgggtataaaacatctaatgaggagatccagccacaatatgctattcaggttcttgatgagctgacgaaaggcgaggccatcatcggcacaggtgttgggcagcaccagatgtgggcggcacagtactacacttacaagcggccaaggcagtggttgtcttcagctggtcttggggctatgggatttggtttgccggctgctgctggtgcttctgtggcaaacccaggtgtcactgttgttgacatcgatggagatggtagctttctcatgaacgttcaggagctagctatgatccgaattgagaacctcccagtgaaggtctttgtgctaaacaaccagcacctggggatggtggtgcagttggaggacaggttctataaggccaacagagcgcacacatacttgggaaacccagagaatgaaagtgagatatatccagatttcgtgacgatcgccaaagggttcaacattccagcggtccgtgtgacaaagaagaacgaagtccgcgcagcgataaagaagatgctcgagactccagggccgtacctcttggatataatcgtcccacaccaggagcatgtgttgcctatgatccctagtggtggggctttcaaggatatgatcctggatggtgatggcaggactgtgtactgactagctagtcagttaacagatctgccagatcctcggtgtacaaataacccgtcttatcctatgagacgggccggcgtcagtgtgttctggaggaatttttatgtcagagcctttttctttgtgtgcttgatgtagatgccaagggaagcttattggctgttgaagcttgatgcaaaataaattatggaactctgttttttgtttatctaataataactagcaaatatgcttccattgcattgaaactaacagccttttgtgtttccaagttttattttgtgacaatgtcatctatttcaattagttgtggaatcggaaacttgcaggactaacttggaaactccaatccctcagcatcctggactttttcctggtgtaatccatgtagatattattttaatcatcattttagttctggaggtttttccatctccggttttgctcccctttcttcaaaaaaaaaaaaaaaatgccgtaggcgccgcaacgcccacctgttgttcaaactcatgggcacgagtggctcgaagattttatacaacaattgctgtagtttcaccgttgctggtgaagaagcatttttttaaaaaaatatagtggtattcattttaattagtttagttgtgcagcgagcaaaatttggacatgctctgctcggaatctgatcgacctagacacagattagcagcagtagctttgtcatctgttccaagagttgcgatctgatagaagaaaaaaaaaccttcccttcaatgtaaaaccgaaactaacaagaaagaagcacagtgccgtttaggcaagtatggagtacgtattaagcatgtagaaggccatgcatgaaccactaacaagaaagaagcgcagtgccattcaggcaagcataagcatgtagattggcatgcatgaacaactaacagtagatcgtctctggtctgattagaagttttttgggaagccaagaaatcatgtacaactggttccatctcaaattccgtggcaaaaagaggcctaagcaacatacctcgagtagatcacattcaagcttggtcacccggtccgtcaatattctgattccgatgacttcgtaggttcctagctcaagccgctcgtgtccaagcgtcacttacgattagctaatgattacggcatctaggaccgactagtggcgcgccgactagctagctaaggtaccgagctcgaattcattccgattaatcgtggcctcttgctcttcaggatgaagagctatgtttaaacgtgcaagcgctactagacaattcagtacattaaaaacgtccgcaatgtgttattaagttgtctaagcgtcaatttgtttacaccacaatatatcctgcca

SEQ ID NO: 44 - DNA, 23291 bp, synthetic construct
  misc_feature 1..23291: note = PHP95074
  source 1..23291: mol_type = other DNA
gtttacccgccaatatatcctgtcaaacactgatagtttaaactgaaggcgggaaacgacaatctgatcatgagcggagaattaagggagtcacgttatgacccccgccgatgacgcgggacaagccgttttacgtttggaactgacagaaccgcaacgttgaaggagccactcagcaagctggtacgattgtaatacgactcactatagggcgaattgagcgctgtttaaacgctcttcaactggaagagcggttacgctgtttaaacgctcttcaactggaagagcggttactaccggttcactagctagctgctaatcgagctagttaccctatgaggtgacatgaagcgctcacggttactatgacggttagcttcacgactgttggtggcagtagcgtacgacttagctatagttccggacttacccttaagcgatttaaatctgcggttaccgaattcgagctcggtacctagtacccttgtacttttggtttcacctgcatagagaaaacccacaagaatatgacagtctgatttgtcagtctcattctcaagcaacatttctctatccgttactttcatggtgaataacacaatccatcatcaatactttgtgttactcagaaactgaaagttattccgagtcttgcatatctttggacctactcgtttttctaccattattgctgattgttaagctctcgctacttgaatcggcattgttggagtgggaaggttcaaaaaattggagttatgactagttgtctctttctatgtacgatggagaaaatgaataaacaactgagaaaatggctcttgtttagttgatgatgctcttaagctttccactggttgccatatatgatttgggcatttcactttgatcttaatgggccttgtaaagcccaagactcatgattatctttagttgatgctcttaattaggtgtgggcaaataattcaaactgtatgtacccgaccaaaaccaaagcaaaaataatcgaaccaaaccgaaaatttaaaaataaccgaatgaaaactaaatcctataactgaaagaactgaaaccgaatcaaaatatttaatgtaaccaaaaatatccgaaatataattatattgtcaaaaatattaataatttctagattaaataattaaaaatacttaaaaatttatataaaatagtaaaaatactcgaaaataaccacaaatattcaaaaacaaccgaaatatcccaaaatattcaaagcaaaataaccgaatggataccaaattttaaaaccgaaaaaactggaacaaaaccaaaatcgaaccaaaatttcaaaaatcgaataaatactaaactttagaacaaaaaaaaacgataaccgaatgtatacgaaccaaagccgaattagataaccgaacgtccaggactactcttaatctttccgccacttatgatttgggctattactttgtttataatgagccttttcaagctcaagttcatgattgtccgtgagatgagaaactgacttgttggattcgaaaccctagctagtattggttaatacttaatacataaatgacctgcattgacatcatcatccaagaaaataaaaattgtatgcttgagatatttagttttcctagctaggttttctttattttagtaccgaatctttaggtgtgccacgttaatttagacccattttttcatacttaccaactgagtctagtttaatcatgactataatcgtataaaatgattcagtcgacgtcattgcgaacgtatataaaatcatccaaattgacgtcattccaaagaggtaagcatgcttatctaagagtccgagcatactaaacaagacgacattttatttgcactccaaatcaaattttgtattgcctaaagaaaaacaatcaaactcaagtttcttaaaattaatttcattcaaactaatcactttcaatatctcacatattattcatgccatttctatttgtctaaacatgatttaaaaaaaaaagtaaaatacaaagattactatgcaaaaactctataaaaaaaaattcaaatttcttatttatttgtgacatcaaattttcaaaataatttttttaattatcggttgatccggtcagtcgataaaaacataaactttcagcgaccgttaaaactttcctactaccgatttagagaaaatcttagcttgaaacgtaattgtaacctgccttcatgcaagtcgcaagatatgtcatcctaagttgtatatgttttctcaaaagatgtatttacttgagaaaatacgtttcaacgttgatggacaaccaattaagaatcaagcacctttcgtaatcaatttaggcttatcgtctaaggtatactgatttacgacagttgactagacttataaggaacaaaataatagaatagtttctaaacacttcacctaatcatagagactaagatggtaattcgtaaacgacaaagcctagtgacactgtccattgtaaaattccacatcatattagtattaaacatatacatgtagtttcctgaacacatgtagtatcaaacacacttcgtggcttcttcctcgaaacctgcggccgcgctatagttccggacttacccttaagataacttcgtatagcatacattatacgaagttatgggcccacgcgtgaagagcggttaccagagctggtcacctttgtccaccaagatggaactgtcttcggccagaatggccatctggattcagcaggcctagaaggccatttatcgctatcaactttgtatagaaaagttgggccgaattcgagctcggtacggccagaatggcccggaccgaagcttgcggccgcacactgatagtttaaaccctaactaactaggcagcctagtatcagcaaaggatttaagtgaatctcacttcgcacaaaactgtcaattcaaggcttagtccattgttcagttgtgaatgggtgaaacttttattctagatggatgttcaacttaacagtctccatcgaaacactggtatatcaaaggattgtgattatgatacttcatcattacaaaccctagaatttggtgggggttgttggatcttttatgggcttggcccatttattgaataaactctatgctgtgtaatggtggagaataccaatagtaccatattggaagtccaagggtcttttggcttgacttatatggtgggaattattccacctaacttgagaagtcaagaaacggaaaagggcgtgccaccggccgggccgggctcgggccggccgtggcgtggcaggcgagcgggcgtggtgtggttgtgttaatttttagcactcactaaccgtggttgtgttaatttttagcactcactaaccgcgtaaacctttcagttgcctgtctcttcgtcagcagcatgcgagacccttgtccttcagctgcccgtctcttggcgtgccgcatgcgacccttctccttcagcttccctttgagagaggttaagtagaggagaacccttggcacttggtacacgagaaacagaactatttcagagtcacagcccagccgcaagtgagagtattcccatctcgtgactctacgcgcacagagcagcgagagggcaggtgcctccgaagcccttgccgttcgagaccttgcacgggggatcggcaattaggtttttggggagcgtctacgcgactgcccaaaacatcttctttctggctacatgacaagggaagctggacaaagatctggatcatcagagcgcatgagagggtatgatcagtttatttttttactgttttacgttctacagattagatatgtttcatatattcatctgtgctgttttatatgtagcaatgattttagcttatctgttctgtcttattataatatgttatatctgtctgttttaattttacagtcatgttgtttatgtttctatctgtttattttgaattgttcagtcagtttatatgcttatcattatatgatttatatgattcatatgctgtgtgttctcatgatccatattgttatggatatatttgagatcacacttttatatgttatcattataatgttaatttatataattaaaatgatatgaaaaatgcctatatatctaacgttcaaattaattgataggcaattatccctagactgctagtatatagtcttctagttaactaattcatgcttgatgcgtacgtgcttatgaagtatcggctatttgtcaagatcattggccataggacagtagtggtccaaaagatctagatctccgttgggagcagggtcacaacgtagggaaaggaaaggtggacaatacgtgaaacctcatcctttcacaggaaaggcgcctcatcgggatgcaaggtcgctttcacacatgcatacatgatatttgaggggatcggcagtgcatattttagaattgaagggcatgcatgatattttacaatctttaatcttttaattcgaaaataaatgacaaatatttaagaacgaagttagtattaggcagaagcttgcatcgcatctttctcgcaggtggtgggatttgctcaggaggcatgataggtacttggacggttcccaattttaggcggcggagcggaatacttttagaaatcagagaacttgaatttctccacaaagccatccttggccatcgtccatcgatcaaaatatctgcatacaccagctagctgacacagggtgggtgccagagtgcccgtgaccaaccacgccccatctgctaaacacgtagccatgcatggcgccacggccacgccagccaagatatttgttgccctcgtctcgtcttgtgcccttcttaatataaaccttgtgcccctctgctgcagcaagaaggaaagaagctagcgcttatagcttgtcagccccgggggatctcgactctagaggatcgctcaggaaggccgctgagatagaggcatggcggccaatgcgggcggcggtggagcgggaggaggcagcggcagcggcagcgtggctgcgccggcggtgtgccgccccagcggctcgcggtggacgccgacgccggagcagatcaggatgctgaaggagctctactacggctgcggcatccggtcgcccagctcggagcagatccagcgcatcaccgccatgctgcggcagcacggcaagatcgagggcaagaacgtcttctactggttccagaaccacaaggcccgcgagcgccagaagcgccgcctcaccagcctcgacgtcaacgtgcccgccgccggcgcggccgacgccaccaccagccaactcggcgtcctctcgctgtcgtcgccgccgccttcaggcgcggcgcctccctcgcccaccctcggcttctacgccgccggcaatggcggcggatcggctgtgctgctggacacgagttccgactggggcagcagcggcgctgccatggccaccgagacatgcttcctgcaggactacatgggcgtgacggacacgggcagctcgtcgcagtggccacgcttctcgtcgtcggacacgataatggcggcggccgcggcgcgggcggcgacgacgcgggcgcccgagacgctccctctcttcccgacctgcggcgacgacggcggcagcggtagcagcagctacttgccgttctggggtgccgcgtccacaactgccggcgccacttcttccgttgcgatccagcagcaacaccagctgcaggagcagtacagcttttacagcaacagcaacagcacccagctggccggcaccggcaaccaagacgtatcggcaacagcagcagcagccgccgccctggagctgagcctcagctcatggtgctccccttaccctgctgcagggagtatgtgagagcaacgcgagctgccactgctcttcactgatgtctctggaatggaaggaggaggaagtgagcatagcgttggtgcgttgctgtcaagggcgaattcacatggttaacctagacttgtccatcttctggattggccaacttaattaatgtatgaaataaaaggatgcacacatagtgacatgctaatcactataatgtgggcatcaaagttgtgtgttatgtgtaattactagttatctgaataaaagagaaagagatcatccatatttcttatcctaaatgaatgtcacgtgtctttataattctttgatgaaccagatgcatttcattaaccaaatccatatacatataaatattaatcatatataattaatatcaattgggttagcaaaacaaatctagtctaggtgtgttttgcgaatgcggccgccaccgcggtggagctcgaattccggtccgggcctagaaggccagcttcaagtttgtacaaaaaagcaggctccggccagaatggcccggaccgggttaccgaattcgagctcggtaccatttaaattgcgcccgccacggccgtggaggtcgtattccggtcagcttgcatccctgcagtgcagcgtgacccggtcgtgcccctctctagagataatgagcattgcatgtctaagttataaaaaattaccacatattttttttgtcacacttgtttgaagtgcagtttatctatctttatacatatatttaaactttactctacgaataatataatctatagtactacaataatatcagtgttttagagaatcatataaatgaacagttagacatggtctaaaggacaattgagtattttgacaacaggactctacagttttatctttttagtgtgcatgtgttctcctttttttttgcaaatagcttcacctatataatacttcatccattttattagtacatccatttagggtttagggttaatggtttttatagactaatttttttagtacatctattttattctattttagcctctaaattaagaaaactaaaactctattttagtttttttatttaataatttagatataaaatagaataaaataaagtgactaaaaattaaacaaataccctttaagaaattaaaaaaactaaggaaacatttttcttgtttcgagtagataatgccagcctgttaaacgccgtcgacgagtctaacggacaccaaccagcgaaccagcagcgtcgcgtcgggccaagcgaagcagacggcacggcatctctgtcgctgcctctggacccctctcgagagttccgctccaccgttggacttgctccgctgtcggcatccagaaattgcgtggcggagcggcagacgtgagccggcacggcaggcggcctcctcctcctctcacggcaccggcagctacgggggattcctttcccaccgctccttcgctttcccttcctcgcccgccgtaataaatagacaccccctccacaccctctttccccaacctcgtgttgttcggagcgcacacacacacaaccagatctcccccaaatccacccgtcggcacctccgcttcaaggtacgccgctcgtcctcccccccccccctctctaccttctctagatcggcgttccggtccatgcatggttagggcccggtagttctacttctgttcatgtttgtgttagatccgtgtttgtgttagatccgtgctgctagcgttcgtacacggatgcgacctgtacgtcagacacgttctgattgctaacttgccagtgtttctctttggggaatcctgggatggctctagccgttccgcagacgggatcgatttcatgattttttttgtttcgttgcatagggtttggtttgcccttttcctttatttcaatatatgccgtgcacttgtttgtcgggtcatcttttcatgcttttttttgtcttggttgtgatgatgtggtctggttgggcggtcgttctagatcggagtagaattctgtttcaaactacctggtggatttattaattttggatctgtatgtgtgtgccatacatattcatagttacgaattgaagatgatggatggaaatatcgatctaggataggtatacatgttgatgcgggttttactgatgcatatacagagatgctttttgttcgcttggttgtgatgatgtggtgtggttgggcggtcgttcattcgttctagatcggagtagaatactgtttcaaactacctggtgtatttattaattttggaactgtatgtgtgtgtcatacatcttcatagttacgagtttaagatggatggaaatatcgatctaggataggtatacatgttgatgtgggttttactgatgcatatacatgatggcatatgcagcatctattcatatgctctaaccttgagtacctatctattataataaacaagtatgttttataattattttgatcttgatatacttggatgatggcatatgcagcagctatatgtggatttttttagccctgccttcatacgctatttatttgcttggtactgtttcttttgtcgatgctcaccctgttgtttggtgttacttctgcaggtcgactctagaggatccatggccactgtgaacaactggctcgctttctccctctccccgcaggagctgccgccctcccagacgacggactccacactcatctcggccgccaccgccgaccatgtctccggcgatgtctgcttcaacatcccccaagattggagcatgaggggatcagagctttcggcgctcgtcgcggagccgaagctggaggacttcctcggcggcatctccttctccgagcagcatcacaaggccaactgcaacatgatacccagcactagcagcacagtttgctacgcgagctcaggtgctagcaccggctaccatcaccagctgtaccaccagcccaccagctcagcgctccacttcgcggactccgtaatggtggcttcctcggccggtgtccacgacggcggtgccatgctcagcgcggccgccgctaacggtgtcgctggcgctgccagtgccaacggcggcggcatcgggctgtccatgattaagaactggctgcggagccaaccggcgcccatgcagccgagggtggcggcggctgagggcgcgcaggggctctctttgtccatgaacatggcggggacgacccaaggcgctgctggcatgccacttctcgctggagagcgcgcacgggcgcccgagagtgtatcgacgtcagcacagggtggagccgtcgtcgtcacggcgccgaaggaggatagcggtggcagcggtgttgccggcgctctagtagccgtgagcacggacacgggtggcagcggcggcgcgtcggctgacaacacggcaaggaagacggtggacacgttcgggcagcgcacgtcgatttaccgtggcgtgacaaggcatagatggactgggagatatgaggcacatctttgggataacagttgcagaagggaagggcaaactcgtaagggtcgtcaagtctatttaggtggctatgataaagaggagaaagctgctagggcttatgatcttgctgctctgaagtactggggtgccacaacaacaacaaattttccagtgagtaactacgaaaaggagctcgaggacatgaagcacatgacaaggcaggagtttgtagcgtctctgagaaggaagagcagtggtttctccagaggtgcatccatttacaggggagtgactaggcatcaccaacatggaagatggcaagcacggattggacgagttgcagggaacaaggatctttacttgggcaccttcagcacccaggaggaggcagcggaggcgtacgacatcgcggcgatcaagttccgcggcctcaacgccgtcaccaacttcgacatgagccgctacgacgtgaagagcatcctggacagcagcgccctccccatcggcagcgccgccaagcgcctcaaggaggccgaggccgcagcgtccgcgcagcaccaccacgccggcgtggtgagctacgacgtcggccgcatcgcctcgcagctcggcgacggcggagccctggcggcggcgtacggcgcgcactaccacggcgccgcctggccgaccatcgcgttccagccgggcgccgccagcacaggcctgtaccacccgtacgcgcagcagccaatgcgcggcggcgggtggtgcaagcaggagcaggaccacgcggtgatcgcggccgcgcacagcctgcaggacctccaccacctgaacctgggcgcggccggcgcgcacgactttttctcggcagggcagcaggccgccgccgctgcgatgcacggcctgggtagcatcgacagtgcgtcgctcgagcacagcaccggctccaactccgtcgtctacaacggcggggtcggcgacagcaacggcgccagcgccgtcggcggcagtggcggtggctacatgatgccgatgagcgctgccggagcaaccactacatcggcaatggtgagccacgagcaggtgcatgcacgggcctacgacgaagccaagcaggctgctcagatggggtacgagagctacctggtgaacgcggagaacaatggtggcggaaggatgtctgcatgggggactgtcgtgtctgcagccgcggcggcagcagcaagcagcaacgacaacatggccgccgacgtcgggcatggcggcgcgcagctcttcagtgtctggaacgacacttaagcgtacgtgccggcctggctctccgaaagggcgtattccagcacactggcggccgttactagacccaacctagacttgtccatcttctggattggccaacttaattaatgtatgaaataaaaggatgcacacatagtgacatgctaatcactataatgtgggcatcaaagttgtgtgttatgtgtaattactagttatctgaataaaagagaaagagatcatccatatttcttatcctaaatgaatgtcacgtgtctttataattctttgatgaaccagatgcatttcattaaccaaatccatatacatataaatattaatcatatataattaatatcaattgggttagcaaaacaaatctagtctaggtgtgttttgcgaatgcggcctccgggcacccagctttcttgtacaaagtggccgttaacggatcggccagaatggcccggaccgggttaccgaattcgagctcggtaccctggttcacaaactcaatacaacacacagtggagtagggtattacgctccggcggcccgaaccactctaaatccttgtgtcctcgtgtgctcttccaccattaatgactgtaattgcagggacacgaagagttgtagcgcttttgccaacaagatccgctatatgctagtagagtggaacctgcacagcaacaagcatccaataatctgagaataagaattatgtgtggtgatggttctcatctctgcaactcgccattttcgcgagagaaccaaatccaagttggtgaagatcatgatttgggctcatgggctggcatagtagctattacctttgcaattgtggttcgaatctatccgatattctccttttcagggagagctaatgcttatgcttattgggtattttggtttgacactgcttcacgcccaaaaaaaggcaactatgtctgagttggatatggcccaaaaaaaggcagctatgtctgagttggatatggaagtcttctttcgtttagggtgaagtaagaccaagctcatgagcttattatcttaggtcggaacaaattagttgataggcatggcacatttatcaaattataatgattttaacagaaaagcaacacctctttttcagcagcaccagctttgcaagctgcaattgacactccaagcatagtatttgctccaaactcagcctgcatttcgcacaatatcatatctatttccatttggataaaatatattttccagaaatatgggaacagaatcaagatacagaaaaaagttgtggtagtagtggtaagtggaaacacaagtacagtgaaaagatagcattatttctgaacagtcaaattaaccgaaataagtagtatcacatactgcccctaaattgactacacccaatgtaaagaattgcttgagcatattgagccatcagttgtttgtttgtgtaacggatttgacaatgcagagttcaggagcaaaaaaccgcaaaggagagaaagagggaaaggatctcctagtatcccaccttgtggcgcgccctgtcaagtgcatgatggcctggtcgatctgcgtctgctgctgcggttccatcccaacgagtgcctccgacaccttgtcgttgatcacccgcaccgcgtaggcgacccccctggcgaggaacttccgcctctcggaggccccggccgcgtcggcggcggcgccctcgagcgcgcccacgctagccgtagatgctcggtgcacggccttgttggtgtgcaactcgacctcaacggccggtgcgctacgcccgtcaaggatctggcgcgcccgcaccctcgtgatcacggtgggcgcctcccgcctcatgtggccgacgatgaaaagcgccgggttaggggccttggcgcgcaccgccgtattcagggcctcctcgctcttgcgcgagagcaggtgcttccccaggtactcctgcactgacaaggctgccacagcggtggaatttgtcctcacgacttcgccacgtcgtcctcacctccctggcttcccacgactccgccgtatcgaggtgctcggtgggtcgtcttaatccgaagtccgaactaggaagacgagacagagaggtctgaggaatgggcctcgtttgatgttgagctgaattatttttccagcataagcccaggtcttggtccatgaacaaaattactagaaacccagcccagtactacgatctaaaagagggactgccactggatagctctctctagcattctccacgctccaatacagcggcgtcgtgtctatccgggtctatccgcgaacacgtgagaactctccagaaactgctttctcctccacttcatctctctcgctttccctctataaaaagaccccttctaggaattgagggagacagcaagcaccaagcagcgatccgaagctcaatcaattcactcaaacctcttccccaaatcttcgattagatcttcgttgacaagaagactagaaccgaacctgacatgtccaacctgctcacggttcaccagaaccttccggctcttccagtggacgcgacgtccgatgaagtcaggaagaacctcatggacatgttccgcgacaggcaagcgttcagcgagcacacctggaagatgctgctctccgtctgccgctcctgggctgcatggtgcaagctgaacaacaggaagtggttccccgctgagcccgaggacgtgagggattaccttctgtacctgcaagcgcgaggtttgtttctgcttctacctttgatatatatataataattatcattaattagtagtaatataatatttcaaatatttttttcaaaataaaagaatgtagtatatagcaattgcttttctgtagtttataagtgtgtatattttaatttataacttttctaatatatgaccaaaacatggtgatgcctaggtctggcagtgaagaccatccagcaacaccttggacaactgaacatgcttcacaggcgctccggcctcccgcgccccagcgactcgaacgccgtgagcctcgtcatgcgccgcatcaggaaggaaaacgtcgatgccggcgaaagggcaaagcaggccctcgcgttcgagaggaccgatttcgaccaggtccgcagcctgatggagaacagcgacaggtgccaggacattaggaacctggcgttcctcggaattgcatacaacacgctcctcaggatcgcggaaattgcccgcattcgcgtgaaggacattagccgcaccgacggcggcaggatgcttatccacattggcaggaccaagacgctcgtttccaccgcaggcgtcgaaaaggccctcagcctcggagtgaccaagctcgtcgaacgctggatctccgtgtccggcgtcgcggacgacccaaacaactacctcttctgccgcgtccgcaagaacggggtggctgcccctagcgccaccagccaactcagcacgagggccttggaaggtattttcgaggccacccaccgcctgatctacggcgcgaaggatgacagcggtcaacgctacctcgcatggtccgggcactccgcccgcgttggagctgctagggacatggcccgcgccggtgtttccatccccgaaatcatgcaggcgggtggatggacgaacgtgaacattgtcatgaactacattcgcaaccttgacagcgagacgggcgcaatggttcgcctcctggaagatggtgactgaggtacccaacctagacttgtccatcttctggattggccaacttaattaatgtatgaaataaaaggatgcacacatagtgacatgctaatcactataatgtgggcatcaaagttgtgtgttatgtgtaattactagttatctgaataaaagagaaagagatcatccatatttcttatcctaaatgaatgtcacgtgtctttataattctttgatgaaccagatgcatttcattaaccaaatccatatacatataaatattaatcatatataattaatatcaattgggttagcaaaacaaatctagtctaggtgtgttttgcgatccgatatcgaattggccacggtaccagctgctgctgttctagggttcacaagtctgcctatttgtcttccccaatggagctatggttgtctggtctggtccttggtcgtgtcccgtttcattgtgtactatttacctgtaatgtgtatccttaagtctggtttgatggtgtctgaaacgttttgctgtggtagagcagcatggaagaactataatgaataagtgatccctaatcattgtgtccaaattttgcttctgctatacccttttgtgctgtttcttatgttttgcttaaaaatttgatctgacaaacaaatttgtctaaattatgctcttgttctgactgtgtactgtacacatttgtattgctaccggtttggcacatagttttctctttgattgcagatcaaacccttctgattgcagattgcttggctatggctgatgtgctcactgttcttctttagcttgtatattgctgatggtggcttggctacggctgaaaaagttgctgctgcgccgacttggcaactgttgctccagtaatgctttgtcctctcttcctagccgccgacttggcacttggcagctgttgctcctgtaatgcgttgttatctcttatctcttgagatgtactatgattttgaggctgtttgacttgtgccagattgccagtgctgatgctatattatctcaggtttttatgctagtatatgttttactgtgtgctgcctgtgtcgagttacgtaatctattgaaccgctatgcgtgttgatgccctgttgttgcttgccagattgatgcccctgttgcttgcagcttgcaagctgtagtgaaatcctaaaattccaaaccaaatctattctgaacttttgaagatctgtgatgtccggaagaaaagattcaaacagataaacgggactctccagaatctataaaataaatgatcgacaaacgctttgctttggtaggcttcaagcttggtcacccggtccgggcctagaaggccagcttcggccgccccgggcaactttattatacaaagttgatagataaatcagatatctggttcctaaggacccggcggaccgattaaactgattcggtccgacgcgttacctaataacttcgtatagcatacattatacgaagttattagctaactaactagtaagcttaagccatgggtcgacggatccgttaactagcgtggcatttggcaccgccgcacactatgcgagctaggagtgctagtttacagatgaaactatgaaaccaagaaaacacaattgtccgtagctagcgcgtggcgtcgtgtcaagcttcacacagtatcttcgttcttcactataaatcgcgcctgttgttcgtgagacccaccaccgtggataacagtcccctaataataagcgatcaacagcactgctgatggctgaacaccgaggcgccgccgcgcgtaaccatccgccggagcagcccgtcgtgccggcgaacgacgccttccccgaccgcgcccagcagctctgcctcgacgccgggcgcgcgctcgcgatgtgcggcgtgctcgtcgccgtccctcccgcattttacgcgtcgacgtcgcggacgacaccgcacttgccttcgtcggcttcgtcctctggatcatcggtgcgtggctgtgcctcctggcgctcacgcccttggctccacgggcggtgagggcgggcggggccgccgccagcaccttgctgatcaggtgcctgtccctttcatgaactactagcgcccgcgcccgcggccgccgggcacaagagaacacatcgatgttcgctgcgtacgtcagcaataaggcactctttgtcagtagtcgagtgcatatgttgggtgtttgccctgggagatttcaagtgttgtggccattatcccgcaggataaaaaatcggcggcttttggattgatacggaaaataacgatgtttcatgctcgtgttgtgtgtgtgacatcttgtcagccaagtttttaaccgttgctactccccctctgtgggctcagtgtgtggaccggaatacgtcgtacataggccgtagcctaagcccaatatgccgtttttcaggttggcctgtgtgacgacaagcgggtctcaaaagcccatcacgcaactggcctgcaattattggaggagagcgcgtcgagttggttccagaggctgcgtggtggggccggactctgcgacgacctctcgttcgcgtccgatttggttgccgtgagccgtgacgtaacgcctccttccgttcctccctatataagttccacccccgggtccggtttccccaagccccagtgacccccgatcccgatcgcgaaatctccgcacccgccggcaagggaccgaagcaagcctctctcccgaccgtcgcatcaaggtacgcgtccgctcgatctgtcctcttccttctcgatttgacttgctgtggtgcccgatcacgggatcagaatcgcaccagtgtagatttcgcatgttctaagatgtgttagtttccaggctaatccagttctcttgacgcccgatccgatcgagctccgtgtttatttcagcctaatcgtagtattcccctaaaatttcctcattagggggttcgcaagattgttggtcgacaggttcacttatgctcgatcgcttacttttagtcgattcatgctgcgtactattgttgccccccgtggttttatcttttctcgtgtgaaatccagtagatatagtagatatcgtagcattaggttttaattcaatcgattgattattgtatcatcaaaattgagaagttcgaatcatgcctatcatgctgcctcaaccgaaatcctgtatattgaagtttcaattcaattgattgatcattcattagattcaaccaaaatctagaaggttagatgacgcatgtcatgctgcctgcgtagtttacctttgatctgtttatgattaccttatcagtaggatatttgtgattttgggaagtagcactaactgattcatgctgacatgatgttccctttcagattatactgttgagtcctatctaattgatgctttgtatgctatatgaatacgtcatggtaaattagcagttaattagcatattagcaattgggcgtacctcatcaggattgctcttgtagatgtgtgtggtgatgtttcttgttcaattcatgttctgctttaaaagtatgtgttctctgtttgttaattaagattcatggttataatgatttggacctaattaatcagggttgcccttttagatgcgtggttacttgttgagttcatttttttcctgctatagttgtatgcgtttgttcattcatggttagatttgatttgtttcttctctattccatgccttccatatacttcaattgtagcttaacatgagatttctgtatatgcaggtcgaccgccggggatccacacgacaccatggcccagtccaagcacggcctgaccaaggagatgaccatgaagtaccgcatggagggctgcgtggacggccacaagttcgtgatcaccggcgagggcatcggctaccccttcaagggcaagcaggccatcaacctgtgcgtggtggagggcggccccttgcccttcgccgaggacatcttgtccgccgccttcatgtacggcaaccgcgtgttcaccgagtacccccaggacatcgtcgactacttcaagaactcctgccccgccggctacacctgggaccgctccttcctgttcgaggacggcgccgtgtgcatctgcaacgccgacatcaccgtgagcgtggaggagaactgcatgtaccacgagtccaagttctacggcgtgaacttccccgccgacggccccgtgatgaagaagatgaccgacaactgggagccctcctgcgagaagatcatccccgtgcccaagcagggcatcttgaagggcgacgtgagcatgtacctgctgctgaaggacggtggccgcttgcgctgccagttcgacaccgtgtacaaggccaagtccgtgccccgcaagatgcccgactggcacttcatccagcacaagctgacccgcgaggaccgcagcgacgccaagaaccagaagtggcacctgaccgagcacgccatcgcctccggctccgccttgccctccggactcagatctcgatagagtcaacctagacttgtccatcttctggattggccaacttaattaatgtatgaaataaaaggatgcacacatagtgacatgctaatcactataatgtgggcatcaaagttgtgtgttatgtgtaattactagttatctgaataaaagagaaagagatcatccatatttcttatcctaaatgaatgtcacgtgtctttataattctttgatgaaccagatgcatttcattaaccaaatccatatacatataaatattaatcatatataattaatatcaattgggttagcaaaacaaatctagtctaggtgtgttttgcgaattgcggcgcccttactttaacgcctctaaccaacacccctttatctttataaggaacaataaacagaatttgccccactgttctaaatcacctaataatatccccagctaaaaacaataaaggtttcctagaattaagacaagcatgactgttcctccaggagggtttggaacattgttgcagtcttgcagatacgggcgaagggtgagaaacagagcggagggctggaggtgacctcggtagtcgacgccggagttgagcttgacaacgacggggcggcccctgatggacttgaggaagtccgatggcgtcttcaccgtcccgccggcgcccgaggcgggcctgtcgctgccgccgccgccgctgctcatcttgcgcgctgtgcccccggcggtgtccctgtgttgcggatcgcgggtgggccaggtggatgcgagggcgacccgtttggactccggccggagccgccggatccctggtcggtgtcagtgccgtttactctgggccccacgtgtcagtaccgtctgtagatgacaacaacccgtcgtccacagtcatgtccaaaatatcctttcttcttttttttcgattcggatatctatcttccttttttttttccaaaaatcttcttgacgcaccagcgcgcacgtttgtggtaaacgccgacacgtcggtcccacgtcgatagaccccacccaccagtgagtagcgtgtacgtattcgggggtgacggacgtgtcgccgtcgtcttgctagtcccattcccatctgagccacacatctctgaacaaaaaaaaggagggaggcctccacgcacatccccctccgtgccacccgccccaaaccctcgcgccgcctccgagacagccgccgcaaccatggccaccgccgccgccgcgtctaccgcgctcactggcgccactaccgctgcgcccaaggcgaggcgccgggcgcacctcctggccacccgccgcgccctcgccgcgcccatcaggtgctcagcggcgtcacccgccatgccgatggctcccccggccaccccgctccggccgtggggccccaccgagccccgcaagggtgctgacatcctcgtcgagtccctcgagcgctgcggcgtccgcgacgtcttcgcctaccccggcggcgcgtccatggagatccaccaggcactcacccgctcccccgtcatcgccaaccacctcttccgccacgagcaaggggaggcctttgccgcctccggctacgcgcgctcctcgggccgcgtcggcgtctgcatcgccacctccggccccggcgccaccaacctagtctccgcgctcgccgacgcgctgctcgattccgtccccatggtcgccatcacgggacaggtggcgcgacgcatgattggcaccgacgccttccaggagacgcccatcgtcgaggtcacccgctccatcaccaagcacaactacctggtcctcgacgtcgacgacatcccccgcgtcgtgcaggaggctttcttcctcgcctcctctggtcgaccagggccggtgcttgtcgacatccccaaggacatccagcagcagatggcggtgcctgtctgggacaagcccatgagtctgcctgggtacattgcgcgccttcccaagccccctgcgactgagttgcttgagcaggtgctgcgtcttgttggtgaatcgcggcgccctgttctttatgtgggcggtggctgcgcagcatctggtgaggagttgcgacgctttgtggagctgactggaatcccggtcacaactactcttatgggcctcggcaacttccccagcgacgacccactgtctctgcgcatgctaggtatgcatgggacggtgtatgcaaattatgcagtggataaggccgatctgttgcttgcacttggtgtgcggtttgatgatcgcgtgacagggaagattgaggcttttgcaagcagggctaagattgtgcacgttgatattgatccggctgagattggcaagaacaagcagccacatgtgtccatctgtgcagatgttaagcttgctttgcagggcatgaatgctcttcttgaaggaagcacatcaaagaagagctttgactttggctcatggaacgatgagttggatcagcagaagagggaattcccccttgggtataaaacatctaatgaggagatccagccacaatatgctattcaggttcttgatgagctgacgaaaggcgaggccatcatcggcacaggtgttgggcagcaccagatgtgggcggcacagtactacacttacaagcggccaaggcagtggttgtcttcagctggtcttggggctatgggatttggtttgccggctgctgctggtgcttctgtggcaaacccaggtgtcactgttgttgacatcgatggagatggtagctttctcatgaacgttcaggagctagctatgatccgaattgagaacctcccagtgaaggtctttgtgctaaacaaccagcacctggggatggtggtgcagttggaggacaggttctataaggccaacagagcgcacacatacttgggaaacccagagaatgaaagtgagatatatccagatttcgtgacgatcgccaaagggttcaacattccagcggtccgtgtgacaaagaagaacgaagtccgcgcagcgataaagaagatgctcgagactccagggccgtacctcttggatataatcgtcccacaccaggagcatgtgttgcctatgatccctagtggtggggctttcaaggatatgatcctggatggtgatggcaggactgtgtactgactagctagtcagttaacagatctgccagatcctcggtgtacaaataacccgtcttatcctatgagacgggccggcgtcagtgtgttctggaggaatttttatgtcagagcctttttctttgtgtgcttgatgtagatgccaagggaagcttattggctgttgaagcttgatgcaaaataaattatggaactctgttttttgtttatctaataataactagcaaatatgcttccattgcattgaaactaacagccttttgtgtttccaagttttattttgtgacaatgtcatctatttcaattagttgtggaatcggaaacttgcaggactaacttggaaactccaatccctcagcatcctggactttttcctggtgtaatccatgtagatattattttaatcatcattttagttctggaggtttttccatctccggttttgctcccctttcttcaaaaaaaaaaaaaaaatgccgtaggcgccgcaacgcccacctgttgttcaaactcatgggcacgagtggctcgaagattttatacaacaattgctgtagtttcaccgttgctggtgaagaagcatttttttaaaaaaatatagtggtattcattttaattagtttagttgtgcagcgagcaaaatttggacatgctctgctcggaatctgatcgacctagacacagattagcagcagtagctttgtcatctgttccaagagttgcgatctgatagaagaaaaaaaaaccttcccttcaatgtaaaaccgaaactaacaagaaagaagcacagtgccgtttaggcaagtatggagtacgtattaagcatgtagaaggccatgcatgaaccactaacaagaaagaagcgcagtgccattcaggcaagcataagcatgtagattggcatgcatgaacaactaacagtagatcgtctctggtctgattagaagttttttgggaagccaagaaatcatgtacaactggttccatctcaaattccgtggcaaaaagaggcctaagcaacatacctcgagtagatcacattcaagcttggtcacccggtccgtcaatattctgattccgatgacttcgtaggttcctagctcaagccgctcgtgtccaagcgtcacttacgattagctaatgattacggcatctaggaccgactagtggcgcgccgactagctagctaaggtaccgagctcgaattcattccgattaatcgtggcctcttgctcttcaggatgaagagctatgtttaaacgtgcaagcgctactagacaattcagtacattaaaaacgtccgcaatgtgttattaagttgtctaagcgtcaatttgtttacaccacaatatatcctgcca

SEQ ID NO: 45 - DNA, 20569 bp, synthetic construct
  misc_feature 1..20569: note = PHP95075
  source 1..20569: mol_type = other DNA
gtttacccgccaatatatcctgtcaaacactgatagtttaaactgaaggcgggaaacgacaatctgatcatgagcggagaattaagggagtcacgttatgacccccgccgatgacgcgggacaagccgttttacgtttggaactgacagaaccgcaacgttgaaggagccactcagcaagctggtacgattgtaatacgactcactatagggcgaattgagcgctgtttaaacgctcttcaactggaagagcggttacgctgtttaaacgctcttcaactggaagagcggttactaccggttcactagctagctgctaatcgagctagttaccctatgaggtgacatgaagcgctcacggttactatgacggttagcttcacgactgttggtggcagtagcgtacgacttagctatagttccggacttacccttaagcgatttaaatctgcggttaccgaattcgagctcggtacctagtacccttgtacttttggtttcacctgcatagagaaaacccacaagaatatgacagtctgatttgtcagtctcattctcaagcaacatttctctatccgttactttcatggtgaataacacaatccatcatcaatactttgtgttactcagaaactgaaagttattccgagtcttgcatatctttggacctactcgtttttctaccattattgctgattgttaagctctcgctacttgaatcggcattgttggagtgggaaggttcaaaaaattggagttatgactagttgtctctttctatgtacgatggagaaaatgaataaacaactgagaaaatggctcttgtttagttgatgatgctcttaagctttccactggttgccatatatgatttgggcatttcactttgatcttaatgggccttgtaaagcccaagactcatgattatctttagttgatgctcttaattaggtgtgggcaaataattcaaactgtatgtacccgaccaaaaccaaagcaaaaataatcgaaccaaaccgaaaatttaaaaataaccgaatgaaaactaaatcctataactgaaagaactgaaaccgaatcaaaatatttaatgtaaccaaaaatatccgaaatataattatattgtcaaaaatattaataatttctagattaaataattaaaaatacttaaaaatttatataaaatagtaaaaatactcgaaaataaccacaaatattcaaaaacaaccgaaatatcccaaaatattcaaagcaaaataaccgaatggataccaaattttaaaaccgaaaaaactggaacaaaaccaaaatcgaaccaaaatttcaaaaatcgaataaatactaaactttagaacaaaaaaaaacgataaccgaatgtatacgaaccaaagccgaattagataaccgaacgtccaggactactcttaatctttccgccacttatgatttgggctattactttgtttataatgagccttttcaagctcaagttcatgattgtccgtgagatgagaaactgacttgttggattcgaaaccctagctagtattggttaatacttaatacataaatgacctgcattgacatcatcatccaagaaaataaaaattgtatgcttgagatatttagttttcctagctaggttttctttattttagtaccgaatctttaggtgtgccacgttaatttagacccattttttcatacttaccaactgagtctagtttaatcatgactataatcgtataaaatgattcagtcgacgtcattgcgaacgtatataaaatcatccaaattgacgtcattccaaagaggtaagcatgcttatctaagagtccgagcatactaaacaagacgacattttatttgcactccaaatcaaattttgtattgcctaaagaaaaacaatcaaactcaagtttcttaaaattaatttcattcaaactaatcactttcaatatctcacatattattcatgccatttctatttgtctaaacatgatttaaaaaaaaaagtaaaatacaaagattactatgcaaaaactctataaaaaaaaattcaaatttcttatttatttgtgacatcaaattttcaaaataatttttttaattatcggttgatccggtcagtcgataaaaacataaactttcagcgaccgttaaaactttcctactaccgatttagagaaaatcttagcttgaaacgtaattgtaacctgccttcatgcaagtcgcaagatatgtcatcctaagttgtatatgttttctcaaaagatgtatttacttgagaaaatacgtttcaacgttgatggacaaccaattaagaatcaagcacctttcgtaatcaatttaggcttatcgtctaaggtatactgatttacgacagttgactagacttataaggaacaaaataatagaatagtttctaaacacttcacctaatcatagagactaagatggtaattcgtaaacgacaaagcctagtgacactgtccattgtaaaattccacatcatattagtattaaacatatacatgtagtttcctgaacacatgtagtatcaaacacacttcgtggcttcttcctcgaaacctgcggccgcgctatagttccggacttacccttaagataacttcgtatagcatacattatacgaagttatgggcccacgcgtgaagagcggttaccagagctggtcacctttgtccaccaagatggaactgtcttcggccagaatggccatctggattcagcaggcctagaaggccatttatcgctatcaactttgtatagaaaagttgggccgaattcgagctcggtacggccagaatggcccggaccgaagcttgcggccgcacactgatagtttaaactgaaggcgggaaacgacaatctgatcatgagcggagaattaagggagtcacgttatgacccccgccgatgacgcgggacaagccgttttacgtttggaactgacagaaccgcaacgttgaaggagccactcagccgcgggtttctggagtttaatgagctaagcacatacgtcagaaaccattattgcgcgttcaaaagtcgcctaaggtcactatcagctagcaaatatttcttgtcaaaaatgctccactgacgttccataaattcccctcggtatccaattagagtctcatattcactctcccgggggatctcgactctagaggatcgctcaggaaggccgctgagatagaggcatggcggccaatgcgggcggcggtggagcgggaggaggcagcggcagcggcagcgtggctgcgccggcggtgtgccgccccagcggctcgcggtggacgccgacgccggagcagatcaggatgctgaaggagctctactacggctgcggcatccggtcgcccagctcggagcagatccagcgcatcaccgccatgctgcggcagcacggcaagatcgagggcaagaacgtcttctactggttccagaaccacaaggcccgcgagcgccagaagcgccgcctcaccagcctcgacgtcaacgtgcccgccgccggcgcggccgacgccaccaccagccaactcggcgtcctctcgctgtcgtcgccgccgccttcaggcgcggcgcctccctcgcccaccctcggcttctacgccgccggcaatggcggcggatcggctgtgctgctggacacgagttccgactggggcagcagcggcgctgccatggccaccgagacatgcttcctgcaggactacatgggcgtgacggacacgggcagctcgtcgcagtggccacgcttctcgtcgtcggacacgataatggcggcggccgcggcgcgggcggcgacgacgcgggcgcccgagacgctccctctcttcccgacctgcggcgacgacggcggcagcggtagcagcagctacttgccgttctggggtgccgcgtccacaactgccggcgccacttcttccgttgcgatccagcagcaacaccagctgcaggagcagtacagcttttacagcaacagcaacagcacccagctggccggcaccggcaaccaagacgtatcggcaacagcagcagcagccgccgccctggagctgagcctcagctcatggtgctccccttaccctgctgcagggagtatgtgagagcaacgcgagctgccactgctcttcactgatgtctctggaatggaaggaggaggaagtgagcatagcgttggtgcgttgctgtcaagggcgaattcacatggttaacctagacttgtccatcttctggattggccaacttaattaatgtatgaaataaaaggatgcacacatagtgacatgctaatcactataatgtgggcatcaaagttgtgtgttatgtgtaattactagttatctgaataaaagagaaagagatcatccatatttcttatcctaaatgaatgtcacgtgtctttataattctttgatgaaccagatgcatttcattaaccaaatccatatacatataaatattaatcatatataattaatatcaattgggttagcaaaacaaatctagtctaggtgtgttttgcgaatgcggccgccaccgcggtggagctcgaattccggtccgggcctagaaggccagcttcaagtttgtacaaaaaagcaggctccggccagagttacccggaccgaagcttgcatgcctgcagtgcagcgtgacccggtcgtgcccctctctagagataatgagcattgcatgtctaagttataaaaaattaccacatattttttttgtcacacttgtttgaagtgcagtttatctatctttatacatatatttaaactttactctacgaataatataatctatagtactacaataatatcagtgttttagagaatcatataaatgaacagttagacatggtctaaaggacaattgagtattttgacaacaggactctacagttttatctttttagtgtgcatgtgttctcctttttttttgcaaatagcttcacctatataatacttcatccattttattagtacatccatttagggtttagggttaatggtttttatagactaatttttttagtacatctattttattctattttagcctctaaattaagaaaactaaaactctattttagtttttttatttaataatttagatataaaatagaataaaataaagtgactaaaaattaaacaaataccctttaagaaattaaaaaaactaaggaaacatttttcttgtttcgagtagataatgccagcctgttaaacgccgtcgacgagtctaacggacaccaaccagcgaaccagcagcgtcgcgtcgggccaagcgaagcagacggcacggcatctctgtcgctgcctctggacccctctcgagagttccgctccaccgttggacttgctccgctgtcggcatccagaaattgcgtggcggagcggcagacgtgagccggcacggcaggcggcctcctcctcctctcacggcaccggcagctacgggggattcctttcccaccgctccttcgctttcccttcctcgcccgccgtaataaatagacaccccctccacaccctctttccccaacctcgtgttgttcggagcgcacacacacacaaccagatctcccccaaatccacccgtcggcacctccgcttcaaggtacgccgctcgtcctcccccccccccctctctaccttctctagatcggcgttccggtccatgcatggttagggcccggtagttctacttctgttcatgtttgtgttagatccgtgtttgtgttagatccgtgctgctagcgttcgtacacggatgcgacctgtacgtcagacacgttctgattgctaacttgccagtgtttctctttggggaatcctgggatggctctagccgttccgcagacgggatcgatttcatgattttttttgtttcgttgcatagggtttggtttgcccttttcctttatttcaatatatgccgtgcacttgtttgtcgggtcatcttttcatgcttttttttgtcttggttgtgatgatgtggtctggttgggcggtcgttctagatcggagtagaattctgtttcaaactacctggtggatttattaattttggatctgtatgtgtgtgccatacatattcatagttacgaattgaagatgatggatggaaatatcgatctaggataggtatacatgttgatgcgggttttactgatgcatatacagagatgctttttgttcgcttggttgtgatgatgtggtgtggttgggcggtcgttcattcgttctagatcggagtagaatactgtttcaaactacctggtgtatttattaattttggaactgtatgtgtgtgtcatacatcttcatagttacgagtttaagatggatggaaatatcgatctaggataggtatacatgttgatgtgggttttactgatgcatatacatgatggcatatgcagcatctattcatatgctctaaccttgagtacctatctattataataaacaagtatgttttataattattttgatcttgatatacttggatgatggcatatgcagcagctatatgtggatttttttagccctgccttcatacgctatttatttgcttggtactgtttcttttgtcgatgctcaccctgttgtttggtgttacttctgcaggtcgactttaacttagcctaggatggacaacttcctgccgttcccgagcagcaacgccaacagcgtgcaggagctgagcatggacccgaacaacaacaggagccacttcaccaccgtgccgacctacgaccaccaccaggcccagccgcaccacttcctgccgccgttcagctacccggtggagcagatggccgccgtgatgaacccgcagccggtgtacctgagcgagtgctacccgcagatcccggtgacccagaccggcagcgagttcggcagcctggtgggcaacccgtgcctgtggcaggagaggggcggcttcctggacccgaggatgaccaagatggccaggatcaacaggaagaacgccatgatgaggagcaggaacaacagcagcccgaacagcagcccgagcgagctggtggacagcaagaggcagctgatgatgctgaacctgaagaacaacgtgcagatcagcgacaagaaggacagctaccagcagagcaccttcgacaacaagaagctgagggtgctgtgcgagaaggagctgaagaacagcgacgtgggcagcctgggcaggatcgtgctgccgaagagggacgccgaggccaacctgccgaagctgagcgacaaggagggcatcgtggtgcagatgagggacgtgttcagcatgcagagctggagcttcaagtacaagttctggagcaacaacaagagcaggatgtacgtgctggagaacaccggcgagttcgtgaagcagaacggcgccgagatcggcgacttcctgaccatctacgaggacgagagcaagaacctgtacttcgccatgaacggcaacagcggcaagcagaacgagggcagggagaacgagagcagggagaggaaccactacgaggaggccatgctggactacatcccgagggacgaggaggaggccagcatcgccatgctgatcggcaacctgaacgaccactacccgatcccgaacgacctgatggacctgaccaccgacctgcagcaccaccaggccaccagcagcagcatgccgccggaggaccacgcctacgtgggcagcagcgacgaccaggtgagcttcaacgacttcgagtggtggtagggtaccgttaacagatctactaactatctatactgtaataatgttgtatagccgccggatagctagctagtttagtcattcagcggcgatgggtaataataaagtgtcatccatccatcaccatgcgtggcaacgtgagcaatgacctgattgaacaaattgaaatgaaaagaagaaatatgttatatgtcaacgagatttcctcataatgccactgacgacgtgtgtccaagaaatgtatcagtgatacgtatattcacaatttttttatgacttatactcacaatttgtttttttactacttatactcacaatttgttgtgcgtaccataacaatttcgatcgaatatatatcagaaagttgacgaaagtaagctcactcaaaaagttaaatgggctgcggaagctgcgtcaggcccaagttttggctattctatccggtatccacgattttgatggctgagggacatatgttcgcttaagcttcggtccgggcctagaaggccgatctcccgggcacccagctttcttgtacaaagtggccgttaacggatcggccagaatggcccggaccgggttaccgaattcgagctcggtaccctggttcacaaactcaatacaacacacagtggagtagggtattacgctccggcggcccgaaccactctaaatccttgtgtcctcgtgtgctcttccaccattaatgactgtaattgcagggacacgaagagttgtagcgcttttgccaacaagatccgctatatgctagtagagtggaacctgcacagcaacaagcatccaataatctgagaataagaattatgtgtggtgatggttctcatctctgcaactcgccattttcgcgagagaaccaaatccaagttggtgaagatcatgatttgggctcatgggctggcatagtagctattacctttgcaattgtggttcgaatctatccgatattctccttttcagggagagctaatgcttatgcttattgggtattttggtttgacactgcttcacgcccaaaaaaaggcaactatgtctgagttggatatggcccaaaaaaaggcagctatgtctgagttggatatggaagtcttctttcgtttagggtgaagtaagaccaagctcatgagcttattatcttaggtcggaacaaattagttgataggcatggcacatttatcaaattataatgattttaacagaaaagcaacacctctttttcagcagcaccagctttgcaagctgcaattgacactccaagcatagtatttgctccaaactcagcctgcatttcgcacaatatcatatctatttccatttggataaaatatattttccagaaatatgggaacagaatcaagatacagaaaaaagttgtggtagtagtggtaagtggaaacacaagtacagtgaaaagatagcattatttctgaacagtcaaattaaccgaaataagtagtatcacatactgcccctaaattgactacacccaatgtaaagaattgcttgagcatattgagccatcagttgtttgtttgtgtaacggatttgacaatgcagagttcaggagcaaaaaaccgcaaaggagagaaagagggaaaggatctcctagtatcccaccttgtggcgcgccctgtcaagtgcatgatggcctggtcgatctgcgtctgctgctgcggttccatcccaacgagtgcctccgacaccttgtcgttgatcacccgcaccgcgtaggcgacccccctggcgaggaacttccgcctctcggaggccccggccgcgtcggcggcggcgccctcgagcgcgcccacgctagccgtagatgctcggtgcacggccttgttggtgtgcaactcgacctcaacggccggtgcgctacgcccgtcaaggatctggcgcgcccgcaccctcgtgatcacggtgggcgcctcccgcctcatgtggccgacgatgaaaagcgccgggttaggggccttggcgcgcaccgccgtattcagggcctcctcgctcttgcgcgagagcaggtgcttccccaggtactcctgcactgacaaggctgccacagcggtggaatttgtcctcacgacttcgccacgtcgtcctcacctccctggcttcccacgactccgccgtatcgaggtgctcggtgggtcgtcttaatccgaagtccgaactaggaagacgagacagagaggtctgaggaatgggcctcgtttgatgttgagctgaattatttttccagcataagcccaggtcttggtccatgaacaaaattactagaaacccagcccagtactacgatctaaaagagggactgccactggatagctctctctagcattctccacgctccaatacagcggcgtcgtgtctatccgggtctatccgcgaacacgtgagaactctccagaaactgctttctcctccacttcatctctctcgctttccctctataaaaagaccccttctaggaattgagggagacagcaagcaccaagcagcgatccgaagctcaatcaattcactcaaacctcttccccaaatcttcgattagatcttcgttgacaagaagactagaaccgaacctgacatgtccaacctgctcacggttcaccagaaccttccggctcttccagtggacgcgacgtccgatgaagtcaggaagaacctcatggacatgttccgcgacaggcaagcgttcagcgagcacacctggaagatgctgctctccgtctgccgctcctgggctgcatggtgcaagctgaacaacaggaagtggttccccgctgagcccgaggacgtgagggattaccttctgtacctgcaagcgcgaggtttgtttctgcttctacctttgatatatatataataattatcattaattagtagtaatataatatttcaaatatttttttcaaaataaaagaatgtagtatatagcaattgcttttctgtagtttataagtgtgtatattttaatttataacttttctaatatatgaccaaaacatggtgatgcctaggtctggcagtgaagaccatccagcaacaccttggacaactgaacatgcttcacaggcgctccggcctcccgcgccccagcgactcgaacgccgtgagcctcgtcatgcgccgcatcaggaaggaaaacgtcgatgccggcgaaagggcaaagcaggccctcgcgttcgagaggaccgatttcgaccaggtccgcagcctgatggagaacagcgacaggtgccaggacattaggaacctggcgttcctcggaattgcatacaacacgctcctcaggatcgcggaaattgcccgcattcgcgtgaaggacattagccgcaccgacggcggcaggatgcttatccacattggcaggaccaagacgctcgtttccaccgcaggcgtcgaaaaggccctcagcctcggagtgaccaagctcgtcgaacgctggatctccgtgtccggcgtcgcggacgacccaaacaactacctcttctgccgcgtccgcaagaacggggtggctgcccctagcgccaccagccaactcagcacgagggccttggaaggtattttcgaggccacccaccgcctgatctacggcgcgaaggatgacagcggtcaacgctacctcgcatggtccgggcactccgcccgcgttggagctgctagggacatggcccgcgccggtgtttccatccccgaaatcatgcaggcgggtggatggacgaacgtgaacattgtcatgaactacattcgcaaccttgacagcgagacgggcgcaatggttcgcctcctggaagatggtgactgaggtacccaacctagacttgtccatcttctggattggccaacttaattaatgtatgaaataaaaggatgcacacatagtgacatgctaatcactataatgtgggcatcaaagttgtgtgttatgtgtaattactagttatctgaataaaagagaaagagatcatccatatttcttatcctaaatgaatgtcacgtgtctttataattctttgatgaaccagatgcatttcattaaccaaatccatatacatataaatattaatcatatataattaatatcaattgggttagcaaaacaaatctagtctaggtgtgttttgcgatccgatatcgaattggccacggtaccagctgctgctgttctagggttcacaagtctgcctatttgtcttccccaatggagctatggttgtctggtctggtccttggtcgtgtcccgtttcattgtgtactatttacctgtaatgtgtatccttaagtctggtttgatggtgtctgaaacgttttgctgtggtagagcagcatggaagaactataatgaataagtgatccctaatcattgtgtccaaattttgcttctgctatacccttttgtgctgtttcttatgttttgcttaaaaatttgatctgacaaacaaatttgtctaaattatgctcttgttctgactgtgtactgtacacatttgtattgctaccggtttggcacatagttttctctttgattgcagatcaaacccttctgattgcagattgcttggctatggctgatgtgctcactgttcttctttagcttgtatattgctgatggtggcttggctacggctgaaaaagttgctgctgcgccgacttggcaactgttgctccagtaatgctttgtcctctcttcctagccgccgacttggcacttggcagctgttgctcctgtaatgcgttgttatctcttatctcttgagatgtactatgattttgaggctgtttgacttgtgccagattgccagtgctgatgctatattatctcaggtttttatgctagtatatgttttactgtgtgctgcctgtgtcgagttacgtaatctattgaaccgctatgcgtgttgatgccctgttgttgcttgccagattgatgcccctgttgcttgcagcttgcaagctgtagtgaaatcctaaaattccaaaccaaatctattctgaacttttgaagatctgtgatgtccggaagaaaagattcaaacagataaacgggactctccagaatctataaaataaatgatcgacaaacgctttgctttggtaggcttcaagcttggtcacccggtccgggcctagaaggccagcttcggccgccccgggcaactttattatacaaagttgatagataaatcagatatctggttcctaaggacccggcggaccgattaaactgattcggtccgacgcgttacctaataacttcgtatagcatacattatacgaagttattagctaactaactagtaagcttaagccatgggtcgacggatccgttaactagcgtggcatttggcaccgccgcacactatgcgagctaggagtgctagtttacagatgaaactatgaaaccaagaaaacacaattgtccgtagctagcgcgtggcgtcgtgtcaagcttcacacagtatcttcgttcttcactataaatcgcgcctgttgttcgtgagacccaccaccgtggataacagtcccctaataataagcgatcaacagcactgctgatggctgaacaccgaggcgccgccgcgcgtaaccatccgccggagcagcccgtcgtgccggcgaacgacgccttccccgaccgcgcccagcagctctgcctcgacgccgggcgcgcgctcgcgatgtgcggcgtgctcgtcgccgtccctcccgcattttacgcgtcgacgtcgcggacgacaccgcacttgccttcgtcggcttcgtcctctggatcatcggtgcgtggctgtgcctcctggcgctcacgcccttggctccacgggcggtgagggcgggcggggccgccgccagcaccttgctgatcaggtgcctgtccctttcatgaactactagcgcccgcgcccgcggccgccgggcacaagagaacacatcgatgttcgctgcgtacgtcagcaataaggcactctttgtcagtagtcgagtgcatatgttgggtgtttgccctgggagatttcaagtgttgtggccattatcccgcaggataaaaaatcggcggcttttggattgatacggaaaataacgatgtttcatgctcgtgttgtgtgtgtgacatcttgtcagccaagtttttaaccgttgctactccccctctgtgggctcagtgtgtggaccggaatacgtcgtacataggccgtagcctaagcccaatatgccgtttttcaggttggcctgtgtgacgacaagcgggtctcaaaagcccatcacgcaactggcctgcaattattggaggagagcgcgtcgagttggttccagaggctgcgtggtggggccggactctgcgacgacctctcgttcgcgtccgatttggttgccgtgagccgtgacgtaacgcctccttccgttcctccctatataagttccacccccgggtccggtttccccaagccccagtgacccccgatcccgatcgcgaaatctccgcacccgccggcaagggaccgaagcaagcctctctcccgaccgtcgcatcaaggtacgcgtccgctcgatctgtcctcttccttctcgatttgacttgctgtggtgcccgatcacgggatcagaatcgcaccagtgtagatttcgcatgttctaagatgtgttagtttccaggctaatccagttctcttgacgcccgatccgatcgagctccgtgtttatttcagcctaatcgtagtattcccctaaaatttcctcattagggggttcgcaagattgttggtcgacaggttcacttatgctcgatcgcttacttttagtcgattcatgctgcgtactattgttgccccccgtggttttatcttttctcgtgtgaaatccagtagatatagtagatatcgtagcattaggttttaattcaatcgattgattattgtatcatcaaaattgagaagttcgaatcatgcctatcatgctgcctcaaccgaaatcctgtatattgaagtttcaattcaattgattgatcattcattagattcaaccaaaatctagaaggttagatgacgcatgtcatgctgcctgcgtagtttacctttgatctgtttatgattaccttatcagtaggatatttgtgattttgggaagtagcactaactgattcatgctgacatgatgttccctttcagattatactgttgagtcctatctaattgatgctttgtatgctatatgaatacgtcatggtaaattagcagttaattagcatattagcaattgggcgtacctcatcaggattgctcttgtagatgtgtgtggtgatgtttcttgttcaattcatgttctgctttaaaagtatgtgttctctgtttgttaattaagattcatggttataatgatttggacctaattaatcagggttgcccttttagatgcgtggttacttgttgagttcatttttttcctgctatagttgtatgcgtttgttcattcatggttagatttgatttgtttcttctctattccatgccttccatatacttcaattgtagcttaacatgagatttctgtatatgcaggtcgaccgccggggatccacacgacaccatggcccagtccaagcacggcctgaccaaggagatgaccatgaagtaccgcatggagggctgcgtggacggccacaagttcgtgatcaccggcgagggcatcggctaccccttcaagggcaagcaggccatcaacctgtgcgtggtggagggcggccccttgcccttcgccgaggacatcttgtccgccgccttcatgtacggcaaccgcgtgttcaccgagtacccccaggacatcgtcgactacttcaagaactcctgccccgccggctacacctgggaccgctccttcctgttcgaggacggcgccgtgtgcatctgcaacgccgacatcaccgtgagcgtggaggagaactgcatgtaccacgagtccaagttctacggcgtgaacttccccgccgacggccccgtgatgaagaagatgaccgacaactgggagccctcctgcgagaagatcatccccgtgcccaagcagggcatcttgaagggcgacgtgagcatgtacctgctgctgaaggacggtggccgcttgcgctgccagttcgacaccgtgtacaaggccaagtccgtgccccgcaagatgcccgactggcacttcatccagcacaagctgacccgcgaggaccgcagcgacgccaagaaccagaagtggcacctgaccgagcacgccatcgcctccggctccgccttgccctccggactcagatctcgatagagtcaacctagacttgtccatcttctggattggccaacttaattaatgtatgaaataaaaggatgcacacatagtgacatgctaatcactataatgtgggcatcaaagttgtgtgttatgtgtaattactagttatctgaataaaagagaaagagatcatccatatttcttatcctaaatgaatgtcacgtgtctttataattctttgatgaaccagatgcatttcattaaccaaatccatatacatataaatattaatcatatataattaatatcaattgggttagcaaaacaaatctagtctaggtgtgttttgcgaattgcggcgcccttactttaacgcctctaaccaacacccctttatctttataaggaacaataaacagaatttgccccactgttctaaatcacctaataatatccccagctaaaaacaataaaggtttcctagaattaagacaagcatgactgttcctccaggagggtttggaacattgttgcagtcttgcagatacgggcgaagggtgagaaacagagcggagggctggaggtgacctcggtagtcgacgccggagttgagcttgacaacgacggggcggcccctgatggacttgaggaagtccgatggcgtcttcaccgtcccgccggcgcccgaggcgggcctgtcgctgccgccgccgccgctgctcatcttgcgcgctgtgcccccggcggtgtccctgtgttgcggatcgcgggtgggccaggtggatgcgagggcgacccgtttggactccggccggagccgccggatccctggtcggtgtcagtgccgtttactctgggccccacgtgtcagtaccgtctgtagatgacaacaacccgtcgtccacagtcatgtccaaaatatcctttcttcttttttttcgattcggatatctatcttccttttttttttccaaaaatcttcttgacgcaccagcgcgcacgtttgtggtaaacgccgacacgtcggtcccacgtcgatagaccccacccaccagtgagtagcgtgtacgtattcgggggtgacggacgtgtcgccgtcgtcttgctagtcccattcccatctgagccacacatctctgaacaaaaaaaaggagggaggcctccacgcacatccccctccgtgccacccgccccaaaccctcgcgccgcctccgagacagccgccgcaaccatggccaccgccgccgccgcgtctaccgcgctcactggcgccactaccgctgcgcccaaggcgaggcgccgggcgcacctcctggccacccgccgcgccctcgccgcgcccatcaggtgctcagcggcgtcacccgccatgccgatggctcccccggccaccccgctccggccgtggggccccaccgagccccgcaagggtgctgacatcctcgtcgagtccctcgagcgctgcggcgtccgcgacgtcttcgcctaccccggcggcgcgtccatggagatccaccaggcactcacccgctcccccgtcatcgccaaccacctcttccgccacgagcaaggggaggcctttgccgcctccggctacgcgcgctcctcgggccgcgtcggcgtctgcatcgccacctccggccccggcgccaccaacctagtctccgcgctcgccgacgcgctgctcgattccgtccccatggtcgccatcacgggacaggtggcgcgacgcatgattggcaccgacgccttccaggagacgcccatcgtcgaggtcacccgctccatcaccaagcacaactacctggtcctcgacgtcgacgacatcccccgcgtcgtgcaggaggctttcttcctcgcctcctctggtcgaccagggccggtgcttgtcgacatccccaaggacatccagcagcagatggcggtgcctgtctgggacaagcccatgagtctgcctgggtacattgcgcgccttcccaagccccctgcgactgagttgcttgagcaggtgctgcgtcttgttggtgaatcgcggcgccctgttctttatgtgggcggtggctgcgcagcatctggtgaggagttgcgacgctttgtggagctgactggaatcccggtcacaactactcttatgggcctcggcaacttccccagcgacgacccactgtctctgcgcatgctaggtatgcatgggacggtgtatgcaaattatgcagtggataaggccgatctgttgcttgcacttggtgtgcggtttgatgatcgcgtgacagggaagattgaggcttttgcaagcagggctaagattgtgcacgttgatattgatccggctgagattggcaagaacaagcagccacatgtgtccatctgtgcagatgttaagcttgctttgcagggcatgaatgctcttcttgaaggaagcacatcaaagaagagctttgactttggctcatggaacgatgagttggatcagcagaagagggaattcccccttgggtataaaacatctaatgaggagatccagccacaatatgctattcaggttcttgatgagctgacgaaaggcgaggccatcatcggcacaggtgttgggcagcaccagatgtgggcggcacagtactacacttacaagcggccaaggcagtggttgtcttcagctggtcttggggctatgggatttggtttgccggctgctgctggtgcttctgtggcaaacccaggtgtcactgttgttgacatcgatggagatggtagctttctcatgaacgttcaggagctagctatgatccgaattgagaacctcccagtgaaggtctttgtgctaaacaaccagcacctggggatggtggtgcagttggaggacaggttctataaggccaacagagcgcacacatacttgggaaacccagagaatgaaagtgagatatatccagatttcgtgacgatcgccaaagggttcaacattccagcggtccgtgtgacaaagaagaacgaagtccgcgcagcgataaagaagatgctcgagactccagggccgtacctcttggatataatcgtcccacaccaggagcatgtgttgcctatgatccctagtggtggggctttcaaggatatgatcctggatggtgatggcaggactgtgtactgactagctagtcagttaacagatctgccagatcctcggtgtacaaataacccgtcttatcctatgagacgggccggcgtcagtgtgttctggaggaatttttatgtcagagcctttttctttgtgtgcttgatgtagatgccaagggaagcttattggctgttgaagcttgatgcaaaataaattatggaactctgttttttgtttatctaataataactagcaaatatgcttccattgcattgaaactaacagccttttgtgtttccaagttttattttgtgacaatgtcatctatttcaattagttgtggaatcggaaacttgcaggactaacttggaaactccaatccctcagcatcctggactttttcctggtgtaatccatgtagatattattttaatcatcattttagttctggaggtttttccatctccggttttgctcccctttcttcaaaaaaaaaaaaaaaatgccgtaggcgccgcaacgcccacctgttgttcaaactcatgggcacgagtggctcgaagattttatacaacaattgctgtagtttcaccgttgctggtgaagaagcatttttttaaaaaaatatagtggtattcattttaattagtttagttgtgcagcgagcaaaatttggacatgctctgctcggaatctgatcgacctagacacagattagcagcagtagctttgtcatctgttccaagagttgcgatctgatagaagaaaaaaaaaccttcccttcaatgtaaaaccgaaactaacaagaaagaagcacagtgccgtttaggcaagtatggagtacgtattaagcatgtagaaggccatgcatgaaccactaacaagaaagaagcgcagtgccattcaggcaagcataagcatgtagattggcatgcatgaacaactaacagtagatcgtctctggtctgattagaagttttttgggaagccaagaaatcatgtacaactggttccatctcaaattccgtggcaaaaagaggcctaagcaacatacctcgagtagatcacattcaagcttggtcacccggtccgtcaatattctgattccgatgacttcgtaggttcctagctcaagccgctcgtgtccaagcgtcacttacgattagctaatgattacggcatctaggaccgactagtggcgcgccgactagctagctaaggtaccgagctcgaattcattccgattaatcgtggcctcttgctcttcaggatgaagagctatgtttaaacgtgcaagcgctactagacaattcagtacattaaaaacgtccgcaatgtgttattaagttgtctaagcgtcaatttgtttacaccacaatatatcctgcca

SEQ ID NO: 46 - DNA, 22197 bp, synthetic construct
  misc_feature 1..22197: note = PHP95205
  source 1..22197: mol_type = other DNA
gtttacccgccaatatatcctgtcaaacactgatagtttaaactgaaggcgggaaacgacaatctgatcatgagcggagaattaagggagtcacgttatgacccccgccgatgacgcgggacaagccgttttacgtttggaactgacagaaccgcaacgttgaaggagccactcagcaagctggtacgattgtaatacgactcactatagggcgaattgagcgctgtttaaacgctcttcaactggaagagcggttacgctgtttaaacgctcttcaactggaagagcggttactaccggttcactagctagctgctaatcgagctagttaccctatgaggtgacatgaagcgctcacggttactatgacggttagcttcacgactgttggtggcagtagcgtacgacttagctatagttccggacttacccttaagcgatttaaatctgcggttaccgaattcgagctcggtacctagtacccttgtacttttggtttcacctgcatagagaaaacccacaagaatatgacagtctgatttgtcagtctcattctcaagcaacatttctctatccgttactttcatggtgaataacacaatccatcatcaatactttgtgttactcagaaactgaaagttattccgagtcttgcatatctttggacctactcgtttttctaccattattgctgattgttaagctctcgctacttgaatcggcattgttggagtgggaaggttcaaaaaattggagttatgactagttgtctctttctatgtacgatggagaaaatgaataaacaactgagaaaatggctcttgtttagttgatgatgctcttaagctttccactggttgccatatatgatttgggcatttcactttgatcttaatgggccttgtaaagcccaagactcatgattatctttagttgatgctcttaattaggtgtgggcaaataattcaaactgtatgtacccgaccaaaaccaaagcaaaaataatcgaaccaaaccgaaaatttaaaaataaccgaatgaaaactaaatcctataactgaaagaactgaaaccgaatcaaaatatttaatgtaaccaaaaatatccgaaatataattatattgtcaaaaatattaataatttctagattaaataattaaaaatacttaaaaatttatataaaatagtaaaaatactcgaaaataaccacaaatattcaaaaacaaccgaaatatcccaaaatattcaaagcaaaataaccgaatggataccaaattttaaaaccgaaaaaactggaacaaaaccaaaatcgaaccaaaatttcaaaaatcgaataaatactaaactttagaacaaaaaaaaacgataaccgaatgtatacgaaccaaagccgaattagataaccgaacgtccaggactactcttaatctttccgccacttatgatttgggctattactttgtttataatgagccttttcaagctcaagttcatgattgtccgtgagatgagaaactgacttgttggattcgaaaccctagctagtattggttaatacttaatacataaatgacctgcattgacatcatcatccaagaaaataaaaattgtatgcttgagatatttagttttcctagctaggttttctttattttagtaccgaatctttaggtgtgccacgttaatttagacccattttttcatacttaccaactgagtctagtttaatcatgactataatcgtataaaatgattcagtcgacgtcattgcgaacgtatataaaatcatccaaattgacgtcattccaaagaggtaagcatgcttatctaagagtccgagcatactaaacaagacgacattttatttgcactccaaatcaaattttgtattgcctaaagaaaaacaatcaaactcaagtttcttaaaattaatttcattcaaactaatcactttcaatatctcacatattattcatgccatttctatttgtctaaacatgatttaaaaaaaaaagtaaaatacaaagattactatgcaaaaactctataaaaaaaaattcaaatttcttatttatttgtgacatcaaattttcaaaataatttttttaattatcggttgatccggtcagtcgataaaaacataaactttcagcgaccgttaaaactttcctactaccgatttagagaaaatcttagcttgaaacgtaattgtaacctgccttcatgcaagtcgcaagatatgtcatcctaagttgtatatgttttctcaaaagatgtatttacttgagaaaatacgtttcaacgttgatggacaaccaattaagaatcaagcacctttcgtaatcaatttaggcttatcgtctaaggtatactgatttacgacagttgactagacttataaggaacaaaataatagaatagtttctaaacacttcacctaatcatagagactaagatggtaattcgtaaacgacaaagcctagtgacactgtccattgtaaaattccacatcatattagtattaaacatatacatgtagtttcctgaacacatgtagtatcaaacacacttcgtggcttcttcctcgaaacctgcggccgcgctatagttccggacttacccttaagataacttcgtatagcatacattatacgaagttatgggcccacgcgtgaagagcggttaccagagctggtcacctttgtccaccaagatggaactgtcttcggccagaatggccatctggattcagcaggcctagaaggccatttatcgctatcaactttgtatagaaaagttgggccgaattcgagctcggtacggccagaatggcccggaccgaagcttaggagctccctttaatctggcgcttgatctgcatccgcggcttgcaaagataaatggcacatttagtgtgttattttgcaatacctttcatagtagatatccttaaatgcagttttaggcatgtttgggtaattaaataacatttttaggaggagttttagatttacctttctttcgtgatgactgatgacagacgtggggaattcaaatgcaactctagcgaaagttcatatatttttcataaatagctgaggctggggtaattattttttgtagaaaaatagaataggtggaatggtttggggaaggcgtaggcgctcgtggacgacgccccataaaagacaagaggcggaattgccatgaattcgaggtagctaagtaaggcgcatatatatgccaaaaattctactgtcactttccaatttcaatgcgctgccaaacaagccgccgacccttggatactgacttgaattcagcccaattctgtagatccaaacagggccggcgtcagtgcctcaggtgagagagcagcagacgatgcaaagagccaaaagtggaagcagacgcagccgaagccgaagcccaagcccaaaactgttttgtctttgcccagaaccgcgacgagcctaaactgccgcttcctcctatctacaagtccctggcacatcacgcatagtccaaccatcgcgcgcaggcgataaggcgcgccacggggacgcgacatgtggtggcggacgcgatcaggatagggccaggctggccgggcgcggccacgggagaacggtggccactcgtcccacatccgcttcgtcctgtcctgtactgcgtcctgcccccaacgagagccggagccggccatcccgtcgcacactctccccctctatatatgccgtcggtgtgggggagcctactacaggacgacccaagcaagcaagcaagcagcgagtacatacatactaggcagccaggcagccccgggggatctcgactctagaggatcgctcaggaaggccgctgagatagaggcatggcggccaatgcgggcggcggtggagcgggaggaggcagcggcagcggcagcgtggctgcgccggcggtgtgccgccccagcggctcgcggtggacgccgacgccggagcagatcaggatgctgaaggagctctactacggctgcggcatccggtcgcccagctcggagcagatccagcgcatcaccgccatgctgcggcagcacggcaagatcgagggcaagaacgtcttctactggttccagaaccacaaggcccgcgagcgccagaagcgccgcctcaccagcctcgacgtcaacgtgcccgccgccggcgcggccgacgccaccaccagccaactcggcgtcctctcgctgtcgtcgccgccgccttcaggcgcggcgcctccctcgcccaccctcggcttctacgccgccggcaatggcggcggatcggctgtgctgctggacacgagttccgactggggcagcagcggcgctgccatggccaccgagacatgcttcctgcaggactacatgggcgtgacggacacgggcagctcgtcgcagtggccacgcttctcgtcgtcggacacgataatggcggcggccgcggcgcgggcggcgacgacgcgggcgcccgagacgctccctctcttcccgacctgcggcgacgacggcggcagcggtagcagcagctacttgccgttctggggtgccgcgtccacaactgccggcgccacttcttccgttgcgatccagcagcaacaccagctgcaggagcagtacagcttttacagcaacagcaacagcacccagctggccggcaccggcaaccaagacgtatcggcaacagcagcagcagccgccgccctggagctgagcctcagctcatggtgctccccttaccctgctgcagggagtatgtgagagcaacgcgagctgccactgctcttcactgatgtctctggaatggaaggaggaggaagtgagcatagcgttggtgcgttgctgtcaagggcgaattcacatggttaacctagacttgtccatcttctggattggccaacttaattaatgtatgaaataaaaggatgcacacatagtgacatgctaatcactataatgtgggcatcaaagttgtgtgttatgtgtaattactagttatctgaataaaagagaaagagatcatccatatttcttatcctaaatgaatgtcacgtgtctttataattctttgatgaaccagatgcatttcattaaccaaatccatatacatataaatattaatcatatataattaatatcaattgggttagcaaaacaaatctagtctaggtgtgttttgcgaatgcggccgccaccgcggtggagctcgaattccggtccgggcctagaaggccagcttcaagtttgtacaaaaaagcaggctccggccagaatggcccggaccgggttaccgaattcgagctcggtaccatttaaattgcgcccgccacggccgtggaggtcgtattccggtcagcttgcatccctgcagtgcagcgtgacccggtcgtgcccctctctagagataatgagcattgcatgtctaagttataaaaaattaccacatattttttttgtcacacttgtttgaagtgcagtttatctatctttatacatatatttaaactttactctacgaataatataatctatagtactacaataatatcagtgttttagagaatcatataaatgaacagttagacatggtctaaaggacaattgagtattttgacaacaggactctacagttttatctttttagtgtgcatgtgttctcctttttttttgcaaatagcttcacctatataatacttcatccattttattagtacatccatttagggtttagggttaatggtttttatagactaatttttttagtacatctattttattctattttagcctctaaattaagaaaactaaaactctattttagtttttttatttaataatttagatataaaatagaataaaataaagtgactaaaaattaaacaaataccctttaagaaattaaaaaaactaaggaaacatttttcttgtttcgagtagataatgccagcctgttaaacgccgtcgacgagtctaacggacaccaaccagcgaaccagcagcgtcgcgtcgggccaagcgaagcagacggcacggcatctctgtcgctgcctctggacccctctcgagagttccgctccaccgttggacttgctccgctgtcggcatccagaaattgcgtggcggagcggcagacgtgagccggcacggcaggcggcctcctcctcctctcacggcaccggcagctacgggggattcctttcccaccgctccttcgctttcccttcctcgcccgccgtaataaatagacaccccctccacaccctctttccccaacctcgtgttgttcggagcgcacacacacacaaccagatctcccccaaatccacccgtcggcacctccgcttcaaggtacgccgctcgtcctcccccccccccctctctaccttctctagatcggcgttccggtccatgcatggttagggcccggtagttctacttctgttcatgtttgtgttagatccgtgtttgtgttagatccgtgctgctagcgttcgtacacggatgcgacctgtacgtcagacacgttctgattgctaacttgccagtgtttctctttggggaatcctgggatggctctagccgttccgcagacgggatcgatttcatgattttttttgtttcgttgcatagggtttggtttgcccttttcctttatttcaatatatgccgtgcacttgtttgtcgggtcatcttttcatgcttttttttgtcttggttgtgatgatgtggtctggttgggcggtcgttctagatcggagtagaattctgtttcaaactacctggtggatttattaattttggatctgtatgtgtgtgccatacatattcatagttacgaattgaagatgatggatggaaatatcgatctaggataggtatacatgttgatgcgggttttactgatgcatatacagagatgctttttgttcgcttggttgtgatgatgtggtgtggttgggcggtcgttcattcgttctagatcggagtagaatactgtttcaaactacctggtgtatttattaattttggaactgtatgtgtgtgtcatacatcttcatagttacgagtttaagatggatggaaatatcgatctaggataggtatacatgttgatgtgggttttactgatgcatatacatgatggcatatgcagcatctattcatatgctctaaccttgagtacctatctattataataaacaagtatgttttataattattttgatcttgatatacttggatgatggcatatgcagcagctatatgtggatttttttagccctgccttcatacgctatttatttgcttggtactgtttcttttgtcgatgctcaccctgttgtttggtgttacttctgcaggtcgactctagaggatccatggccactgtgaacaactggctcgctttctccctctccccgcaggagctgccgccctcccagacgacggactccacactcatctcggccgccaccgccgaccatgtctccggcgatgtctgcttcaacatcccccaagattggagcatgaggggatcagagctttcggcgctcgtcgcggagccgaagctggaggacttcctcggcggcatctccttctccgagcagcatcacaaggccaactgcaacatgatacccagcactagcagcacagtttgctacgcgagctcaggtgctagcaccggctaccatcaccagctgtaccaccagcccaccagctcagcgctccacttcgcggactccgtaatggtggcttcctcggccggtgtccacgacggcggtgccatgctcagcgcggccgccgctaacggtgtcgctggcgctgccagtgccaacggcggcggcatcgggctgtccatgattaagaactggctgcggagccaaccggcgcccatgcagccgagggtggcggcggctgagggcgcgcaggggctctctttgtccatgaacatggcggggacgacccaaggcgctgctggcatgccacttctcgctggagagcgcgcacgggcgcccgagagtgtatcgacgtcagcacagggtggagccgtcgtcgtcacggcgccgaaggaggatagcggtggcagcggtgttgccggcgctctagtagccgtgagcacggacacgggtggcagcggcggcgcgtcggctgacaacacggcaaggaagacggtggacacgttcgggcagcgcacgtcgatttaccgtggcgtgacaaggcatagatggactgggagatatgaggcacatctttgggataacagttgcagaagggaagggcaaactcgtaagggtcgtcaagtctatttaggtggctatgataaagaggagaaagctgctagggcttatgatcttgctgctctgaagtactggggtgccacaacaacaacaaattttccagtgagtaactacgaaaaggagctcgaggacatgaagcacatgacaaggcaggagtttgtagcgtctctgagaaggaagagcagtggtttctccagaggtgcatccatttacaggggagtgactaggcatcaccaacatggaagatggcaagcacggattggacgagttgcagggaacaaggatctttacttgggcaccttcagcacccaggaggaggcagcggaggcgtacgacatcgcggcgatcaagttccgcggcctcaacgccgtcaccaacttcgacatgagccgctacgacgtgaagagcatcctggacagcagcgccctccccatcggcagcgccgccaagcgcctcaaggaggccgaggccgcagcgtccgcgcagcaccaccacgccggcgtggtgagctacgacgtcggccgcatcgcctcgcagctcggcgacggcggagccctggcggcggcgtacggcgcgcactaccacggcgccgcctggccgaccatcgcgttccagccgggcgccgccagcacaggcctgtaccacccgtacgcgcagcagccaatgcgcggcggcgggtggtgcaagcaggagcaggaccacgcggtgatcgcggccgcgcacagcctgcaggacctccaccacctgaacctgggcgcggccggcgcgcacgactttttctcggcagggcagcaggccgccgccgctgcgatgcacggcctgggtagcatcgacagtgcgtcgctcgagcacagcaccggctccaactccgtcgtctacaacggcggggtcggcgacagcaacggcgccagcgccgtcggcggcagtggcggtggctacatgatgccgatgagcgctgccggagcaaccactacatcggcaatggtgagccacgagcaggtgcatgcacgggcctacgacgaagccaagcaggctgctcagatggggtacgagagctacctggtgaacgcggagaacaatggtggcggaaggatgtctgcatgggggactgtcgtgtctgcagccgcggcggcagcagcaagcagcaacgacaacatggccgccgacgtcgggcatggcggcgcgcagctcttcagtgtctggaacgacacttaagcgtacgtgccggcctggctctccgaaagggcgtattccagcacactggcggccgttactagacccaacctagacttgtccatcttctggattggccaacttaattaatgtatgaaataaaaggatgcacacatagtgacatgctaatcactataatgtgggcatcaaagttgtgtgttatgtgtaattactagttatctgaataaaagagaaagagatcatccatatttcttatcctaaatgaatgtcacgtgtctttataattctttgatgaaccagatgcatttcattaaccaaatccatatacatataaatattaatcatatataattaatatcaattgggttagcaaaacaaatctagtctaggtgtgttttgcgaatgcggcctccgggcacccagctttcttgtacaaagtggccgttaacggatcggccagaatggcccggaccgggttaccgaattcgagctcggtaccctggttcacaaactcaatacaacacacagtggagtagggtattacgctccggcggcccgaaccactctaaatccttgtgtcctcgtgtgctcttccaccattaatgactgtaattgcagggacacgaagagttgtagcgcttttgccaacaagatccgctatatgctagtagagtggaacctgcacagcaacaagcatccaataatctgagaataagaattatgtgtggtgatggttctcatctctgcaactcgccattttcgcgagagaaccaaatccaagttggtgaagatcatgatttgggctcatgggctggcatagtagctattacctttgcaattgtggttcgaatctatccgatattctccttttcagggagagctaatgcttatgcttattgggtattttggtttgacactgcttcacgcccaaaaaaaggcaactatgtctgagttggatatggcccaaaaaaaggcagctatgtctgagttggatatggaagtcttctttcgtttagggtgaagtaagaccaagctcatgagcttattatcttaggtcggaacaaattagttgataggcatggcacatttatcaaattataatgattttaacagaaaagcaacacctctttttcagcagcaccagctttgcaagctgcaattgacactccaagcatagtatttgctccaaactcagcctgcatttcgcacaatatcatatctatttccatttggataaaatatattttccagaaatatgggaacagaatcaagatacagaaaaaagttgtggtagtagtggtaagtggaaacacaagtacagtgaaaagatagcattatttctgaacagtcaaattaaccgaaataagtagtatcacatactgcccctaaattgactacacccaatgtaaagaattgcttgagcatattgagccatcagttgtttgtttgtgtaacggatttgacaatgcagagttcaggagcaaaaaaccgcaaaggagagaaagagggaaaggatctcctagtatcccaccttgtggcgcgccctgtcaagtgcatgatggcctggtcgatctgcgtctgctgctgcggttccatcccaacgagtgcctccgacaccttgtcgttgatcacccgcaccgcgtaggcgacccccctggcgaggaacttccgcctctcggaggccccggccgcgtcggcggcggcgccctcgagcgcgcccacgctagccgtagatgctcggtgcacggccttgttggtgtgcaactcgacctcaacggccggtgcgctacgcccgtcaaggatctggcgcgcccgcaccctcgtgatcacggtgggcgcctcccgcctcatgtggccgacgatgaaaagcgccgggttaggggccttggcgcgcaccgccgtattcagggcctcctcgctcttgcgcgagagcaggtgcttccccaggtactcctgcactgacaaggctgccacagcggtggaatttgtcctcacgacttcgccacgtcgtcctcacctccctggcttcccacgactccgccgtatcgaggtgctcggtgggtcgtcttaatccgaagtccgaactaggaagacgagacagagaggtctgaggaatgggcctcgtttgatgttgagctgaattatttttccagcataagcccaggtcttggtccatgaacaaaattactagaaacccagcccagtactacgatctaaaagagggactgccactggatagctctctctagcattctccacgctccaatacagcggcgtcgtgtctatccgggtctatccgcgaacacgtgagaactctccagaaactgctttctcctccacttcatctctctcgctttccctctataaaaagaccccttctaggaattgagggagacagcaagcaccaagcagcgatccgaagctcaatcaattcactcaaacctcttccccaaatcttcgattagatcttcgttgacaagaagactagaaccgaacctgacatgtccaacctgctcacggttcaccagaaccttccggctcttccagtggacgcgacgtccgatgaagtcaggaagaacctcatggacatgttccgcgacaggcaagcgttcagcgagcacacctggaagatgctgctctccgtctgccgctcctgggctgcatggtgcaagctgaacaacaggaagtggttccccgctgagcccgaggacgtgagggattaccttctgtacctgcaagcgcgaggtttgtttctgcttctacctttgatatatatataataattatcattaattagtagtaatataatatttcaaatatttttttcaaaataaaagaatgtagtatatagcaattgcttttctgtagtttataagtgtgtatattttaatttataacttttctaatatatgaccaaaacatggtgatgcctaggtctggcagtgaagaccatccagcaacaccttggacaactgaacatgcttcacaggcgctccggcctcccgcgccccagcgactcgaacgccgtgagcctcgtcatgcgccgcatcaggaaggaaaacgtcgatgccggcgaaagggcaaagcaggccctcgcgttcgagaggaccgatttcgaccaggtccgcagcctgatggagaacagcgacaggtgccaggacattaggaacctggcgttcctcggaattgcatacaacacgctcctcaggatcgcggaaattgcccgcattcgcgtgaaggacattagccgcaccgacggcggcaggatgcttatccacattggcaggaccaagacgctcgtttccaccgcaggcgtcgaaaaggccctcagcctcggagtgaccaagctcgtcgaacgctggatctccgtgtccggcgtcgcggacgacccaaacaactacctcttctgccgcgtccgcaagaacggggtggctgcccctagcgccaccagccaactcagcacgagggccttggaaggtattttcgaggccacccaccgcctgatctacggcgcgaaggatgacagcggtcaacgctacctcgcatggtccgggcactccgcccgcgttggagctgctagggacatggcccgcgccggtgtttccatccccgaaatcatgcaggcgggtggatggacgaacgtgaacattgtcatgaactacattcgcaaccttgacagcgagacgggcgcaatggttcgcctcctggaagatggtgactgaggtacccaacctagacttgtccatcttctggattggccaacttaattaatgtatgaaataaaaggatgcacacatagtgacatgctaatcactataatgtgggcatcaaagttgtgtgttatgtgtaattactagttatctgaataaaagagaaagagatcatccatatttcttatcctaaatgaatgtcacgtgtctttataattctttgatgaaccagatgcatttcattaaccaaatccatatacatataaatattaatcatatataattaatatcaattgggttagcaaaacaaatctagtctaggtgtgttttgcgatccgatatcgaattggccacggtaccagctgctgctgttctagggttcacaagtctgcctatttgtcttccccaatggagctatggttgtctggtctggtccttggtcgtgtcccgtttcattgtgtactatttacctgtaatgtgtatccttaagtctggtttgatggtgtctgaaacgttttgctgtggtagagcagcatggaagaactataatgaataagtgatccctaatcattgtgtccaaattttgcttctgctatacccttttgtgctgtttcttatgttttgcttaaaaatttgatctgacaaacaaatttgtctaaattatgctcttgttctgactgtgtactgtacacatttgtattgctaccggtttggcacatagttttctctttgattgcagatcaaacccttctgattgcagattgcttggctatggctgatgtgctcactgttcttctttagcttgtatattgctgatggtggcttggctacggctgaaaaagttgctgctgcgccgacttggcaactgttgctccagtaatgctttgtcctctcttcctagccgccgacttggcacttggcagctgttgctcctgtaatgcgttgttatctcttatctcttgagatgtactatgattttgaggctgtttgacttgtgccagattgccagtgctgatgctatattatctcaggtttttatgctagtatatgttttactgtgtgctgcctgtgtcgagttacgtaatctattgaaccgctatgcgtgttgatgccctgttgttgcttgccagattgatgcccctgttgcttgcagcttgcaagctgtagtgaaatcctaaaattccaaaccaaatctattctgaacttttgaagatctgtgatgtccggaagaaaagattcaaacagataaacgggactctccagaatctataaaataaatgatcgacaaacgctttgctttggtaggcttcaagcttggtcacccggtccgggcctagaaggccagcttcggccgccccgggcaactttattatacaaagttgatagataaatcagatatctggttcctaaggacccggcggaccgattaaactgattcggtccgacgcgttacctaataacttcgtatagcatacattatacgaagttattagctaactaactagtaagcttaagccatgggtcgacggatccgttaactagcgtggcatttggcaccgccgcacactatgcgagctaggagtgctagtttacagatgaaactatgaaaccaagaaaacacaattgtccgtagctagcgcgtggcgtcgtgtcaagcttcacacagtatcttcgttcttcactataaatcgcgcctgttgttcgtgagacccaccaccgtggataacagtcccctaataataagcgatcaacagcactgctgatggctgaacaccgaggcgccgccgcgcgtaaccatccgccggagcagcccgtcgtgccggcgaacgacgccttccccgaccgcgcccagcagctctgcctcgacgccgggcgcgcgctcgcgatgtgcggcgtgctcgtcgccgtccctcccgcattttacgcgtcgacgtcgcggacgacaccgcacttgccttcgtcggcttcgtcctctggatcatcggtgcgtggctgtgcctcctggcgctcacgcccttggctccacgggcggtgagggcgggcggggccgccgccagcaccttgctgatcaggtgcctgtccctttcatgaactactagcgcccgcgcccgcggccgccgggcacaagagaacacatcgatgttcgctgcgtacgtcagcaataaggcactctttgtcagtagtcgagtgcatatgttgggtgtttgccctgggagatttcaagtgttgtggccattatcccgcaggataaaaaatcggcggcttttggattgatacggaaaataacgatgtttcatgctcgtgttgtgtgtgtgacatcttgtcagccaagtttttaaccgttgctactccccctctgtgggctcagtgtgtggaccggaatacgtcgtacataggccgtagcctaagcccaatatgccgtttttcaggttggcctgtgtgacgacaagcgggtctcaaaagcccatcacgcaactggcctgcaattattggaggagagcgcgtcgagttggttccagaggctgcgtggtggggccggactctgcgacgacctctcgttcgcgtccgatttggttgccgtgagccgtgacgtaacgcctccttccgttcctccctatataagttccacccccgggtccggtttccccaagccccagtgacccccgatcccgatcgcgaaatctccgcacccgccggcaagggaccgaagcaagcctctctcccgaccgtcgcatcaaggtacgcgtccgctcgatctgtcctcttccttctcgatttgacttgctgtggtgcccgatcacgggatcagaatcgcaccagtgtagatttcgcatgttctaagatgtgttagtttccaggctaatccagttctcttgacgcccgatccgatcgagctccgtgtttatttcagcctaatcgtagtattcccctaaaatttcctcattagggggttcgcaagattgttggtcgacaggttcacttatgctcgatcgcttacttttagtcgattcatgctgcgtactattgttgccccccgtggttttatcttttctcgtgtgaaatccagtagatatagtagatatcgtagcattaggttttaattcaatcgattgattattgtatcatcaaaattgagaagttcgaatcatgcctatcatgctgcctcaaccgaaatcctgtatattgaagtttcaattcaattgattgatcattcattagattcaaccaaaatctagaaggttagatgacgcatgtcatgctgcctgcgtagtttacctttgatctgtttatgattaccttatcagtaggatatttgtgattttgggaagtagcactaactgattcatgctgacatgatgttccctttcagattatactgttgagtcctatctaattgatgctttgtatgctatatgaatacgtcatggtaaattagcagttaattagcatattagcaattgggcgtacctcatcaggattgctcttgtagatgtgtgtggtgatgtttcttgttcaattcatgttctgctttaaaagtatgtgttctctgtttgttaattaagattcatggttataatgatttggacctaattaatcagggttgcccttttagatgcgtggttacttgttgagttcatttttttcctgctatagttgtatgcgtttgttcattcatggttagatttgatttgtttcttctctattccatgccttccatatacttcaattgtagcttaacatgagatttctgtatatgcaggtcgaccgccggggatccacacgacaccatggcccagtccaagcacggcctgaccaaggagatgaccatgaagtaccgcatggagggctgcgtggacggccacaagttcgtgatcaccggcgagggcatcggctaccccttcaagggcaagcaggccatcaacctgtgcgtggtggagggcggccccttgcccttcgccgaggacatcttgtccgccgccttcatgtacggcaaccgcgtgttcaccgagtacccccaggacatcgtcgactacttcaagaactcctgccccgccggctacacctgggaccgctccttcctgttcgaggacggcgccgtgtgcatctgcaacgccgacatcaccgtgagcgtggaggagaactgcatgtaccacgagtccaagttctacggcgtgaacttccccgccgacggccccgtgatgaagaagatgaccgacaactgggagccctcctgcgagaagatcatccccgtgcccaagcagggcatcttgaagggcgacgtgagcatgtacctgctgctgaaggacggtggccgcttgcgctgccagttcgacaccgtgtacaaggccaagtccgtgccccgcaagatgcccgactggcacttcatccagcacaagctgacccgcgaggaccgcagcgacgccaagaaccagaagtggcacctgaccgagcacgccatcgcctccggctccgccttgccctccggactcagatctcgatagagtcaacctagacttgtccatcttctggattggccaacttaattaatgtatgaaataaaaggatgcacacatagtgacatgctaatcactataatgtgggcatcaaagttgtgtgttatgtgtaattactagttatctgaataaaagagaaagagatcatccatatttcttatcctaaatgaatgtcacgtgtctttataattctttgatgaaccagatgcatttcattaaccaaatccatatacatataaatattaatcatatataattaatatcaattgggttagcaaaacaaatctagtctaggtgtgttttgcgaattgcggcgcccttactttaacgcctctaaccaacacccctttatctttataaggaacaataaacagaatttgccccactgttctaaatcacctaataatatccccagctaaaaacaataaaggtttcctagaattaagacaagcatgactgttcctccaggagggtttggaacattgttgcagtcttgcagatacgggcgaagggtgagaaacagagcggagggctggaggtgacctcggtagtcgacgccggagttgagcttgacaacgacggggcggcccctgatggacttgaggaagtccgatggcgtcttcaccgtcccgccggcgcccgaggcgggcctgtcgctgccgccgccgccgctgctcatcttgcgcgctgtgcccccggcggtgtccctgtgttgcggatcgcgggtgggccaggtggatgcgagggcgacccgtttggactccggccggagccgccggatccctggtcggtgtcagtgccgtttactctgggccccacgtgtcagtaccgtctgtagatgacaacaacccgtcgtccacagtcatgtccaaaatatcctttcttcttttttttcgattcggatatctatcttccttttttttttccaaaaatcttcttgacgcaccagcgcgcacgtttgtggtaaacgccgacacgtcggtcccacgtcgatagaccccacccaccagtgagtagcgtgtacgtattcgggggtgacggacgtgtcgccgtcgtcttgctagtcccattcccatctgagccacacatctctgaacaaaaaaaaggagggaggcctccacgcacatccccctccgtgccacccgccccaaaccctcgcgccgcctccgagacagccgccgcaaccatggccaccgccgccgccgcgtctaccgcgctcactggcgccactaccgctgcgcccaaggcgaggcgccgggcgcacctcctggccacccgccgcgccctcgccgcgcccatcaggtgctcagcggcgtcacccgccatgccgatggctcccccggccaccccgctccggccgtggggccccaccgagccccgcaagggtgctgacatcctcgtcgagtccctcgagcgctgcggcgtccgcgacgtcttcgcctaccccggcggcgcgtccatggagatccaccaggcactcacccgctcccccgtcatcgccaaccacctcttccgccacgagcaaggggaggcctttgccgcctccggctacgcgcgctcctcgggccgcgtcggcgtctgcatcgccacctccggccccggcgccaccaacctagtctccgcgctcgccgacgcgctgctcgattccgtccccatggtcgccatcacgggacaggtggcgcgacgcatgattggcaccgacgccttccaggagacgcccatcgtcgaggtcacccgctccatcaccaagcacaactacctggtcctcgacgtcgacgacatcccccgcgtcgtgcaggaggctttcttcctcgcctcctctggtcgaccagggccggtgcttgtcgacatccccaaggacatccagcagcagatggcggtgcctgtctgggacaagcccatgagtctgcctgggtacattgcgcgccttcccaagccccctgcgactgagttgcttgagcaggtgctgcgtcttgttggtgaatcgcggcgccctgttctttatgtgggcggtggctgcgcagcatctggtgaggagttgcgacgctttgtggagctgactggaatcccggtcacaactactcttatgggcctcggcaacttccccagcgacgacccactgtctctgcgcatgctaggtatgcatgggacggtgtatgcaaattatgcagtggataaggccgatctgttgcttgcacttggtgtgcggtttgatgatcgcgtgacagggaagattgaggcttttgcaagcagggctaagattgtgcacgttgatattgatccggctgagattggcaagaacaagcagccacatgtgtccatctgtgcagatgttaagcttgctttgcagggcatgaatgctcttcttgaaggaagcacatcaaagaagagctttgactttggctcatggaacgatgagttggatcagcagaagagggaattcccccttgggtataaaacatctaatgaggagatccagccacaatatgctattcaggttcttgatgagctgacgaaaggcgaggccatcatcggcacaggtgttgggcagcaccagatgtgggcggcacagtactacacttacaagcggccaaggcagtggttgtcttcagctggtcttggggctatgggatttggtttgccggctgctgctggtgcttctgtggcaaacccaggtgtcactgttgttgacatcgatggagatggtagctttctcatgaacgttcaggagctagctatgatccgaattgagaacctcccagtgaaggtctttgtgctaaacaaccagcacctggggatggtggtgcagttggaggacaggttctataaggccaacagagcgcacacatacttgggaaacccagagaatgaaagtgagatatatccagatttcgtgacgatcgccaaagggttcaacattccagcggtccgtgtgacaaagaagaacgaagtccgcgcagcgataaagaagatgctcgagactccagggccgtacctcttggatataatcgtcccacaccaggagcatgtgttgcctatgatccctagtggtggggctttcaaggatatgatcctggatggtgatggcaggactgtgtactgactagctagtcagttaacagatctgccagatcctcggtgtacaaataacccgtcttatcctatgagacgggccggcgtcagtgtgttctggaggaatttttatgtcagagcctttttctttgtgtgcttgatgtagatgccaagggaagcttattggctgttgaagcttgatgcaaaataaattatggaactctgttttttgtttatctaataataactagcaaatatgcttccattgcattgaaactaacagccttttgtgtttccaagttttattttgtgacaatgtcatctatttcaattagttgtggaatcggaaacttgcaggactaacttggaaactccaatccctcagcatcctggactttttcctggtgtaatccatgtagatattattttaatcatcattttagttctggaggtttttccatctccggttttgctcccctttcttcaaaaaaaaaaaaaaaatgccgtaggcgccgcaacgcccacctgttgttcaaactcatgggcacgagtggctcgaagattttatacaacaattgctgtagtttcaccgttgctggtgaagaagcatttttttaaaaaaatatagtggtattcattttaattagtttagttgtgcagcgagcaaaatttggacatgctctgctcggaatctgatcgacctagacacagattagcagcagtagctttgtcatctgttccaagagttgcgatctgatagaagaaaaaaaaaccttcccttcaatgtaaaaccgaaactaacaagaaagaagcacagtgccgtttaggcaagtatggagtacgtattaagcatgtagaaggccatgcatgaaccactaacaagaaagaagcgcagtgccattcaggcaagcataagcatgtagattggcatgcatgaacaactaacagtagatcgtctctggtctgattagaagttttttgggaagccaagaaatcatgtacaactggttccatctcaaattccgtggcaaaaagaggcctaagcaacatacctcgagtagatcacattcaagcttggtcacccggtccgtcaatattctgattccgatgacttcgtaggttcctagctcaagccgctcgtgtccaagcgtcacttacgattagctaatgattacggcatctaggaccgactagtggcgcgccgactagctagctaaggtaccgagctcgaattcattccgattaatcgtggcctcttgctcttcaggatgaagagctatgtttaaacgtgcaagcgctactagacaattcagtacattaaaaacgtccgcaatgtgttattaagttgtctaagcgtcaatttgtttacaccacaatatatcctgcca

SEQ ID NO: 47 - DNA, 23835 bp, synthetic construct
  misc_feature 1..23835: note = PHP95385
  source 1..23835: mol_type = other DNA
gtttacccgccaatatatcctgtcaaacactgcggccgcacttgaccgcggatggagccggagctgtggtgaggccatcgacgggaggtgggggagaacacagtctcagtgttctttgtgagtccgcaaggtttttagcttttctgtattaattaaggttgctgttggctgtagaatacggtcgtggaagagctgtatcggtagctactacgtaagctattatatactggaagtctggagctcgtcgatctccggtcgtcttcctccatttctcctcgtcttgctttgactgctgctaccatttgcttctgttttctgatgaagcatgccatgtcggccaccagtgtttgtgtggtttttgcagggaatggctttcaagtgctgtgattgaatggccctcgtcgtcctcggctgagctcacatggacgcgtcatgtgagtgagatatatgatcatatgatgagtggggttcgggtgagtgcgtacttgaagtaggatcccgctttcactcattcattcattggcctttaaaccgggaaattttcgcgaggagatggagggaagcaagcagggtgacgagtgcagagtgccgcgagcgctttgtcaaaaggcaccgccgtaggcaaaaaaatcaatggccctgactgactcgatggtagtactactgtagagactagagagggttgctccccatatcttcgtgtgacttttactccagcattgcatttccgtcattgagacgttaattaatagcagctttcgggacagatgactgtggccatgtttcgtcacggccgcttcgtgccagctgggggtactatagtactgtgattttgttagtaaaaactttcattaggccaccattgacgaccgggccttcgcttttgctgcgctaattaaccatttcccggcgaccgaagggaacatgaacatgccccgacacatgagggcatgaggactagtgttctccctgtcgttcgttgacttgactagtgatagtttaaacgctcttcaactggaagagcggttactaccggttcactagctagctgctaatcgagctagttaccctatgaggtgacatgaagcgctcacggttactatgacggttagcttcacgactgttggtggcagtagcgtacgacttagctatagttccggacttacctagctaataacttcgtatagcatacattatacgaagttatggttacccggaccgaagcttgcatgcctgcagcccatccctcagccgcctttcactatcttttttgcccgagtcattgtcatgtgaaccttggcatgtataatcggtgaattgcgtcgattttcctcttataggtgggccaatgaatccgtgtgatcgcgtctgattggctagagatatgtttcttccttgttggatgtattttcatacataatcatatgcatacaaatatttcattacactttatagaaatggtcagtaataaaccctatcactatgtctggtgtttcattttatttgcttttaaacgaaaattgacttcctgattcaatatttaaggatcgtcaacggtgtgcagttactaaattctggtttgtaggaactatagtaaactattcaagtcttcacttattgtgcactcacctctcgccacatcaccacagatgttattcacgtcttaaatttgaactacacatcatattgacacaatattttttttaaataagcgattaaaacctagcctctatgtcaacaatggtgtacataaccagcgaagtttagggagtaaaaaacatcgccttacacaaagttcgctttaaaaaataaagagtaaattttactttggaccacccttcaaccaatgtttcactttagaacgagtaattttattattgtcactttggaccaccctcaaatcttttttccatctacatccaatttatcatgtcaaagaaatggtctacatacagctaaggagatttatcgacgaatagtagctagcatactcgaggtcattcatatgcttgagaagagagtcgggatagtccaaaataaaacaaaggtaagattacctggtcaaaagtgaaaacatcagttaaaaggtggtataaagtaaaatatcggtaataaaaggtggcccaaagtgaaatttactcttttctactattataaaaattgaggatgtttttgtcggtactttgatacgtcatttttgtatgaattggtttttaagtttattcgcttttggaaatgcatatctgtatttgagtcgggttttaagttcgtttgcttttgtaaatacagagggatttgtataagaaatatctttaaaaaaacccatatgctaatttgacataatttttgagaaaaatatatattcaggcgaattctcacaatgaacaataataagattaaaatagctttcccccgttgcagcgcatgggtattttttctagtaaaaataaaagataaacttagactcaaaacatttacaaaaacaacccctaaagttcctaaagcccaaagtgctatccacgatccatagcaagcccagcccaacccaacccaacccaacccaccccagtccagccaactggacaatagtctccacacccccccactatcaccgtgagttgtccgcacgcaccgcacgtctcgcagccaaaaaaaaaaaaagaaagaaaaaaaagaaaaagaaaaaacagcaggtgggtccgggtcgtgggggccggaaacgcgaggaggatcgcgagccagcgacgaggccggccctccctccgcttccaaagaaacgccccccatcgccactatatacatacccccccctctcctcccatccccccaaccctaccaccaccaccaccaccacctccacctcctcccccctcgctgccggacgacgagctcctcccccctccccctccgccgccgccgcgccggtaaccaccccgcccctctcctctttctttctccgttttttttttccgtcacggtctcgatctttggccttggtagtttgggtgggcgagaggcggcttcgtgcgcgcccagatcggtgcgcgggaggggcgggatctcgcggctggggctctcgccggcgtggatcaggcccggatctcgcggggaatggggctctcggatgtagatctgcgatccgccgttgttgggggagatgatggggggtttaaaatttccgccatgctaaacaagatcaggaagaggggaaaagggcactatggtttatatttttatatatttctgctgcttcgtcaggcttagatgtgctagatctttctttcttctttttgtgggtagaatttgaatccctcagcattgttcatcggtagtttttcttttcatgatttgtgacaaatgcagcctcgtgcggagcttttttgtaggtagaaggatccgcccatggcggccaatgcgggcggcggtggagcgggaggaggcagcggcagcggcagcgtggctgcgccggcggtgtgccgccccagcggctcgcggtggacgccgacgccggagcagatcaggatgctgaaggagctctactacggctgcggcatccggtcgcccagctcggagcagatccagcgcatcaccgccatgctgcggcagcacggcaagatcgagggcaagaacgtcttctactggttccagaaccacaaggcccgcgagcgccagaagcgccgcctcaccagcctcgacgtcaacgtgcccgccgccggcgcggccgacgccaccaccagccaactcggcgtcctctcgctgtcgtcgccgccgccttcaggcgcggcgcctccctcgcccaccctcggcttctacgccgccggcaatggcggcggatcggctgtgctgctggacacgagttccgactggggcagcagcggcgctgctatggccaccgagacatgcttcctgcaggactacatgggcgtgacggacacgggcagctcgtcgcagtggccacgcttctcgtcgtcggacacgataatggcggcggccgcggcgcgggcggcgacgacgcgggcgcccgagacgctccctctcttcccgacctgcggcgacgacggcggcagcggtagcagcagctacttgccgttctggggtgccgcgtccacaactgccggcgccacttcttccgttgcgatccaacagcaacaccagctgcaggagcagtacagcttttacagcaacagcaacagcacccagctggccggcaccggcaaccaagacgtatcggcaacagcagcagcagccgccgccctggagctgagcctcagctcatggtgctccccttaccctgctgcagggagtatgtgagagcaacgcgagctgccactgctcttcactgatgtctctggaatggaaggaggaggaagtgagaacagatcattcgacaaagcagcattagtccgttgatcggtggaagaccactcgtcagtgttgagttgaatgtttgatcaataaaatacggcaatgctgtaagggttgttttttatgccattgataatacactgtactgttcagttgttgaactctatttcttagccatgccaagtgcttttcttattttgaataacattacagcaaaaagttgaaagacaaaaaaaaaaacccccgaacagagtgctttgggtcccaagcttctttagactgtgttcggcgttccccctaaatttctccccctatatctcactcacttgtcacatcagcgttctctttccccctatatctccacgctctacagcagttccacctatatcaaacctctataccccaccacaacaatattatatactttcatcttcaactaactcatgtaccttccaatttttttctactaataattatttacgtgcacagaaacttagcaaggagagagagagcgggaatttaaatgctcggcgttaggcttttagtccgctaggtggctagaccgaggttaggacgctagttcactaggggcctagtggtgttttaagacgtcacggtcaccacgcgtggaccgaagcttgcatgcctgcagtgcagcgtgacccggtcgtgcccctctctagagataatgagcattgcatgtctaagttataaaaaattaccacatattttttttgtcacacttgtttgaagtgcagtttatctatctttatacatatatttaaactttactctacgaataatataatctatagtactacaataatatcagtgttttagagaatcatataaatgaacagttagacatggtctaaaggacaattgagtattttgacaacaggactctacagttttatctttttagtgtgcatgtgttctcctttttttttgcaaatagcttcacctatataatacttcatccattttattagtacatccatttagggtttagggttaatggtttttatagactaatttttttagtacatctattttattctattttagcctctaaattaagaaaactaaaactctattttagtttttttatttaataatttagatataaaatagaataaaataaagtgactaaaaattaaacaaataccctttaagaaattaaaaaaactaaggaaacatttttcttgtttcgagtagataatgccagcctgttaaacgccgtcgacgagtctaacggacaccaaccagcgaaccagcagcgtcgcgtcgggccaagcgaagcagacggcacggcatctctgtcgctgcctctggacccctctcgagagttccgctccaccgttggacttgctccgctgtcggcatccagaaattgcgtggcggagcggcagacgtgagccggcacggcaggcggcctcctcctcctctcacggcaccggcagctacgggggattcctttcccaccgctccttcgctttcccttcctcgcccgccgtaataaatagacaccccctccacaccctctttccccaacctcgtgttgttcggagcgcacacacacacaaccagatctcccccaaatccacccgtcggcacctccgcttcaaggtacgccgctcgtcctcccccccccccctctctaccttctctagatcggcgttccggtccatgcatggttagggcccggtagttctacttctgttcatgtttgtgttagatccgtgtttgtgttagatccgtgctgctagcgttcgtacacggatgcgacctgtacgtcagacacgttctgattgctaacttgccagtgtttctctttggggaatcctgggatggctctagccgttccgcagacgggatcgatttcatgattttttttgtttcgttgcatagggtttggtttgcccttttcctttatttcaatatatgccgtgcacttgtttgtcgggtcatcttttcatgcttttttttgtcttggttgtgatgatgtggtctggttgggcggtcgttctagatcggagtagaattctgtttcaaactacctggtggatttattaattttggatctgtatgtgtgtgccatacatattcatagttacgaattgaagatgatggatggaaatatcgatctaggataggtatacatgttgatgcgggttttactgatgcatatacagagatgctttttgttcgcttggttgtgatgatgtggtgtggttgggcggtcgttcattcgttctagatcggagtagaatactgtttcaaactacctggtgtatttattaattttggaactgtatgtgtgtgtcatacatcttcatagttacgagtttaagatggatggaaatatcgatctaggataggtatacatgttgatgtgggttttactgatgcatatacatgatggcatatgcagcatctattcatatgctctaaccttgagtacctatctattataataaacaagtatgttttataattattttgatcttgatatacttggatgatggcatatgcagcagctatatgtggatttttttagcactgccttcatacgctatttatttgcttggtactgtttcttttgtcgatgctcaccctgttgtttggtgttacttctgcaggtcgactttaacttagcctaggatccatggccactgtgaacaactggctcgctttctccctctccccgcaggagctgccgccctcccagacgacggactccacactcatctcggccgccaccgccgaccatgtctccggcgatgtctgcttcaacatcccccaagattggagcatgaggggatcagagctttcggcgctcgtcgcggagccgaagctggaggacttcctcggcggcatctccttctccgagcagcatcacaaggccaactgcaacatgatacccagcactagcagcacagtttgctacgcgagctcaggtgctagcaccggctaccatcaccagctgtaccaccagcccaccagctcagcgctccacttcgcggactccgtaatggtggcttcctcggccggtgtccacgacggcggtgccatgctcagcgcggccgccgctaacggtgtcgctggcgctgccagtgccaacggcggcggcatcgggctgtccatgattaagaactggctgcggagccaaccggcgcccatgcagccgagggtggcggcggctgagggcgcgcaggggctctctttgtccatgaacatggcggggacgacccaaggcgctgctggcatgccacttctcgctggagagcgcgcacgggcgcccgagagtgtatcgacgtcagcacagggtggagccgtcgtcgtcacggcgccgaaggaggatagcggtggcagcggtgttgccggcgctctagtagccgtgagcacggacacgggtggcagcggcggcgcgtcggctgacaacacggcaaggaagacggtggacacgttcgggcagcgcacgtcgatttaccgtggcgtgacaaggcatagatggactgggagatatgaggcacatctttgggataacagttgcagaagggaagggcaaactcgtaagggtcgtcaagtctatttaggtggctatgataaagaggagaaagctgctagggcttatgatcttgctgctctgaagtactggggtgccacaacaacaacaaattttccagtgagtaactacgaaaaggagctcgaggacatgaagcacatgacaaggcaggagtttgtagcgtctctgagaaggaagagcagtggtttctccagaggtgcatccatttacaggggagtgactaggcatcaccaacatggaagatggcaagcacggattggacgagttgcagggaacaaggatctttacttgggcaccttcagcacccaggaggaggcagcggaggcgtacgacatcgcggcgatcaagttccgcggcctcaacgccgtcaccaacttcgacatgagccgctacgacgtgaagagcatcctggacagcagcgccctccccatcggcagcgccgccaagcgcctcaaggaggccgaggccgcagcgtccgcgcagcaccaccacgccggcgtggtgagctacgacgtcggccgcatcgcctcgcagctcggcgacggcggagccctggcggcggcgtacggcgcgcactaccacggcgccgcctggccgaccatcgcgttccagccgggcgccgccagcacaggcctgtaccacccgtacgcgcagcagccaatgcgcggcggcgggtggtgcaagcaggagcaggaccacgcggtgatcgcggccgcgcacagcctgcaggacctccaccacctgaacctgggcgcggccggcgcgcacgactttttctcggcagggcagcaggccgccgccgctgcgatgcacggcctgggtagcatcgacagtgcgtcgctcgagcacagcaccggctccaactccgtcgtctacaacggcggggtcggcgacagcaacggcgccagcgccgtcggcggcagtggcggtggctacatgatgccgatgagcgctgccggagcaaccactacatcggcaatggtgagccacgagcaggtgcatgcacgggcctacgacgaagccaagcaggctgctcagatggggtacgagagctacctggtgaacgcggagaacaatggtggcggaaggatgtctgcatgggggactgtcgtgtctgcagccgcggcggcagcagcaagcagcaacgacaacatggccgccgacgtcgggcatggcggcgcgcagctcttcagtgtctggaacgacacttaagcgtacctagtggtacctgacatcttatagtctgcaacctctcgtgtctgaattcctatctttatcaagtgttattgcttccacgactataggacagctttcgtcgaaagcttttgctcatgtgatctcgaaggattcatctagtctgatttttcgtgacttgtatcggttttattggattcatccaacatatatcaataaaaaatgagttgtgtttcctttcttcctagttcagttaaaattatttccctcctgcgcttgtgctgtaattgtctgtgtacctgttgtttgtgactgtgttagttcccttggatatgatttcgtatttgatatgtacatggagatagcttagcttcattattggagtatgaagttagtatgacatagtcactctcctggaaaattgacactgcaaaccatatttttattctgaaccacaaatcctagtcagtccgctggcatatgccgtccgtttgctgaatccagaacgtgggtttggagatgtacggctgagatgcctctatgcgaaggggatttcgtggtgaaacgagatgggagtagagcaacgcccgtggaagatgcttcaaacttccacacttttgagcaacgatcggcagtagtaaggtagacgatttcaagatcaaagcatatgaagataaacaacatcaacaacaaaatttgttggggttctatagagagaaacagagctacatacatacactgttttgtatctaccatctgagatgatgaaaagatgaaaaactaaagaatgccccggcgccaacgccaggacacgccgcgcgcgcgtcacccgagccatctcttgacccagccggcgctgtatatttacacacgttgcagcatcgatcaccacctgttcgatcgcgtcgccgtcaccggcgcgccgcgacttattgaactagtctagggcgcggctaacaacctagcttagattgccttgtctaaacccttaggctaacgcgccactctagaaggccgatctcccccgaacgcgccagatcttgaagaaactatgtgctgtagtatagccgctgcccgctggctagctagctagttgagtcatttagcggcgatgattgagtaataatgtgtcacgcatcaccatgcatgggtggcagtgtcagtgtgagcaatgacctgaatgaacaattgaaatgaaaagaaaaaagtattgttccaaattaaacgttttaaccttttaataggtttatacaataattgatatatgttttctgtatatgtctaatttgttatcatccatttagatatagacaaaaaaaatctaagaactaaaacaaatgctaatttgaaatgaagggagtatatattgggataatgtcgatgagatccctcgtaatatcaccgacatcacacgtgtccagttaatgtatcagtgatacgtgtattcacatttgttgcgcgtaggcgtacccaacaattttgatcgactatcagaaagtcaacggaagcgagtcgacctcgagggggggccccggccgaagcttcggccggggcccatcgataacgagtatcggtccccattgacacatctactcctaacgctaacaacattcttcacttctagtgtatggcatcgacaattggtactttaatcttgggtcttcacttttacaactaaacaacccaaatataaatattatttgagtgggtttggtgttcatcagaacattcccatctttggtaatgctacctagcataaaagtgagctatcacgttgggcagcccattccatgcaatttttaccttcctcaaaaaaaatctttgatatatttatggtataataatttaaacttcacattgatcataattttttcagcaaataagttccataatttggtgtttgcaatatcgaaattgttactcatagggtccagttgatttaatgacattagtgttgttaagttcacatgcttcaaagaattctacatgtctacaatgctgcatttgtctgtaaaatttgggttcttgtaaaaaatacatgtgttgaatatttaccaaaaaaatataatgcgatatgactttgtgtgagcatgtttggacacagttacaagtttacttctaaacttatattatgttttgcttcgtgcaagtacaagtgatttgaatatccaaggccaaagcatgtgtccatcactatatcaaatcaacataccatatatgtatatactcaacaaaaagcacaaataatcacatctatgttataaacacacccccacacaaccaaacattaacattcaataggttgtgctaggacatcattgggatgatgaagtaatattgtattatctatgtattgaccaagcatgagtttaaaattacgatttgatgttttcagttatttatatgatgaacatagttcagaaatatatcgagataaatctcaatcaatatattgattatttctaggaaacacatgccggtatgagggcaccattgtcgagtacatcttaagtgagttaacggatcctctagagtcgacctgcaggcatgcccgcggatatcgatgggccccggccgaagcttcaagtttgtacaaaaaagcaggctccggccagaatggcccggaccgggttaccgaattcgagctcggtaccctggttcacaaactcaatacaacacacagtggagtagggtattacgctccggcggcccgaaccactctaaatccttgtgtcctcgtgtgctcttccaccattaatgactgtaattgcagggacacgaagagttgtagcgcttttgccaacaagatccgctatatgctagtagagtggaacctgcacagcaacaagcatccaataatctgagaataagaattatgtgtggtgatggttctcatctctgcaactcgccattttcgcgagagaaccaaatccaagttggtgaagatcatgatttgggctcatgggctggcatagtagctattacctttgcaattgtggttcgaatctatccgatattctccttttcagggagagctaatgcttatgcttattgggtattttggtttgacactgcttcacgcccaaaaaaaggcaactatgtctgagttggatatggcccaaaaaaaggcagctatgtctgagttggatatggaagtcttctttcgtttagggtgaagtaagaccaagctcatgagcttattatcttaggtcggaacaaattagttgataggcatggcacatttatcaaattataatgattttaacagaaaagcaacacctctttttcagcagcaccagctttgcaagctgcaattgacactccaagcatagtatttgctccaaactcagcctgcatttcgcacaatatcatatctatttccatttggataaaatatattttccagaaatatgggaacagaatcaagatacagaaaaaagttgtggtagtagtggtaagtggaaacacaagtacagtgaaaagatagcattatttctgaacagtcaaattaaccgaaataagtagtatcacatactgcccctaaattgactacacccaatgtaaagaattgcttgagcatattgagccatcagttgtttgtttgtgtaacggatttgacaatgcagagttcaggagcaaaaaaccgcaaaggagagaaagagggaaaggatctcctagtatcccaccttgtggcgcgccctgtcaagtgcatgatggcctggtcgatctgcgtctgctgctgcggttccatcccaacgagtgcctccgacaccttgtcgttgatcacccgcaccgcgtaggcgacccccctggcgaggaacttccgcctctcggaggccccggccgcgtcggcggcggcgccctcgagcgcgcccacgctagccgtagatgctcggtgcacggccttgttggtgtgcaactcgacctcaacggccggtgcgctacgcccgtcaaggatctggcgcgcccgcaccctcgtgatcacggtgggcgcctcccgcctcatgtggccgacgatgaaaagcgccgggttaggggccttggcgcgcaccgccgtattcagggcctcctcgctcttgcgcgagagcaggtgcttccccaggtactcctgcactgacaaggctgccacagcggtggaatttgtcctcacgacttcgccacgtcgtcctcacctccctggcttcccacgactccgccgtatcgaggtgctcggtgggtcgtcttaatccgaagtccgaactaggaagacgagacagagaggtctgaggaatgggcctcgtttgatgttgagctgaattatttttccagcataagcccaggtcttggtccatgaacaaaattactagaaacccagcccagtactacgatctaaaagagggactgccactggatagctctctctagcattctccacgctccaatacagcggcgtcgtgtctatccgggtctatccgcgaacacgtgagaactctccagaaactgctttctcctccacttcatctctctcgctttccctctataaaaagaccccttctaggaattgagggagacagcaagcaccaagcagcgatccgaagctcaatcaattcactcaaacctcttccccaaatcttcgattagatcttcgttgacaagaagactagaaccgaacctgacatgtccaacctgctcacggttcaccagaaccttccggctcttccagtggacgcgacgtccgatgaagtcaggaagaacctcatggacatgttccgcgacaggcaagcgttcagcgagcacacctggaagatgctgctctccgtctgccgctcctgggctgcatggtgcaagctgaacaacaggaagtggttccccgctgagcccgaggacgtgagggattaccttctgtacctgcaagcgcgaggtttgtttctgcttctacctttgatatatatataataattatcattaattagtagtaatataatatttcaaatatttttttcaaaataaaagaatgtagtatatagcaattgcttttctgtagtttataagtgtgtatattttaatttataacttttctaatatatgaccaaaacatggtgatgcctaggtctggcagtgaagaccatccagcaacaccttggacaactgaacatgcttcacaggcgctccggcctcccgcgccccagcgactcgaacgccgtgagcctcgtcatgcgccgcatcaggaaggaaaacgtcgatgccggcgaaagggcaaagcaggccctcgcgttcgagaggaccgatttcgaccaggtccgcagcctgatggagaacagcgacaggtgccaggacattaggaacctggcgttcctcggaattgcatacaacacgctcctcaggatcgcggaaattgcccgcattcgcgtgaaggacattagccgcaccgacggcggcaggatgcttatccacattggcaggaccaagacgctcgtttccaccgcaggcgtcgaaaaggccctcagcctcggagtgaccaagctcgtcgaacgctggatctccgtgtccggcgtcgcggacgacccaaacaactacctcttctgccgcgtccgcaagaacggggtggctgcccctagcgccaccagccaactcagcacgagggccttggaaggtattttcgaggccacccaccgcctgatctacggcgcgaaggatgacagcggtcaacgctacctcgcatggtccgggcactccgcccgcgttggagctgctagggacatggcccgcgccggtgtttccatccccgaaatcatgcaggcgggtggatggacgaacgtgaacattgtcatgaactacattcgcaaccttgacagcgagacgggcgcaatggttcgcctcctggaagatggtgactgaggtaccggctccacgtagtcgttatcgacgatcggcgacactactggagttggagcaacgtctagttccagcaataatataatgcaatattactgtagtagtagtagtatactataggacccctcctagctagcatgcggacatgctcttgtgatcttgtctcgggtccagacttcaataaagccatcttggcattatatgtactatacaaaaaagattatcactgctttctctcgatcgcaaatcatcctgtttttttttttggcaaaaagttcagcgtttctttctctctctctgactaccaaactgttgacagaaagaaaaaggtcaaaggagtttgcgaacgtacagtacagacataaaaaaacaaacacaagcagaaatatcaaatactgtgtttggttgttgtggcacgttgggcgtggtggaactgcggcacagttcttcgtgtagttttgcacaacttctgcctaaagttcgcactgatttcttgcactagatattcggggacaccacagctacctgcgcgcgtataaggtaaacaggccctaataacaaccgtctcaatattgtgtgatgtgtttgaggtcagatttgatcaatcaagaacatcttaacctataagatataggtaaataacaagccatctctttaacagtgaacatgtgtctctcaaacatattaaataatattggtgcggttagtgtgaagaaagtactgttagctgatttgttgtgaaagaaaaatattactgaatgactaacatctcttccaaactaaatgtttgcgtgtgaaataatggatattgtcggttccaaactaaatgtttgcgtgtgaaataatggatattgtcggatagagcacaaggtgctcaccttctgcacccaatataatttcactcaagaacgagcaggatatcgatcgacgatctcaaatgagcaacacgagctcagcataatatcgtgagccgtgatccgtcgccccgctaacttaagtataacttcgtatagcatacattatacgaagttattcggtccgggatctcccgggcacccagctttcttgtacaaagtggccgttaacggatcggccagaatggcccggaccgggttaccctgcccttaaggccaattgttcaagattcattcaacaattgaaacatctcccatgattaaatcagtataaggttgctatggtcttgcttgacaaagtttttttttgagggaatttcaactaaatttttgagtgaaactatcaaatactgattttaaaaaatttttataaaaggaagcgcagagataaaaggccatctatgctacaaaagtacccaaaaatgtaatcctaaagtatgaattgcattttttttttgtttggacgaaaggaaaggagtattaccacaagaatgatatcatcttcatatttagatcttttttgggtaaagcttgagattctctaaatatagagaaatcagaagaaaaaaaaaccgtgttttggtggttttgatttctagcctccacaataactttgacggcgtcgacaagtctaacggacaccaagcagcgaaccaccagcgccgagccaagcgaagcagacggccgagacgttgacaccttcggcgcggcatctctcgagagttccgctccggcgctccacctccaccgctggcggtttcttattccgttccgttccgcctcctgctctgctcctctccacaccacacggcacgaaaccgttacggcaccggcagcacccagcacgggagaggggattcctttcccaccgttccttccctttccgccccgccgctataaatagccagccccatccccagcttttttccccaatctcatctcctctctcctgttgttcggagcacacgcacaatccgatcgatccccaaatccccttcgtctctcctcgcgagcctcgtggatcccagcttcaaggtacggcgatcgatcatcccccctccttctctctaccttcttttctctagactacatcggatggcgatccatggttagggcctgctagtttcccttcctgttttgtcgatggctgcgaggcacaatagatctgatggcgttatgacggctaacttgtcatgttgttgcgatttatagtccctttaggagatcagtttaatttctcggatggttcgagatcggtggtccatggttagtaccctaagatccgcgctgttagggttcgtagatggaggcgacctgttctgattgttaacttgtcagtacctgggaaatcctgggatggttctagctcgtccgcagatgagatcgatttcatgatcctctgtatcttgtttcgttgcctaggttccgtctaatctatccgtggtatgatgtagatgttttgatcgtgctaactacgtcttgtaaagttaattgtcaggtcataatttttagcatgcctttttttttgtttggttttgtctaattgggctgtcgttctagatcagagtagaagactgttccaaactacctgctggatttattgaacttggatctgtatgtgtgtcacatatcttcataaattcatgattaagatggattgaaatatcttttatctttttggtatggatagttctatatgttggtgtggctttgttagatgtatacatgcttagatacatgaagcaacgtgctgctactgtttagtaattgctgttcatttgtctaataaacagataaggatatgtatttatgttgctgttggttttgctggtactttgttggatacaaatgcttcaatacagaaaacagcatgctgctacgatttaccatttatctaatcttatcatatgtctaatctaataaacaaacatgcttttaaattatcttcatatgcttggatgatggcatacacagcggctatgtgtggttttttaaatacccagcatcatgggcatgcatgacactgctttaatatgctttttatttgcttgagactgtttcttttgtttatactgaccctttagttcggtgactcttctgcaggtcgactttaacttagcctaggatccatggcccagtccaagcacggcctgaccaaggagatgaccatgaagtaccgcatggagggctgcgtggacggccacaagttcgtgatcaccggcgagggcatcggctaccccttcaagggcaagcaggccatcaacctgtgcgtggtggagggcggccccttgcccttcgccgaggacatcttgtccgccgccttcatgtacggcaaccgcgtgttcaccgagtacccccaggacatcgtcgactacttcaagaactcctgccccgccggctacacctgggaccgctccttcctgttcgaggacggcgccgtgtgcatctgcaacgccgacatcaccgtgagcgtggaggagaactgcatgtaccacgagtccaagttctacggcgtgaacttccccgccgacggccccgtgatgaagaagatgaccgacaactgggagccctcctgcgagaagatcatccccgtgcccaagcagggcatcttgaagggcgacgtgagcatgtacctgctgctgaaggacggtggccgcttgcgctgccagttcgacaccgtgtacaaggccaagtccgtgccccgcaagatgcccgactggcacttcatccagcacaagctgacccgcgaggaccgcagcgacgccaagaaccagaagtggcacctgaccgagcacgccatcgcctccggctccgccttgccctccggactcagatctcgatagggtaccaatggccagttaacagatccagctgctgctgttctagggttcacaagtctgcctatttgtcttccccaatggagctatggttgtctggtctggtccttggtcgtgtcccgtttcattgtgtactatttacctgtaatgtgtatccttaagtctggtttgatggtgtctgaaacgttttgctgtggtagagcagcatggaagaactataatgaataagtgatccctaatcattgtgtccaaattttgcttctgctatacccttttgtgctgtttcttatgttttgcttaaaaatttgatctgacaaacaaatttgtctaaattatgctcttgttctgactgtgtactgtacacatttgtattgctaccggtttggcacatagttttctctttgattgcagatcaaacccttctgattgcagattgcttggctatggctgatgtgctcactgttcttctttagcttgtatattgctgatggtggcttggctacggctgaaaaagttgctgctgcgccgacttggcaactgttgctccagtaatgctttgtcctctcttcctagccgccgacttggcacttggcagctgttgctcctgtaatgcgttgttatctcttatctcttgagatgtactatgattttgaggctgtttgacttgtgccagattgccagtgctgatgctatattatctcaggtttttatgctagtatatgttttactgtgtgctgcctgtgtcgagttacgtaatctattgaaccgctatgcgtgttgatgccctgttgttgcttgccagattgatgcccctgttgcttgcagcttgcaagctgtagtgaaatcctaaaattcgaaaccaaatctattctgaacttttgaagatctgtgatgtccggaagaaaagattcaaacagataaacgggactctccagaatctataaaataaatgatcgacaaacgctttgctttggtaggcttcctagttagttagcggaccgggatccgacggcgtcttcaccgccccgccgccgcccgagccggacttgtcgctgccgccgccgctgctcatcttgcgcgcttgtgtccctccctcagtccctgcgttcgcggatcgcgggcgggtgcgacccgtttggactccggccggtagccttcgtgccgacctcgctcggtccaccggtttgtcggggacccacatgtcagtgaaggtacgcgtccacgtccacagaccctactaccccagacgagtccaaatcgctgttccctcacactctcgtgtaccagcgcgcggcggaaagcacctttccaacaaccgccgacacgtcggtcccacgtcggcatgctccaccggtcagtgtttggcgtgtacggctcccggcgacgaacgagtgtggcctaagctttcctactcccatcccatctgagccacacatctctctcacgccacgcgcacaaaacagccaggctcccacgcgcatcaaccggctctccctttccgtgccactcgcccccaagccccaaaccctcgccgccgcctccgagacagccgccgccacctaggccatggccaccgccgccgccgcgtctaccgcgctcactggcgccactaccgctgcgcccaaggcgaggcgccgggcgcacctcctggccacccgccgcgccctcgccgcgcccatcaggtgctcagcggcgtcacccgccatgccgatggctcccccggccaccccgctccggccgtggggccccaccgagccccgcaagggtgctgacatcctcgtcgagtccctcgagcgctgcggcgtccgcgacgtcttcgcctaccccggcggcgcgtcgatggagatccaccaggcactcacccgctcccccgtcatcgccaaccacctcttccgccacgagcaaggggaggcctttgccgcctccggctacgcgcgctcctcgggccgcgtcggcgtctgcatcgccacctccggccccggcgccaccaacctagtctccgcgctcgccgacgcgctgctcgattccgtcccgatggtcgccatcacgggacaggtggcgcgacgcatgattggcaccgacgccttccaggagacgcccatcgtcgaggtcacgcgctccatcaccaagcacaactacctggtcctcgacgtcgacgacatcccccgcgtcgtgcaggaggctttcttcctcgcctcctctggtcgaccagggccggtgcttgtcgacatccccaaggacatccagcagcagatggcggtgcctgtctgggacaagcccatgagtctgcctgggtacattgcgcgccttcccaagccccctgcgactgagttgcttgagcaggtgctgcgtcttgttggtgaatcgcggcgccctgttctttatgtgggcggtggctgcgcagcatctggtgaggagttgcgacgctttgtggagctgactggaatcccggtcacaactactcttatgggcctcggcaacttccccagcgacgacccactgtctctgcgcatgctaggtatgcatgggacggtgtatgcaaattatgcagtggataaggccgatctgttgcttgcacttggtgtgcggtttgatgatcgcgtgacagggaagattgaggcttttgcaagcagggctaagattgtgcacgttgatattgatccggctgagattggcaagaacaagcagccacatgtgtccatctgtgcagatgttaagcttgctttgcagggcatgaatgctcttcttgaaggaagcacatcaaagaagagctttgactttggctcatggaacgatgagttggatcagcagaagagggaattcccccttgggtataaaacatctaatgaggagatccagccacaatatgctattcaggttcttgatgagctgacgaaaggcgaggccatcatcggcacaggtgttgggcagcaccagatgtgggcggcacagtactacacttacaagcggccaaggcagtggttgtcttcagctggtcttggggctatgggatttggtttgccggctgctgctggtgcttctgtggcaaacccaggtgtcactgttgttgacatcgatggagatggtagctttctcatgaacgttcaggagctagctatgatccgaattgagaacctcccagtgaaggtctttgtgctaaacaaccagcacctggggatggtggtgcagttggaggacaggttctataaggccaacagagcgcacacatacttgggaaacccagagaatgaaagtgagatatatccagatttcgtgacgatcgccaaagggttcaacattccagccgtccgtgtgacaaagaagaacgaagtccgcgcagcgataaagaagatgctcgagactccagggccgtacctcttggatataatcgtcccacaccaggagcatgtgttgcctatgatccctagtggtggggctttcaaggatatgatcctggatggtgatggcaggactgtgtactgacttcgaataggtacccggggatcctctagtgccgtgggtcgtttaagctgccgctgtacctgtgtcgtctggtgccttctggtgtacctgggaggttgtcgtctatcaagtatctgtggttggtgtcatgagtcagtgagtcccaatactgttcgtgtcctgtgtgcattatacccaaaactgttatgggcaaatcatgaataagcttgatgttcgaacttaaaagtctctgctcaatatggtattatggttgtttttgttcgtctcctaatatttgcctgggatcaaattttattggctggtgttcatttgacctccatgttcttgctaggctccattttttactctacagccataatatgtttgattgtttggtttgttctttgttgtacacctggttctgtcgagcttagttttcgacactggcttacagcttaacatgttgctattttattgggttctgattgctattttattgggttctgattgctagtttttgctgaatccaaaaaccatgttatttatttaagcgatccaggttattattatgatggtggctaagtttttttttttccaagggtaaattttctggattctccagtgtttctgtggccgaattcaatcactagagtcgacctgcaaagcttcggtccgggcctagaaggcccgcgccacttacgcttgattccgatgacttcgtaggttcctagctcaagccgctcgtgtccaagcgtcacttacgattagctaatgattacggcatctaggaccgactagttcttatgtgcttctagtctccaaatgtggttgatagttattttgctctaagatcaacagtaatgaagtataaatcatcgttgtggtgtgctactcggttaattgagcattaacacacacaaacatgacgaggatggtataatctccaaaaatgtgtactttgttaggtgggaccctatagccttgattaatgtgctatgttaggcatgcctggaaacgtgtgacgcatatgttttgtgaacctgttgatattatatgtgcttttatattaccatattttattaaaatactaatatttattactagtaagatataacattctatctagcttaaaaactaaccataaatattccataataactagatttaccaaactaatatactaaatatacataataaatacaaaattaacaagacaataatcaatatttatgagcttaatatatttagacattatggttggtcgacgataatcatgctaacttttcgtaattgcttgattgaaatatgcttagaataatgcctctttgttctacatggcaaatagggaccattatggtgtaacaccctgggaaccacaaacaccccgaaatgctactaaactacacaactaaccttcatatataaaatttcgacagcatctcctttgaaaatttgcatagacgtggaagcaacagagtataaacagatctgcgtttaaacgtgcaagcgctactagacaattcagtacattaaaaacgtccgcaatgtgttattaagttgtctaagcgtcaatttgtttacaccacaatatatcctgcca

SEQ ID NO: 48 - DNA, 23121 bp, synthetic construct
  misc_feature 1..23121: note = PHP95393
  source 1..23121: mol_type = other DNA
gtttacccgccaatatatcctgtcaaacactgatagtttaaactgaaggcgggaaacgacaatctgatcatgagcggagaattaagggagtcacgttatgacccccgccgatgacgcgggacaagccgttttacgtttggaactgacagaaccgcaacgttgaaggagccactcagcaagctggtacgattgtaatacgactcactatagggcgaattgagcgctgtttaaacgctcttcaactggaagagcggttacgctgtttaaacgctcttcaactggaagagcggttactaccggttcactagctagctgctaatcgagctagttaccctatgaggtgacatgaagcgctcacggttactatgacggttagcttcacgactgttggtggcagtagcgtacgacttagctatagttccggacttacccttaagcgatttaaatctgcggttaccgaattcgagctcggtacctagtacccttgtacttttggtttcacctgcatagagaaaacccacaagaatatgacagtctgatttgtcagtctcattctcaagcaacatttctctatccgttactttcatggtgaataacacaatccatcatcaatactttgtgttactcagaaactgaaagttattccgagtcttgcatatctttggacctactcgtttttctaccattattgctgattgttaagctctcgctacttgaatcggcattgttggagtgggaaggttcaaaaaattggagttatgactagttgtctctttctatgtacgatggagaaaatgaataaacaactgagaaaatggctcttgtttagttgatgatgctcttaagctttccactggttgccatatatgatttgggcatttcactttgatcttaatgggccttgtaaagcccaagactcatgattatctttagttgatgctcttaattaggtgtgggcaaataattcaaactgtatgtacccgaccaaaaccaaagcaaaaataatcgaaccaaaccgaaaatttaaaaataaccgaatgaaaactaaatcctataactgaaagaactgaaaccgaatcaaaatatttaatgtaaccaaaaatatccgaaatataattatattgtcaaaaatattaataatttctagattaaataattaaaaatacttaaaaatttatataaaatagtaaaaatactcgaaaataaccacaaatattcaaaaacaaccgaaatatcccaaaatattcaaagcaaaataaccgaatggataccaaattttaaaaccgaaaaaactggaacaaaaccaaaatcgaaccaaaatttcaaaaatcgaataaatactaaactttagaacaaaaaaaaacgataaccgaatgtatacgaaccaaagccgaattagataaccgaacgtccaggactactcttaatctttccgccacttatgatttgggctattactttgtttataatgagccttttcaagctcaagttcatgattgtccgtgagatgagaaactgacttgttggattcgaaaccctagctagtattggttaatacttaatacataaatgacctgcattgacatcatcatccaagaaaataaaaattgtatgcttgagatatttagttttcctagctaggttttctttattttagtaccgaatctttaggtgtgccacgttaatttagacccattttttcatacttaccaactgagtctagtttaatcatgactataatcgtataaaatgattcagtcgacgtcattgcgaacgtatataaaatcatccaaattgacgtcattccaaagaggtaagcatgcttatctaagagtccgagcatactaaacaagacgacattttatttgcactccaaatcaaattttgtattgcctaaagaaaaacaatcaaactcaagtttcttaaaattaatttcattcaaactaatcactttcaatatctcacatattattcatgccatttctatttgtctaaacatgatttaaaaaaaaaagtaaaatacaaagattactatgcaaaaactctataaaaaaaaattcaaatttcttatttatttgtgacatcaaattttcaaaataatttttttaattatcggttgatccggtcagtcgataaaaacataaactttcagcgaccgttaaaactttcctactaccgatttagagaaaatcttagcttgaaacgtaattgtaacctgccttcatgcaagtcgcaagatatgtcatcctaagttgtatatgttttctcaaaagatgtatttacttgagaaaatacgtttcaacgttgatggacaaccaattaagaatcaagcacctttcgtaatcaatttaggcttatcgtctaaggtatactgatttacgacagttgactagacttataaggaacaaaataatagaatagtttctaaacacttcacctaatcatagagactaagatggtaattcgtaaacgacaaagcctagtgacactgtccattgtaaaattccacatcatattagtattaaacatatacatgtagtttcctgaacacatgtagtatcaaacacacttcgtggcttcttcctcgaaacctgcggccgcgctatagttccggacttacccttaagataacttcgtatagcatacattatacgaagttatgggcccacgcgtgaagagcggttaccagagctggtcacctttgtccaccaagatggaactgtcttcggccagaatggccatctggattcagcaggcctagaaggccatttatcgctatcaactttgtatagaaaagttgggccgaattcgagctcggtacggccagaatggcccggaccgaagcttccagaaggtaattatccaagatgtagcatcaagaatccaatgtttacgggaaaaactatggaagtattatgtgagctcagcaagaagcagatcaatatgcggcacatatgcaacctatgttcaaaaatgaagaatgtacagatacaagatcctatactgccagaatacgaagaagaatacgtagaaattgaaaaagaagaaccaggcgaagaaaagaatcttgaagacgtaagcactgacgacaacaatgaaaagaagaagataaggtcggtgattgtgaaagagacatagaggacacatgtaaggtggaaaatgtaagggcggaaagtaaccttatcacaaaggaatcttatcccccactacttatccttttatatttttccgtgtcatttttgcccttgagttttcctatataaggaaccaagttcggcatttgtgaaaacaagaaaaaatttggtgtaagctattttctttgaagtactgaggatacaacttcagagaaatttgtaagtttgtacccgggggatctcgactctagaggatcgctcaggaaggccgctgagatagaggcatggcggccaatgcgggcggcggtggagcgggaggaggcagcggcagcggcagcgtggctgcgccggcggtgtgccgccccagcggctcgcggtggacgccgacgccggagcagatcaggatgctgaaggagctctactacggctgcggcatccggtcgcccagctcggagcagatccagcgcatcaccgccatgctgcggcagcacggcaagatcgagggcaagaacgtcttctactggttccagaaccacaaggcccgcgagcgccagaagcgccgcctcaccagcctcgacgtcaacgtgcccgccgccggcgcggccgacgccaccaccagccaactcggcgtcctctcgctgtcgtcgccgccgccttcaggcgcggcgcctccctcgcccaccctcggcttctacgccgccggcaatggcggcggatcggctgtgctgctggacacgagttccgactggggcagcagcggcgctgccatggccaccgagacatgcttcctgcaggactacatgggcgtgacggacacgggcagctcgtcgcagtggccacgcttctcgtcgtcggacacgataatggcggcggccgcggcgcgggcggcgacgacgcgggcgcccgagacgctccctctcttcccgacctgcggcgacgacggcggcagcggtagcagcagctacttgccgttctggggtgccgcgtccacaactgccggcgccacttcttccgttgcgatccagcagcaacaccagctgcaggagcagtacagcttttacagcaacagcaacagcacccagctggccggcaccggcaaccaagacgtatcggcaacagcagcagcagccgccgccctggagctgagcctcagctcatggtgctccccttaccctgctgcagggagtatgtgagagcaacgcgagctgccactgctcttcactgatgtctctggaatggaaggaggaggaagtgagcatagcgttggtgcgttgctgtcaagggcgaattcacatggttaacctagacttgtccatcttctggattggccaacttaattaatgtatgaaataaaaggatgcacacatagtgacatgctaatcactataatgtgggcatcaaagttgtgtgttatgtgtaattactagttatctgaataaaagagaaagagatcatccatatttcttatcctaaatgaatgtcacgtgtctttataattctttgatgaaccagatgcatttcattaaccaaatccatatacatataaatattaatcatatataattaatatcaattgggttagcaaaacaaatctagtctaggtgtgttttgcgaatgcggccgccaccgcggtggagctcgaattccggtccgggcctagaaggccagcttcaagtttgtacaaaaaagcaggctccggccagaatggcccggaccgggttaccgaattcgagctcggtaccatttaaattgcgcccgccacggccgtggaggtcgtattccggtcagcttgcatccctgcagtgcagcgtgacccggtcgtgcccctctctagagataatgagcattgcatgtctaagttataaaaaattaccacatattttttttgtcacacttgtttgaagtgcagtttatctatctttatacatatatttaaactttactctacgaataatataatctatagtactacaataatatcagtgttttagagaatcatataaatgaacagttagacatggtctaaaggacaattgagtattttgacaacaggactctacagttttatctttttagtgtgcatgtgttctcctttttttttgcaaatagcttcacctatataatacttcatccattttattagtacatccatttagggtttagggttaatggtttttatagactaatttttttagtacatctattttattctattttagcctctaaattaagaaaactaaaactctattttagtttttttatttaataatttagatataaaatagaataaaataaagtgactaaaaattaaacaaataccctttaagaaattaaaaaaactaaggaaacatttttcttgtttcgagtagataatgccagcctgttaaacgccgtcgacgagtctaacggacaccaaccagcgaaccagcagcgtcgcgtcgggccaagcgaagcagacggcacggcatctctgtcgctgcctctggacccctctcgagagttccgctccaccgttggacttgctccgctgtcggcatccagaaattgcgtggcggagcggcagacgtgagccggcacggcaggcggcctcctcctcctctcacggcaccggcagctacgggggattcctttcccaccgctccttcgctttcccttcctcgcccgccgtaataaatagacaccccctccacaccctctttccccaacctcgtgttgttcggagcgcacacacacacaaccagatctcccccaaatccacccgtcggcacctccgcttcaaggtacgccgctcgtcctcccccccccccctctctaccttctctagatcggcgttccggtccatgcatggttagggcccggtagttctacttctgttcatgtttgtgttagatccgtgtttgtgttagatccgtgctgctagcgttcgtacacggatgcgacctgtacgtcagacacgttctgattgctaacttgccagtgtttctctttggggaatcctgggatggctctagccgttccgcagacgggatcgatttcatgattttttttgtttcgttgcatagggtttggtttgcccttttcctttatttcaatatatgccgtgcacttgtttgtcgggtcatcttttcatgcttttttttgtcttggttgtgatgatgtggtctggttgggcggtcgttctagatcggagtagaattctgtttcaaactacctggtggatttattaattttggatctgtatgtgtgtgccatacatattcatagttacgaattgaagatgatggatggaaatatcgatctaggataggtatacatgttgatgcgggttttactgatgcatatacagagatgctttttgttcgcttggttgtgatgatgtggtgtggttgggcggtcgttcattcgttctagatcggagtagaatactgtttcaaactacctggtgtatttattaattttggaactgtatgtgtgtgtcatacatcttcatagttacgagtttaagatggatggaaatatcgatctaggataggtatacatgttgatgtgggttttactgatgcatatacatgatggcatatgcagcatctattcatatgctctaaccttgagtacctatctattataataaacaagtatgttttataattattttgatcttgatatacttggatgatggcatatgcagcagctatatgtggatttttttagccctgccttcatacgctatttatttgcttggtactgtttcttttgtcgatgctcaccctgttgtttggtgttacttctgcaggtcgactctagaggatccatggccactgtgaacaactggctcgctttctccctctccccgcaggagctgccgccctcccagacgacggactccacactcatctcggccgccaccgccgaccatgtctccggcgatgtctgcttcaacatcccccaagattggagcatgaggggatcagagctttcggcgctcgtcgcggagccgaagctggaggacttcctcggcggcatctccttctccgagcagcatcacaaggccaactgcaacatgatacccagcactagcagcacagtttgctacgcgagctcaggtgctagcaccggctaccatcaccagctgtaccaccagcccaccagctcagcgctccacttcgcggactccgtaatggtggcttcctcggccggtgtccacgacggcggtgccatgctcagcgcggccgccgctaacggtgtcgctggcgctgccagtgccaacggcggcggcatcgggctgtccatgattaagaactggctgcggagccaaccggcgcccatgcagccgagggtggcggcggctgagggcgcgcaggggctctctttgtccatgaacatggcggggacgacccaaggcgctgctggcatgccacttctcgctggagagcgcgcacgggcgcccgagagtgtatcgacgtcagcacagggtggagccgtcgtcgtcacggcgccgaaggaggatagcggtggcagcggtgttgccggcgctctagtagccgtgagcacggacacgggtggcagcggcggcgcgtcggctgacaacacggcaaggaagacggtggacacgttcgggcagcgcacgtcgatttaccgtggcgtgacaaggcatagatggactgggagatatgaggcacatctttgggataacagttgcagaagggaagggcaaactcgtaagggtcgtcaagtctatttaggtggctatgataaagaggagaaagctgctagggcttatgatcttgctgctctgaagtactggggtgccacaacaacaacaaattttccagtgagtaactacgaaaaggagctcgaggacatgaagcacatgacaaggcaggagtttgtagcgtctctgagaaggaagagcagtggtttctccagaggtgcatccatttacaggggagtgactaggcatcaccaacatggaagatggcaagcacggattggacgagttgcagggaacaaggatctttacttgggcaccttcagcacccaggaggaggcagcggaggcgtacgacatcgcggcgatcaagttccgcggcctcaacgccgtcaccaacttcgacatgagccgctacgacgtgaagagcatcctggacagcagcgccctccccatcggcagcgccgccaagcgcctcaaggaggccgaggccgcagcgtccgcgcagcaccaccacgccggcgtggtgagctacgacgtcggccgcatcgcctcgcagctcggcgacggcggagccctggcggcggcgtacggcgcgcactaccacggcgccgcctggccgaccatcgcgttccagccgggcgccgccagcacaggcctgtaccacccgtacgcgcagcagccaatgcgcggcggcgggtggtgcaagcaggagcaggaccacgcggtgatcgcggccgcgcacagcctgcaggacctccaccacctgaacctgggcgcggccggcgcgcacgactttttctcggcagggcagcaggccgccgccgctgcgatgcacggcctgggtagcatcgacagtgcgtcgctcgagcacagcaccggctccaactccgtcgtctacaacggcggggtcggcgacagcaacggcgccagcgccgtcggcggcagtggcggtggctacatgatgccgatgagcgctgccggagcaaccactacatcggcaatggtgagccacgagcaggtgcatgcacgggcctacgacgaagccaagcaggctgctcagatggggtacgagagctacctggtgaacgcggagaacaatggtggcggaaggatgtctgcatgggggactgtcgtgtctgcagccgcggcggcagcagcaagcagcaacgacaacatggccgccgacgtcgggcatggcggcgcgcagctcttcagtgtctggaacgacacttaagcgtacgtgccggcctggctctccgaaagggcgtattccagcacactggcggccgttactagacccaacctagacttgtccatcttctggattggccaacttaattaatgtatgaaataaaaggatgcacacatagtgacatgctaatcactataatgtgggcatcaaagttgtgtgttatgtgtaattactagttatctgaataaaagagaaagagatcatccatatttcttatcctaaatgaatgtcacgtgtctttataattctttgatgaaccagatgcatttcattaaccaaatccatatacatataaatattaatcatatataattaatatcaattgggttagcaaaacaaatctagtctaggtgtgttttgcgaatgcggcctccgggcacccagctttcttgtacaaagtggccgttaacggatcggccagaatggcccggaccgggttaccgaattcgagctcggtaccctggttcacaaactcaatacaacacacagtggagtagggtattacgctccggcggcccgaaccactctaaatccttgtgtcctcgtgtgctcttccaccattaatgactgtaattgcagggacacgaagagttgtagcgcttttgccaacaagatccgctatatgctagtagagtggaacctgcacagcaacaagcatccaataatctgagaataagaattatgtgtggtgatggttctcatctctgcaactcgccattttcgcgagagaaccaaatccaagttggtgaagatcatgatttgggctcatgggctggcatagtagctattacctttgcaattgtggttcgaatctatccgatattctccttttcagggagagctaatgcttatgcttattgggtattttggtttgacactgcttcacgcccaaaaaaaggcaactatgtctgagttggatatggcccaaaaaaaggcagctatgtctgagttggatatggaagtcttctttcgtttagggtgaagtaagaccaagctcatgagcttattatcttaggtcggaacaaattagttgataggcatggcacatttatcaaattataatgattttaacagaaaagcaacacctctttttcagcagcaccagctttgcaagctgcaattgacactccaagcatagtatttgctccaaactcagcctgcatttcgcacaatatcatatctatttccatttggataaaatatattttccagaaatatgggaacagaatcaagatacagaaaaaagttgtggtagtagtggtaagtggaaacacaagtacagtgaaaagatagcattatttctgaacagtcaaattaaccgaaataagtagtatcacatactgcccctaaattgactacacccaatgtaaagaattgcttgagcatattgagccatcagttgtttgtttgtgtaacggatttgacaatgcagagttcaggagcaaaaaaccgcaaaggagagaaagagggaaaggatctcctagtatcccaccttgtggcgcgccctgtcaagtgcatgatggcctggtcgatctgcgtctgctgctgcggttccatcccaacgagtgcctccgacaccttgtcgttgatcacccgcaccgcgtaggcgacccccctggcgaggaacttccgcctctcggaggccccggccgcgtcggcggcggcgccctcgagcgcgcccacgctagccgtagatgctcggtgcacggccttgttggtgtgcaactcgacctcaacggccggtgcgctacgcccgtcaaggatctggcgcgcccgcaccctcgtgatcacggtgggcgcctcccgcctcatgtggccgacgatgaaaagcgccgggttaggggccttggcgcgcaccgccgtattcagggcctcctcgctcttgcgcgagagcaggtgcttccccaggtactcctgcactgacaaggctgccacagcggtggaatttgtcctcacgacttcgccacgtcgtcctcacctccctggcttcccacgactccgccgtatcgaggtgctcggtgggtcgtcttaatccgaagtccgaactaggaagacgagacagagaggtctgaggaatgggcctcgtttgatgttgagctgaattatttttccagcataagcccaggtcttggtccatgaacaaaattactagaaacccagcccagtactacgatctaaaagagggactgccactggatagctctctctagcattctccacgctccaatacagcggcgtcgtgtctatccgggtctatccgcgaacacgtgagaactctccagaaactgctttctcctccacttcatctctctcgctttccctctataaaaagaccccttctaggaattgagggagacagcaagcaccaagcagcgatccgaagctcaatcaattcactcaaacctcttccccaaatcttcgattagatcttcgttgacaagaagactagaaccgaacctgacatgtccaacctgctcacggttcaccagaaccttccggctcttccagtggacgcgacgtccgatgaagtcaggaagaacctcatggacatgttccgcgacaggcaagcgttcagcgagcacacctggaagatgctgctctccgtctgccgctcctgggctgcatggtgcaagctgaacaacaggaagtggttccccgctgagcccgaggacgtgagggattaccttctgtacctgcaagcgcgaggtttgtttctgcttctacctttgatatatatataataattatcattaattagtagtaatataatatttcaaatatttttttcaaaataaaagaatgtagtatatagcaattgcttttctgtagtttataagtgtgtatattttaatttataacttttctaatatatgaccaaaacatggtgatgcctaggtctggcagtgaagaccatccagcaacaccttggacaactgaacatgcttcacaggcgctccggcctcccgcgccccagcgactcgaacgccgtgagcctcgtcatgcgccgcatcaggaaggaaaacgtcgatgccggcgaaagggcaaagcaggccctcgcgttcgagaggaccgatttcgaccaggtccgcagcctgatggagaacagcgacaggtgccaggacattaggaacctggcgttcctcggaattgcatacaacacgctcctcaggatcgcggaaattgcccgcattcgcgtgaaggacattagccgcaccgacggcggcaggatgcttatccacattggcaggaccaagacgctcgtttccaccgcaggcgtcgaaaaggccctcagcctcggagtgaccaagctcgtcgaacgctggatctccgtgtccggcgtcgcggacgacccaaacaactacctcttctgccgcgtccgcaagaacggggtggctgcccctagcgccaccagccaactcagcacgagggccttggaaggtattttcgaggccacccaccgcctgatctacggcgcgaaggatgacagcggtcaacgctacctcgcatggtccgggcactccgcccgcgttggagctgctagggacatggcccgcgccggtgtttccatccccgaaatcatgcaggcgggtggatggacgaacgtgaacattgtcatgaactacattcgcaaccttgacagcgagacgggcgcaatggttcgcctcctggaagatggtgactgaggtacccaacctagacttgtccatcttctggattggccaacttaattaatgtatgaaataaaaggatgcacacatagtgacatgctaatcactataatgtgggcatcaaagttgtgtgttatgtgtaattactagttatctgaataaaagagaaagagatcatccatatttcttatcctaaatgaatgtcacgtgtctttataattctttgatgaaccagatgcatttcattaaccaaatccatatacatataaatattaatcatatataattaatatcaattgggttagcaaaacaaatctagtctaggtgtgttttgcgatccgatatcgaattggccacggtaccagctgctgctgttctagggttcacaagtctgcctatttgtcttccccaatggagctatggttgtctggtctggtccttggtcgtgtcccgtttcattgtgtactatttacctgtaatgtgtatccttaagtctggtttgatggtgtctgaaacgttttgctgtggtagagcagcatggaagaactataatgaataagtgatccctaatcattgtgtccaaattttgcttctgctatacccttttgtgctgtttcttatgttttgcttaaaaatttgatctgacaaacaaatttgtctaaattatgctcttgttctgactgtgtactgtacacatttgtattgctaccggtttggcacatagttttctctttgattgcagatcaaacccttctgattgcagattgcttggctatggctgatgtgctcactgttcttctttagcttgtatattgctgatggtggcttggctacggctgaaaaagttgctgctgcgccgacttggcaactgttgctccagtaatgctttgtcctctcttcctagccgccgacttggcacttggcagctgttgctcctgtaatgcgttgttatctcttatctcttgagatgtactatgattttgaggctgtttgacttgtgccagattgccagtgctgatgctatattatctcaggtttttatgctagtatatgttttactgtgtgctgcctgtgtcgagttacgtaatctattgaaccgctatgcgtgttgatgccctgttgttgcttgccagattgatgcccctgttgcttgcagcttgcaagctgtagtgaaatcctaaaattccaaaccaaatctattctgaacttttgaagatctgtgatgtccggaagaaaagattcaaacagataaacgggactctccagaatctataaaataaatgatcgacaaacgctttgctttggtaggcttcaagcttggtcacccggtccgggcctagaaggccagcttcggccgccccgggcaactttattatacaaagttgatagataaatcagatatctggttcctaaggacccggcggaccgattaaactgattcggtccgacgcgttacctaataacttcgtatagcatacattatacgaagttattagctaactaactagtaagcttaagccatgggtcgacggatccgttaactagcgtggcatttggcaccgccgcacactatgcgagctaggagtgctagtttacagatgaaactatgaaaccaagaaaacacaattgtccgtagctagcgcgtggcgtcgtgtcaagcttcacacagtatcttcgttcttcactataaatcgcgcctgttgttcgtgagacccaccaccgtggataacagtcccctaataataagcgatcaacagcactgctgatggctgaacaccgaggcgccgccgcgcgtaaccatccgccggagcagcccgtcgtgccggcgaacgacgccttccccgaccgcgcccagcagctctgcctcgacgccgggcgcgcgctcgcgatgtgcggcgtgctcgtcgccgtccctcccgcattttacgcgtcgacgtcgcggacgacaccgcacttgccttcgtcggcttcgtcctctggatcatcggtgcgtggctgtgcctcctggcgctcacgcccttggctccacgggcggtgagggcgggcggggccgccgccagcaccttgctgatcaggtgcctgtccctttcatgaactactagcgcccgcgcccgcggccgccgggcacaagagaacacatcgatgttcgctgcgtacgtcagcaataaggcactctttgtcagtagtcgagtgcatatgttgggtgtttgccctgggagatttcaagtgttgtggccattatcccgcaggataaaaaatcggcggcttttggattgatacggaaaataacgatgtttcatgctcgtgttgtgtgtgtgacatcttgtcagccaagtttttaaccgttgctactccccctctgtgggctcagtgtgtggaccggaatacgtcgtacataggccgtagcctaagcccaatatgccgtttttcaggttggcctgtgtgacgacaagcgggtctcaaaagcccatcacgcaactggcctgcaattattggaggagagcgcgtcgagttggttccagaggctgcgtggtggggccggactctgcgacgacctctcgttcgcgtccgatttggttgccgtgagccgtgacgtaacgcctccttccgttcctccctatataagttccacccccgggtccggtttccccaagccccagtgacccccgatcccgatcgcgaaatctccgcacccgccggcaagggaccgaagcaagcctctctcccgaccgtcgcatcaaggtacgcgtccgctcgatctgtcctcttccttctcgatttgacttgctgtggtgcccgatcacgggatcagaatcgcaccagtgtagatttcgcatgttctaagatgtgttagtttccaggctaatccagttctcttgacgcccgatccgatcgagctccgtgtttatttcagcctaatcgtagtattcccctaaaatttcctcattagggggttcgcaagattgttggtcgacaggttcacttatgctcgatcgcttacttttagtcgattcatgctgcgtactattgttgccccccgtggttttatcttttctcgtgtgaaatccagtagatatagtagatatcgtagcattaggttttaattcaatcgattgattattgtatcatcaaaattgagaagttcgaatcatgcctatcatgctgcctcaaccgaaatcctgtatattgaagtttcaattcaattgattgatcattcattagattcaaccaaaatctagaaggttagatgacgcatgtcatgctgcctgcgtagtttacctttgatctgtttatgattaccttatcagtaggatatttgtgattttgggaagtagcactaactgattcatgctgacatgatgttccctttcagattatactgttgagtcctatctaattgatgctttgtatgctatatgaatacgtcatggtaaattagcagttaattagcatattagcaattgggcgtacctcatcaggattgctcttgtagatgtgtgtggtgatgtttcttgttcaattcatgttctgctttaaaagtatgtgttctctgtttgttaattaagattcatggttataatgatttggacctaattaatcagggttgcccttttagatgcgtggttacttgttgagttcatttttttcctgctatagttgtatgcgtttgttcattcatggttagatttgatttgtttcttctctattccatgccttccatatacttcaattgtagcttaacatgagatttctgtatatgcaggtcgaccgccggggatccacacgacaccatggcccagtccaagcacggcctgaccaaggagatgaccatgaagtaccgcatggagggctgcgtggacggccacaagttcgtgatcaccggcgagggcatcggctaccccttcaagggcaagcaggccatcaacctgtgcgtggtggagggcggccccttgcccttcgccgaggacatcttgtccgccgccttcatgtacggcaaccgcgtgttcaccgagtacccccaggacatcgtcgactacttcaagaactcctgccccgccggctacacctgggaccgctccttcctgttcgaggacggcgccgtgtgcatctgcaacgccgacatcaccgtgagcgtggaggagaactgcatgtaccacgagtccaagttctacggcgtgaacttccccgccgacggccccgtgatgaagaagatgaccgacaactgggagccctcctgcgagaagatcatccccgtgcccaagcagggcatcttgaagggcgacgtgagcatgtacctgctgctgaaggacggtggccgcttgcgctgccagttcgacaccgtgtacaaggccaagtccgtgccccgcaagatgcccgactggcacttcatccagcacaagctgacccgcgaggaccgcagcgacgccaagaaccagaagtggcacctgaccgagcacgccatcgcctccggctccgccttgccctccggactcagatctcgatagagtcaacctagacttgtccatcttctggattggccaacttaattaatgtatgaaataaaaggatgcacacatagtgacatgctaatcactataatgtgggcatcaaagttgtgtgttatgtgtaattactagttatctgaataaaagagaaagagatcatccatatttcttatcctaaatgaatgtcacgtgtctttataattctttgatgaaccagatgcatttcattaaccaaatccatatacatataaatattaatcatatataattaatatcaattgggttagcaaaacaaatctagtctaggtgtgttttgcgaattgcggcgcccttactttaacgcctctaaccaacacccctttatctttataaggaacaataaacagaatttgccccactgttctaaatcacctaataatatccccagctaaaaacaataaaggtttcctagaattaagacaagcatgactgttcctccaggagggtttggaacattgttgcagtcttgcagatacgggcgaagggtgagaaacagagcggagggctggaggtgacctcggtagtcgacgccggagttgagcttgacaacgacggggcggcccctgatggacttgaggaagtccgatggcgtcttcaccgtcccgccggcgcccgaggcgggcctgtcgctgccgccgccgccgctgctcatcttgcgcgctgtgcccccggcggtgtccctgtgttgcggatcgcgggtgggccaggtggatgcgagggcgacccgtttggactccggccggagccgccggatccctggtcggtgtcagtgccgtttactctgggccccacgtgtcagtaccgtctgtagatgacaacaacccgtcgtccacagtcatgtccaaaatatcctttcttcttttttttcgattcggatatctatcttccttttttttttccaaaaatcttcttgacgcaccagcgcgcacgtttgtggtaaacgccgacacgtcggtcccacgtcgatagaccccacccaccagtgagtagcgtgtacgtattcgggggtgacggacgtgtcgccgtcgtcttgctagtcccattcccatctgagccacacatctctgaacaaaaaaaaggagggaggcctccacgcacatccccctccgtgccacccgccccaaaccctcgcgccgcctccgagacagccgccgcaaccatggccaccgccgccgccgcgtctaccgcgctcactggcgccactaccgctgcgcccaaggcgaggcgccgggcgcacctcctggccacccgccgcgccctcgccgcgcccatcaggtgctcagcggcgtcacccgccatgccgatggctcccccggccaccccgctccggccgtggggccccaccgagccccgcaagggtgctgacatcctcgtcgagtccctcgagcgctgcggcgtccgcgacgtcttcgcctaccccggcggcgcgtccatggagatccaccaggcactcacccgctcccccgtcatcgccaaccacctcttccgccacgagcaaggggaggcctttgccgcctccggctacgcgcgctcctcgggccgcgtcggcgtctgcatcgccacctccggccccggcgccaccaacctagtctccgcgctcgccgacgcgctgctcgattccgtccccatggtcgccatcacgggacaggtggcgcgacgcatgattggcaccgacgccttccaggagacgcccatcgtcgaggtcacccgctccatcaccaagcacaactacctggtcctcgacgtcgacgacatcccccgcgtcgtgcaggaggctttcttcctcgcctcctctggtcgaccagggccggtgcttgtcgacatccccaaggacatccagcagcagatggcggtgcctgtctgggacaagcccatgagtctgcctgggtacattgcgcgccttcccaagccccctgcgactgagttgcttgagcaggtgctgcgtcttgttggtgaatcgcggcgccctgttctttatgtgggcggtggctgcgcagcatctggtgaggagttgcgacgctttgtggagctgactggaatcccggtcacaactactcttatgggcctcggcaacttccccagcgacgacccactgtctctgcgcatgctaggtatgcatgggacggtgtatgcaaattatgcagtggataaggccgatctgttgcttgcacttggtgtgcggtttgatgatcgcgtgacagggaagattgaggcttttgcaagcagggctaagattgtgcacgttgatattgatccggctgagattggcaagaacaagcagccacatgtgtccatctgtgcagatgttaagcttgctttgcagggcatgaatgctcttcttgaaggaagcacatcaaagaagagctttgactttggctcatggaacgatgagttggatcagcagaagagggaattcccccttgggtataaaacatctaatgaggagatccagccacaatatgctattcaggttcttgatgagctgacgaaaggcgaggccatcatcggcacaggtgttgggcagcaccagatgtgggcggcacagtactacacttacaagcggccaaggcagtggttgtcttcagctggtcttggggctatgggatttggtttgccggctgctgctggtgcttctgtggcaaacccaggtgtcactgttgttgacatcgatggagatggtagctttctcatgaacgttcaggagctagctatgatccgaattgagaacctcccagtgaaggtctttgtgctaaacaaccagcacctggggatggtggtgcagttggaggacaggttctataaggccaacagagcgcacacatacttgggaaacccagagaatgaaagtgagatatatccagatttcgtgacgatcgccaaagggttcaacattccagcggtccgtgtgacaaagaagaacgaagtccgcgcagcgataaagaagatgctcgagactccagggccgtacctcttggatataatcgtcccacaccaggagcatgtgttgcctatgatccctagtggtggggctttcaaggatatgatcctggatggtgatggcaggactgtgtactgactagctagtcagttaacagatctgccagatcctcggtgtacaaataacccgtcttatcctatgagacgggccggcgtcagtgtgttctggaggaatttttatgtcagagcctttttctttgtgtgcttgatgtagatgccaagggaagcttattggctgttgaagcttgatgcaaaataaattatggaactctgttttttgtttatctaataataactagcaaatatgcttccattgcattgaaactaacagccttttgtgtttccaagttttattttgtgacaatgtcatctatttcaattagttgtggaatcggaaacttgcaggactaacttggaaactccaatccctcagcatcctggactttttcctggtgtaatccatgtagatattattttaatcatcattttagttctggaggtttttccatctccggttttgctcccctttcttcaaaaaaaaaaaaaaaatgccgtaggcgccgcaacgcccacctgttgttcaaactcatgggcacgagtggctcgaagattttatacaacaattgctgtagtttcaccgttgctggtgaagaagcatttttttaaaaaaatatagtggtattcattttaattagtttagttgtgcagcgagcaaaatttggacatgctctgctcggaatctgatcgacctagacacagattagcagcagtagctttgtcatctgttccaagagttgcgatctgatagaagaaaaaaaaaccttcccttcaatgtaaaaccgaaactaacaagaaagaagcacagtgccgtttaggcaagtatggagtacgtattaagcatgtagaaggccatgcatgaaccactaacaagaaagaagcgcagtgccattcaggcaagcataagcatgtagattggcatgcatgaacaactaacagtagatcgtctctggtctgattagaagttttttgggaagccaagaaatcatgtacaactggttccatctcaaattccgtggcaaaaagaggcctaagcaacatacctcgagtagatcacattcaagcttggtcacccggtccgtcaatattctgattccgatgacttcgtaggttcctagctcaagccgctcgtgtccaagcgtcacttacgattagctaatgattacggcatctaggaccgactagtggcgcgccgactagctagctaaggtaccgagctcgaattcattccgattaatcgtggcctcttgctcttcaggatgaagagctatgtttaaacgtgcaagcgctactagacaattcagtacattaaaaacgtccgcaatgtgttattaagttgtctaagcgtcaatttgtttacaccacaatatatcctgccaccagccagccaacagctccccgaccggcagctcggcacaaaatcaccactcgatacaggcagcccatcagtccgggacggcgtcagcgggagagccgttgtaaggcggcagactttgctcatgttaccgatgctattcggaagaacggcaactaagctgccgggtttgaaacacggatgatctcgcggagggtagcatgttgattgtaacgatgacagagcgttgctgcctgtgatcaaatatcatctccctcgcagagatccgaattatcagccttcttattcatttctcgcttaaccgtgacaggctgtcgatcttgagaactatgccgacataataggaaatcgctggataaagccgctgaggaagctgagtggcgctatttctttagaagtgaacgttgacgatcgtcgggcccaggtagaatccgcctgagtcgcaagggtgacttcgcctatattggacgacggcgcgcagagggcgacctctttttgggttacgattgtaggattatcactaaaacaatacatgaacatattcaaatggcaatctctctaaggcattggaaataaatacaaataacagttgggtggagtttttcgacctgtgggcgttaaccttctgttaacctaaaagctcttgcccaaacagcagaatcggcgctaattgccagcggcggaacttttccagtttcgcgaaaaatatcgccactggcaaggaatgggtttgagatggcgaagtctgtcctaaaagcagcgcctgtagttgtagggttgacggccttgatggagcgtcatgccgatgccctctcgagccaacttcaagcacatcatcttaaggttttcccgccgcattccgagaagggcattcgaacattcgggccatcggaggcgtccaagctgctcggcgttggcgagtcatatttacggcagaccgcgtctgagatgccagagttgaatgttagcatgagcccgggtggcaggcgaatgttctcaattgaagatatccatgcgattcggaagtatatggatcaggtcggccgcgggaaccggcgctacctgccacatcgtcgaggcggcgagcagcttcaggttatctctgtgatgaatttcaaaggtgggtcgggtaagaccaccaccgccgcgcatctggcgcagtacctcgctatgcgcggatatcgagtcttggccattgatctcgatcctcaagcgagcctttctgcactctttgggagccaaccggagacggacgttggcccgaacgaaacgctctacggcgctataaggtatgatgatgagcaggtggcaatcgaacgagtcgtccgagggacttacattcccgacctccacctgattcctggtaatcttgagctgatggagt

SEQ ID NO: 49 - DNA, 23255 bp, synthetic construct
  misc_feature 1..23255: note = PHP95394
  source 1..23255: mol_type = other DNA
gtttacccgccaatatatcctgtcaaacactgatagtttaaactgaaggcgggaaacgacaatctgatcatgagcggagaattaagggagtcacgttatgacccccgccgatgacgcgggacaagccgttttacgtttggaactgacagaaccgcaacgttgaaggagccactcagcaagctggtacgattgtaatacgactcactatagggcgaattgagcgctgtttaaacgctcttcaactggaagagcggttacgctgtttaaacgctcttcaactggaagagcggttactaccggttcactagctagctgctaatcgagctagttaccctatgaggtgacatgaagcgctcacggttactatgacggttagcttcacgactgttggtggcagtagcgtacgacttagctatagttccggacttacccttaagcgatttaaatctgcggttaccgaattcgagctcggtacctagtacccttgtacttttggtttcacctgcatagagaaaacccacaagaatatgacagtctgatttgtcagtctcattctcaagcaacatttctctatccgttactttcatggtgaataacacaatccatcatcaatactttgtgttactcagaaactgaaagttattccgagtcttgcatatctttggacctactcgtttttctaccattattgctgattgttaagctctcgctacttgaatcggcattgttggagtgggaaggttcaaaaaattggagttatgactagttgtctctttctatgtacgatggagaaaatgaataaacaactgagaaaatggctcttgtttagttgatgatgctcttaagctttccactggttgccatatatgatttgggcatttcactttgatcttaatgggccttgtaaagcccaagactcatgattatctttagttgatgctcttaattaggtgtgggcaaataattcaaactgtatgtacccgaccaaaaccaaagcaaaaataatcgaaccaaaccgaaaatttaaaaataaccgaatgaaaactaaatcctataactgaaagaactgaaaccgaatcaaaatatttaatgtaaccaaaaatatccgaaatataattatattgtcaaaaatattaataatttctagattaaataattaaaaatacttaaaaatttatataaaatagtaaaaatactcgaaaataaccacaaatattcaaaaacaaccgaaatatcccaaaatattcaaagcaaaataaccgaatggataccaaattttaaaaccgaaaaaactggaacaaaaccaaaatcgaaccaaaatttcaaaaatcgaataaatactaaactttagaacaaaaaaaaacgataaccgaatgtatacgaaccaaagccgaattagataaccgaacgtccaggactactcttaatctttccgccacttatgatttgggctattactttgtttataatgagccttttcaagctcaagttcatgattgtccgtgagatgagaaactgacttgttggattcgaaaccctagctagtattggttaatacttaatacataaatgacctgcattgacatcatcatccaagaaaataaaaattgtatgcttgagatatttagttttcctagctaggttttctttattttagtaccgaatctttaggtgtgccacgttaatttagacccattttttcatacttaccaactgagtctagtttaatcatgactataatcgtataaaatgattcagtcgacgtcattgcgaacgtatataaaatcatccaaattgacgtcattccaaagaggtaagcatgcttatctaagagtccgagcatactaaacaagacgacattttatttgcactccaaatcaaattttgtattgcctaaagaaaaacaatcaaactcaagtttcttaaaattaatttcattcaaactaatcactttcaatatctcacatattattcatgccatttctatttgtctaaacatgatttaaaaaaaaaagtaaaatacaaagattactatgcaaaaactctataaaaaaaaattcaaatttcttatttatttgtgacatcaaattttcaaaataatttttttaattatcggttgatccggtcagtcgataaaaacataaactttcagcgaccgttaaaactttcctactaccgatttagagaaaatcttagcttgaaacgtaattgtaacctgccttcatgcaagtcgcaagatatgtcatcctaagttgtatatgttttctcaaaagatgtatttacttgagaaaatacgtttcaacgttgatggacaaccaattaagaatcaagcacctttcgtaatcaatttaggcttatcgtctaaggtatactgatttacgacagttgactagacttataaggaacaaaataatagaatagtttctaaacacttcacctaatcatagagactaagatggtaattcgtaaacgacaaagcctagtgacactgtccattgtaaaattccacatcatattagtattaaacatatacatgtagtttcctgaacacatgtagtatcaaacacacttcgtggcttcttcctcgaaacctgcggccgcgctatagttccggacttacccttaagataacttcgtatagcatacattatacgaagttatgggcccacgcgtgaagagcggttaccagagctggtcacctttgtccaccaagatggaactgtcttcggccagaatggccatctggattcagcaggcctagaaggccatttatcgctatcaactttgtatagaaaagttgggccgaattcgagctcggtacggccagaatggcccggaccgaagcttcggccgcacactgatagtttaaacgcacaaaatacataaaactagattagaaaaggaagagaatacgccaaattgcagcttaatcaattagacgatttagtcctgtttttacgaaacaattgtttaagataacattaggacatgtacaatatgtgtctttggatgtgtttaaggagtaaatgtaaaaaaaatagatacgtctcttaacgaagtcattgtgtcttggctctatgctcgagacggagaaatagctaattgattaatttaatttattgaatgttcttattggtgtaatgaatatagtaaggcactggccttatacttggagtttggcatgtcttatgctatgttgcaaacaggcccggtcttgacatttcgggggccctaagagaaaatttatatagaggtcctatacgaaaatttgagtctgttattttttcaacttttaaataatatatgaaaaataaaaaattgatgatttacataattttattcaaaatgatatgactggaaatattgttacagtattttatgagtcgtaaaattatataaattatgtaatatacatttgttttgacttttgagagagtatttttacttttaatttgtcaaactagcctaaaccttaaaatacacagtaaaccaaatctaaatacattagatcaaattttctgaaaataaagttcagcaaactaaactaggattaatcaatgtaggttattagggtcgacccttcggtaggctagaattaagcaacgcgataggcacaggtgtacaacacctttcgtccttcccacgtcaattttagggcctgtttggttcacggctaattatgccacactttgcctaaggttagtcgtccgaattgaagaactaaccttatgcagaaaagttaggcaaagtatggcaagttaggtagtaaaccaaacaggccaaagtatttgtcatcaagcagacggttgcgcgacctcaaagagatgattgctagaaaataaagagacgcaacaaaagaatgaaaatatagatttatctataacttatatgcatttgatataagatagataaatgggagccctacgaaccttgaggctctgagcagtcgcatatcctgcacacccttggcgccggccctggttgcaaatatgcaattgtgtccttatccgcgactggtcacgaggctaggattgatcgaaagctgccgatgagaaatggcaagggcggcatgctgtggccttttttttacggtctgtcaggacaactgaaaagttacaaatttatagtggttgtaaacagcaacacgttaaaaagtcgattatcagtttcacagaaagaggtcgttaaaaccgccagcaagcttgtttcactatcagtctgtcgctaagacaatctctttcaccaaaaatacaatttgctttcttgccgttgcttcaagtgaaaatcttaatgttttaaattaaaatatgtggctctacgtaggaaaaaataattcaatcgagtctcatttcataaaaaaaatttggtcaaaaaattatacaccatctcgctcaagtgactcaaatatactaaacggtactgagctgtcttataatataaatttgatttactgttagaatatgatgttttatgagtgcactaaattctataaaatatatttatttttaaattataagatatttttataggtctgctcttagagagagctaaaaaagagagaggctgtctgaagaaaaatccataaccaacgcaaaatcccgggcgcccaatcagccttctccgcggagattcctagcctcagccagagctacctcatctgcgtgaggctccggtggcgccaagtgttccggcatcccggacgcaccaatggcatccgagcaacagatcttttctgcaacaacgcttcgcgtcgcggcggtgtttccctccatctgctctgctctttaaatacctccgtcgtctcctcgtctccacagcatctcaagtcttcacactcctcgccatcacataaaaccagtgcaagcagaagcagcgcatcccgggggatctcgactctagaggatcgctcaggaaggccgctgagatagaggcatggcggccaatgcgggcggcggtggagcgggaggaggcagcggcagcggcagcgtggctgcgccggcggtgtgccgccccagcggctcgcggtggacgccgacgccggagcagatcaggatgctgaaggagctctactacggctgcggcatccggtcgcccagctcggagcagatccagcgcatcaccgccatgctgcggcagcacggcaagatcgagggcaagaacgtcttctactggttccagaaccacaaggcccgcgagcgccagaagcgccgcctcaccagcctcgacgtcaacgtgcccgccgccggcgcggccgacgccaccaccagccaactcggcgtcctctcgctgtcgtcgccgccgccttcaggcgcggcgcctccctcgcccaccctcggcttctacgccgccggcaatggcggcggatcggctgtgctgctggacacgagttccgactggggcagcagcggcgctgccatggccaccgagacatgcttcctgcaggactacatgggcgtgacggacacgggcagctcgtcgcagtggccacgcttctcgtcgtcggacacgataatggcggcggccgcggcgcgggcggcgacgacgcgggcgcccgagacgctccctctcttcccgacctgcggcgacgacggcggcagcggtagcagcagctacttgccgttctggggtgccgcgtccacaactgccggcgccacttcttccgttgcgatccagcagcaacaccagctgcaggagcagtacagcttttacagcaacagcaacagcacccagctggccggcaccggcaaccaagacgtatcggcaacagcagcagcagccgccgccctggagctgagcctcagctcatggtgctccccttaccctgctgcagggagtatgtgagagcaacgcgagctgccactgctcttcactgatgtctctggaatggaaggaggaggaagtgagcatagcgttggtgcgttgctgtcaagggcgaattcacatggttaacctagacttgtccatcttctggattggccaacttaattaatgtatgaaataaaaggatgcacacatagtgacatgctaatcactataatgtgggcatcaaagttgtgtgttatgtgtaattactagttatctgaataaaagagaaagagatcatccatatttcttatcctaaatgaatgtcacgtgtctttataattctttgatgaaccagatgcatttcattaaccaaatccatatacatataaatattaatcatatataattaatatcaattgggttagcaaaacaaatctagtctaggtgtgttttgcgaatgcggccgccaccgcggtggagctcgaattccggtccgggcctagaaggccagcttcaagtttgtacaaaaaagcaggctccggccagaatggcccggaccgggttaccgaattcgagctcggtaccatttaaattgcgcccgccacggccgtggaggtcgtattccggtcagcttgcatccctgcagtgcagcgtgacccggtcgtgcccctctctagagataatgagcattgcatgtctaagttataaaaaattaccacatattttttttgtcacacttgtttgaagtgcagtttatctatctttatacatatatttaaactttactctacgaataatataatctatagtactacaataatatcagtgttttagagaatcatataaatgaacagttagacatggtctaaaggacaattgagtattttgacaacaggactctacagttttatctttttagtgtgcatgtgttctcctttttttttgcaaatagcttcacctatataatacttcatccattttattagtacatccatttagggtttagggttaatggtttttatagactaatttttttagtacatctattttattctattttagcctctaaattaagaaaactaaaactctattttagtttttttatttaataatttagatataaaatagaataaaataaagtgactaaaaattaaacaaataccctttaagaaattaaaaaaactaaggaaacatttttcttgtttcgagtagataatgccagcctgttaaacgccgtcgacgagtctaacggacaccaaccagcgaaccagcagcgtcgcgtcgggccaagcgaagcagacggcacggcatctctgtcgctgcctctggacccctctcgagagttccgctccaccgttggacttgctccgctgtcggcatccagaaattgcgtggcggagcggcagacgtgagccggcacggcaggcggcctcctcctcctctcacggcaccggcagctacgggggattcctttcccaccgctccttcgctttcccttcctcgcccgccgtaataaatagacaccccctccacaccctctttccccaacctcgtgttgttcggagcgcacacacacacaaccagatctcccccaaatccacccgtcggcacctccgcttcaaggtacgccgctcgtcctcccccccccccctctctaccttctctagatcggcgttccggtccatgcatggttagggcccggtagttctacttctgttcatgtttgtgttagatccgtgtttgtgttagatccgtgctgctagcgttcgtacacggatgcgacctgtacgtcagacacgttctgattgctaacttgccagtgtttctctttggggaatcctgggatggctctagccgttccgcagacgggatcgatttcatgattttttttgtttcgttgcatagggtttggtttgcccttttcctttatttcaatatatgccgtgcacttgtttgtcgggtcatcttttcatgcttttttttgtcttggttgtgatgatgtggtctggttgggcggtcgttctagatcggagtagaattctgtttcaaactacctggtggatttattaattttggatctgtatgtgtgtgccatacatattcatagttacgaattgaagatgatggatggaaatatcgatctaggataggtatacatgttgatgcgggttttactgatgcatatacagagatgctttttgttcgcttggttgtgatgatgtggtgtggttgggcggtcgttcattcgttctagatcggagtagaatactgtttcaaactacctggtgtatttattaattttggaactgtatgtgtgtgtcatacatcttcatagttacgagtttaagatggatggaaatatcgatctaggataggtatacatgttgatgtgggttttactgatgcatatacatgatggcatatgcagcatctattcatatgctctaaccttgagtacctatctattataataaacaagtatgttttataattattttgatcttgatatacttggatgatggcatatgcagcagctatatgtggatttttttagccctgccttcatacgctatttatttgcttggtactgtttcttttgtcgatgctcaccctgttgtttggtgttacttctgcaggtcgactctagaggatccatggccactgtgaacaactggctcgctttctccctctccccgcaggagctgccgccctcccagacgacggactccacactcatctcggccgccaccgccgaccatgtctccggcgatgtctgcttcaacatcccccaagattggagcatgaggggatcagagctttcggcgctcgtcgcggagccgaagctggaggacttcctcggcggcatctccttctccgagcagcatcacaaggccaactgcaacatgatacccagcactagcagcacagtttgctacgcgagctcaggtgctagcaccggctaccatcaccagctgtaccaccagcccaccagctcagcgctccacttcgcggactccgtaatggtggcttcctcggccggtgtccacgacggcggtgccatgctcagcgcggccgccgctaacggtgtcgctggcgctgccagtgccaacggcggcggcatcgggctgtccatgattaagaactggctgcggagccaaccggcgcccatgcagccgagggtggcggcggctgagggcgcgcaggggctctctttgtccatgaacatggcggggacgacccaaggcgctgctggcatgccacttctcgctggagagcgcgcacgggcgcccgagagtgtatcgacgtcagcacagggtggagccgtcgtcgtcacggcgccgaaggaggatagcggtggcagcggtgttgccggcgctctagtagccgtgagcacggacacgggtggcagcggcggcgcgtcggctgacaacacggcaaggaagacggtggacacgttcgggcagcgcacgtcgatttaccgtggcgtgacaaggcatagatggactgggagatatgaggcacatctttgggataacagttgcagaagggaagggcaaactcgtaagggtcgtcaagtctatttaggtggctatgataaagaggagaaagctgctagggcttatgatcttgctgctctgaagtactggggtgccacaacaacaacaaattttccagtgagtaactacgaaaaggagctcgaggacatgaagcacatgacaaggcaggagtttgtagcgtctctgagaaggaagagcagtggtttctccagaggtgcatccatttacaggggagtgactaggcatcaccaacatggaagatggcaagcacggattggacgagttgcagggaacaaggatctttacttgggcaccttcagcacccaggaggaggcagcggaggcgtacgacatcgcggcgatcaagttccgcggcctcaacgccgtcaccaacttcgacatgagccgctacgacgtgaagagcatcctggacagcagcgccctccccatcggcagcgccgccaagcgcctcaaggaggccgaggccgcagcgtccgcgcagcaccaccacgccggcgtggtgagctacgacgtcggccgcatcgcctcgcagctcggcgacggcggagccctggcggcggcgtacggcgcgcactaccacggcgccgcctggccgaccatcgcgttccagccgggcgccgccagcacaggcctgtaccacccgtacgcgcagcagccaatgcgcggcggcgggtggtgcaagcaggagcaggaccacgcggtgatcgcggccgcgcacagcctgcaggacctccaccacctgaacctgggcgcggccggcgcgcacgactttttctcggcagggcagcaggccgccgccgctgcgatgcacggcctgggtagcatcgacagtgcgtcgctcgagcacagcaccggctccaactccgtcgtctacaacggcggggtcggcgacagcaacggcgccagcgccgtcggcggcagtggcggtggctacatgatgccgatgagcgctgccggagcaaccactacatcggcaatggtgagccacgagcaggtgcatgcacgggcctacgacgaagccaagcaggctgctcagatggggtacgagagctacctggtgaacgcggagaacaatggtggcggaaggatgtctgcatgggggactgtcgtgtctgcagccgcggcggcagcagcaagcagcaacgacaacatggccgccgacgtcgggcatggcggcgcgcagctcttcagtgtctggaacgacacttaagcgtacgtgccggcctggctctccgaaagggcgtattccagcacactggcggccgttactagacccaacctagacttgtccatcttctggattggccaacttaattaatgtatgaaataaaaggatgcacacatagtgacatgctaatcactataatgtgggcatcaaagttgtgtgttatgtgtaattactagttatctgaataaaagagaaagagatcatccatatttcttatcctaaatgaatgtcacgtgtctttataattctttgatgaaccagatgcatttcattaaccaaatccatatacatataaatattaatcatatataattaatatcaattgggttagcaaaacaaatctagtctaggtgtgttttgcgaatgcggcctccgggcacccagctttcttgtacaaagtggccgttaacggatcggccagaatggcccggaccgggttaccgaattcgagctcggtaccctggttcacaaactcaatacaacacacagtggagtagggtattacgctccggcggcccgaaccactctaaatccttgtgtcctcgtgtgctcttccaccattaatgactgtaattgcagggacacgaagagttgtagcgcttttgccaacaagatccgctatatgctagtagagtggaacctgcacagcaacaagcatccaataatctgagaataagaattatgtgtggtgatggttctcatctctgcaactcgccattttcgcgagagaaccaaatccaagttggtgaagatcatgatttgggctcatgggctggcatagtagctattacctttgcaattgtggttcgaatctatccgatattctccttttcagggagagctaatgcttatgcttattgggtattttggtttgacactgcttcacgcccaaaaaaaggcaactatgtctgagttggatatggcccaaaaaaaggcagctatgtctgagttggatatggaagtcttctttcgtttagggtgaagtaagaccaagctcatgagcttattatcttaggtcggaacaaattagttgataggcatggcacatttatcaaattataatgattttaacagaaaagcaacacctctttttcagcagcaccagctttgcaagctgcaattgacactccaagcatagtatttgctccaaactcagcctgcatttcgcacaatatcatatctatttccatttggataaaatatattttccagaaatatgggaacagaatcaagatacagaaaaaagttgtggtagtagtggtaagtggaaacacaagtacagtgaaaagatagcattatttctgaacagtcaaattaaccgaaataagtagtatcacatactgcccctaaattgactacacccaatgtaaagaattgcttgagcatattgagccatcagttgtttgtttgtgtaacggatttgacaatgcagagttcaggagcaaaaaaccgcaaaggagagaaagagggaaaggatctcctagtatcccaccttgtggcgcgccctgtcaagtgcatgatggcctggtcgatctgcgtctgctgctgcggttccatcccaacgagtgcctccgacaccttgtcgttgatcacccgcaccgcgtaggcgacccccctggcgaggaacttccgcctctcggaggccccggccgcgtcggcggcggcgccctcgagcgcgcccacgctagccgtagatgctcggtgcacggccttgttggtgtgcaactcgacctcaacggccggtgcgctacgcccgtcaaggatctggcgcgcccgcaccctcgtgatcacggtgggcgcctcccgcctcatgtggccgacgatgaaaagcgccgggttaggggccttggcgcgcaccgccgtattcagggcctcctcgctcttgcgcgagagcaggtgcttccccaggtactcctgcactgacaaggctgccacagcggtggaatttgtcctcacgacttcgccacgtcgtcctcacctccctggcttcccacgactccgccgtatcgaggtgctcggtgggtcgtcttaatccgaagtccgaactaggaagacgagacagagaggtctgaggaatgggcctcgtttgatgttgagctgaattatttttccagcataagcccaggtcttggtccatgaacaaaattactagaaacccagcccagtactacgatctaaaagagggactgccactggatagctctctctagcattctccacgctccaatacagcggcgtcgtgtctatccgggtctatccgcgaacacgtgagaactctccagaaactgctttctcctccacttcatctctctcgctttccctctataaaaagaccccttctaggaattgagggagacagcaagcaccaagcagcgatccgaagctcaatcaattcactcaaacctcttccccaaatcttcgattagatcttcgttgacaagaagactagaaccgaacctgacatgtccaacctgctcacggttcaccagaaccttccggctcttccagtggacgcgacgtccgatgaagtcaggaagaacctcatggacatgttccgcgacaggcaagcgttcagcgagcacacctggaagatgctgctctccgtctgccgctcctgggctgcatggtgcaagctgaacaacaggaagtggttccccgctgagcccgaggacgtgagggattaccttctgtacctgcaagcgcgaggtttgtttctgcttctacctttgatatatatataataattatcattaattagtagtaatataatatttcaaatatttttttcaaaataaaagaatgtagtatatagcaattgcttttctgtagtttataagtgtgtatattttaatttataacttttctaatatatgaccaaaacatggtgatgcctaggtctggcagtgaagaccatccagcaacaccttggacaactgaacatgcttcacaggcgctccggcctcccgcgccccagcgactcgaacgccgtgagcctcgtcatgcgccgcatcaggaaggaaaacgtcgatgccggcgaaagggcaaagcaggccctcgcgttcgagaggaccgatttcgaccaggtccgcagcctgatggagaacagcgacaggtgccaggacattaggaacctggcgttcctcggaattgcatacaacacgctcctcaggatcgcggaaattgcccgcattcgcgtgaaggacattagccgcaccgacggcggcaggatgcttatccacattggcaggaccaagacgctcgtttccaccgcaggcgtcgaaaaggccctcagcctcggagtgaccaagctcgtcgaacgctggatctccgtgtccggcgtcgcggacgacccaaacaactacctcttctgccgcgtccgcaagaacggggtggctgcccctagcgccaccagccaactcagcacgagggccttggaaggtattttcgaggccacccaccgcctgatctacggcgcgaaggatgacagcggtcaacgctacctcgcatggtccgggcactccgcccgcgttggagctgctagggacatggcccgcgccggtgtttccatccccgaaatcatgcaggcgggtggatggacgaacgtgaacattgtcatgaactacattcgcaaccttgacagcgagacgggcgcaatggttcgcctcctggaagatggtgactgaggtacccaacctagacttgtccatcttctggattggccaacttaattaatgtatgaaataaaaggatgcacacatagtgacatgctaatcactataatgtgggcatcaaagttgtgtgttatgtgtaattactagttatctgaataaaagagaaagagatcatccatatttcttatcctaaatgaatgtcacgtgtctttataattctttgatgaaccagatgcatttcattaaccaaatccatatacatataaatattaatcatatataattaatatcaattgggttagcaaaacaaatctagtctaggtgtgttttgcgatccgatatcgaattggccacggtaccagctgctgctgttctagggttcacaagtctgcctatttgtcttccccaatggagctatggttgtctggtctggtccttggtcgtgtcccgtttcattgtgtactatttacctgtaatgtgtatccttaagtctggtttgatggtgtctgaaacgttttgctgtggtagagcagcatggaagaactataatgaataagtgatccctaatcattgtgtccaaattttgcttctgctatacccttttgtgctgtttcttatgttttgcttaaaaatttgatctgacaaacaaatttgtctaaattatgctcttgttctgactgtgtactgtacacatttgtattgctaccggtttggcacatagttttctctttgattgcagatcaaacccttctgattgcagattgcttggctatggctgatgtgctcactgttcttctttagcttgtatattgctgatggtggcttggctacggctgaaaaagttgctgctgcgccgacttggcaactgttgctccagtaatgctttgtcctctcttcctagccgccgacttggcacttggcagctgttgctcctgtaatgcgttgttatctcttatctcttgagatgtactatgattttgaggctgtttgacttgtgccagattgccagtgctgatgctatattatctcaggtttttatgctagtatatgttttactgtgtgctgcctgtgtcgagttacgtaatctattgaaccgctatgcgtgttgatgccctgttgttgcttgccagattgatgcccctgttgcttgcagcttgcaagctgtagtgaaatcctaaaattccaaaccaaatctattctgaacttttgaagatctgtgatgtccggaagaaaagattcaaacagataaacgggactctccagaatctataaaataaatgatcgacaaacgctttgctttggtaggcttcaagcttggtcacccggtccgggcctagaaggccagcttcggccgccccgggcaactttattatacaaagttgatagataaatcagatatctggttcctaaggacccggcggaccgattaaactgattcggtccgacgcgttacctaataacttcgtatagcatacattatacgaagttattagctaactaactagtaagcttaagccatgggtcgacggatccgttaactagcgtggcatttggcaccgccgcacactatgcgagctaggagtgctagtttacagatgaaactatgaaaccaagaaaacacaattgtccgtagctagcgcgtggcgtcgtgtcaagcttcacacagtatcttcgttcttcactataaatcgcgcctgttgttcgtgagacccaccaccgtggataacagtcccctaataataagcgatcaacagcactgctgatggctgaacaccgaggcgccgccgcgcgtaaccatccgccggagcagcccgtcgtgccggcgaacgacgccttccccgaccgcgcccagcagctctgcctcgacgccgggcgcgcgctcgcgatgtgcggcgtgctcgtcgccgtccctcccgcattttacgcgtcgacgtcgcggacgacaccgcacttgccttcgtcggcttcgtcctctggatcatcggtgcgtggctgtgcctcctggcgctcacgcccttggctccacgggcggtgagggcgggcggggccgccgccagcaccttgctgatcaggtgcctgtccctttcatgaactactagcgcccgcgcccgcggccgccgggcacaagagaacacatcgatgttcgctgcgtacgtcagcaataaggcactctttgtcagtagtcgagtgcatatgttgggtgtttgccctgggagatttcaagtgttgtggccattatcccgcaggataaaaaatcggcggcttttggattgatacggaaaataacgatgtttcatgctcgtgttgtgtgtgtgacatcttgtcagccaagtttttaaccgttgctactccccctctgtgggctcagtgtgtggaccggaatacgtcgtacataggccgtagcctaagcccaatatgccgtttttcaggttggcctgtgtgacgacaagcgggtctcaaaagcccatcacgcaactggcctgcaattattggaggagagcgcgtcgagttggttccagaggctgcgtggtggggccggactctgcgacgacctctcgttcgcgtccgatttggttgccgtgagccgtgacgtaacgcctccttccgttcctccctatataagttccacccccgggtccggtttccccaagccccagtgacccccgatcccgatcgcgaaatctccgcacccgccggcaagggaccgaagcaagcctctctcccgaccgtcgcatcaaggtacgcgtccgctcgatctgtcctcttccttctcgatttgacttgctgtggtgcccgatcacgggatcagaatcgcaccagtgtagatttcgcatgttctaagatgtgttagtttccaggctaatccagttctcttgacgcccgatccgatcgagctccgtgtttatttcagcctaatcgtagtattcccctaaaatttcctcattagggggttcgcaagattgttggtcgacaggttcacttatgctcgatcgcttacttttagtcgattcatgctgcgtactattgttgccccccgtggttttatcttttctcgtgtgaaatccagtagatatagtagatatcgtagcattaggttttaattcaatcgattgattattgtatcatcaaaattgagaagttcgaatcatgcctatcatgctgcctcaaccgaaatcctgtatattgaagtttcaattcaattgattgatcattcattagattcaaccaaaatctagaaggttagatgacgcatgtcatgctgcctgcgtagtttacctttgatctgtttatgattaccttatcagtaggatatttgtgattttgggaagtagcactaactgattcatgctgacatgatgttccctttcagattatactgttgagtcctatctaattgatgctttgtatgctatatgaatacgtcatggtaaattagcagttaattagcatattagcaattgggcgtacctcatcaggattgctcttgtagatgtgtgtggtgatgtttcttgttcaattcatgttctgctttaaaagtatgtgttctctgtttgttaattaagattcatggttataatgatttggacctaattaatcagggttgcccttttagatgcgtggttacttgttgagttcatttttttcctgctatagttgtatgcgtttgttcattcatggttagatttgatttgtttcttctctattccatgccttccatatacttcaattgtagcttaacatgagatttctgtatatgcaggtcgaccgccggggatccacacgacaccatggcccagtccaagcacggcctgaccaaggagatgaccatgaagtaccgcatggagggctgcgtggacggccacaagttcgtgatcaccggcgagggcatcggctaccccttcaagggcaagcaggccatcaacctgtgcgtggtggagggcggccccttgcccttcgccgaggacatcttgtccgccgccttcatgtacggcaaccgcgtgttcaccgagtacccccaggacatcgtcgactacttcaagaactcctgccccgccggctacacctgggaccgctccttcctgttcgaggacggcgccgtgtgcatctgcaacgccgacatcaccgtgagcgtggaggagaactgcatgtaccacgagtccaagttctacggcgtgaacttccccgccgacggccccgtgatgaagaagatgaccgacaactgggagccctcctgcgagaagatcatccccgtgcccaagcagggcatcttgaagggcgacgtgagcatgtacctgctgctgaaggacggtggccgcttgcgctgccagttcgacaccgtgtacaaggccaagtccgtgccccgcaagatgcccgactggcacttcatccagcacaagctgacccgcgaggaccgcagcgacgccaagaaccagaagtggcacctgaccgagcacgccatcgcctccggctccgccttgccctccggactcagatctcgatagagtcaacctagacttgtccatcttctggattggccaacttaattaatgtatgaaataaaaggatgcacacatagtgacatgctaatcactataatgtgggcatcaaagttgtgtgttatgtgtaattactagttatctgaataaaagagaaagagatcatccatatttcttatcctaaatgaatgtcacgtgtctttataattctttgatgaaccagatgcatttcattaaccaaatccatatacatataaatattaatcatatataattaatatcaattgggttagcaaaacaaatctagtctaggtgtgttttgcgaattgcggcgcccttactttaacgcctctaaccaacacccctttatctttataaggaacaataaacagaatttgccccactgttctaaatcacctaataatatccccagctaaaaacaataaaggtttcctagaattaagacaagcatgactgttcctccaggagggtttggaacattgttgcagtcttgcagatacgggcgaagggtgagaaacagagcggagggctggaggtgacctcggtagtcgacgccggagttgagcttgacaacgacggggcggcccctgatggacttgaggaagtccgatggcgtcttcaccgtcccgccggcgcccgaggcgggcctgtcgctgccgccgccgccgctgctcatcttgcgcgctgtgcccccggcggtgtccctgtgttgcggatcgcgggtgggccaggtggatgcgagggcgacccgtttggactccggccggagccgccggatccctggtcggtgtcagtgccgtttactctgggccccacgtgtcagtaccgtctgtagatgacaacaacccgtcgtccacagtcatgtccaaaatatcctttcttcttttttttcgattcggatatctatcttccttttttttttccaaaaatcttcttgacgcaccagcgcgcacgtttgtggtaaacgccgacacgtcggtcccacgtcgatagaccccacccaccagtgagtagcgtgtacgtattcgggggtgacggacgtgtcgccgtcgtcttgctagtcccattcccatctgagccacacatctctgaacaaaaaaaaggagggaggcctccacgcacatccccctccgtgccacccgccccaaaccctcgcgccgcctccgagacagccgccgcaaccatggccaccgccgccgccgcgtctaccgcgctcactggcgccactaccgctgcgcccaaggcgaggcgccgggcgcacctcctggccacccgccgcgccctcgccgcgcccatcaggtgctcagcggcgtcacccgccatgccgatggctcccccggccaccccgctccggccgtggggccccaccgagccccgcaagggtgctgacatcctcgtcgagtccctcgagcgctgcggcgtccgcgacgtcttcgcctaccccggcggcgcgtccatggagatccaccaggcactcacccgctcccccgtcatcgccaaccacctcttccgccacgagcaaggggaggcctttgccgcctccggctacgcgcgctcctcgggccgcgtcggcgtctgcatcgccacctccggccccggcgccaccaacctagtctccgcgctcgccgacgcgctgctcgattccgtccccatggtcgccatcacgggacaggtggcgcgacgcatgattggcaccgacgccttccaggagacgcccatcgtcgaggtcacccgctccatcaccaagcacaactacctggtcctcgacgtcgacgacatcccccgcgtcgtgcaggaggctttcttcctcgcctcctctggtcgaccagggccggtgcttgtcgacatccccaaggacatccagcagcagatggcggtgcctgtctgggacaagcccatgagtctgcctgggtacattgcgcgccttcccaagccccctgcgactgagttgcttgagcaggtgctgcgtcttgttggtgaatcgcggcgccctgttctttatgtgggcggtggctgcgcagcatctggtgaggagttgcgacgctttgtggagctgactggaatcccggtcacaactactcttatgggcctcggcaacttccccagcgacgacccactgtctctgcgcatgctaggtatgcatgggacggtgtatgcaaattatgcagtggataaggccgatctgttgcttgcacttggtgtgcggtttgatgatcgcgtgacagggaagattgaggcttttgcaagcagggctaagattgtgcacgttgatattgatccggctgagattggcaagaacaagcagccacatgtgtccatctgtgcagatgttaagcttgctttgcagggcatgaatgctcttcttgaaggaagcacatcaaagaagagctttgactttggctcatggaacgatgagttggatcagcagaagagggaattcccccttgggtataaaacatctaatgaggagatccagccacaatatgctattcaggttcttgatgagctgacgaaaggcgaggccatcatcggcacaggtgttgggcagcaccagatgtgggcggcacagtactacacttacaagcggccaaggcagtggttgtcttcagctggtcttggggctatgggatttggtttgccggctgctgctggtgcttctgtggcaaacccaggtgtcactgttgttgacatcgatggagatggtagctttctcatgaacgttcaggagctagctatgatccgaattgagaacctcccagtgaaggtctttgtgctaaacaaccagcacctggggatggtggtgcagttggaggacaggttctataaggccaacagagcgcacacatacttgggaaacccagagaatgaaagtgagatatatccagatttcgtgacgatcgccaaagggttcaacattccagcggtccgtgtgacaaagaagaacgaagtccgcgcagcgataaagaagatgctcgagactccagggccgtacctcttggatataatcgtcccacaccaggagcatgtgttgcctatgatccctagtggtggggctttcaaggatatgatcctggatggtgatggcaggactgtgtactgactagctagtcagttaacagatctgccagatcctcggtgtacaaataacccgtcttatcctatgagacgggccggcgtcagtgtgttctggaggaatttttatgtcagagcctttttctttgtgtgcttgatgtagatgccaagggaagcttattggctgttgaagcttgatgcaaaataaattatggaactctgttttttgtttatctaataataactagcaaatatgcttccattgcattgaaactaacagccttttgtgtttccaagttttattttgtgacaatgtcatctatttcaattagttgtggaatcggaaacttgcaggactaacttggaaactccaatccctcagcatcctggactttttcctggtgtaatccatgtagatattattttaatcatcattttagttctggaggtttttccatctccggttttgctcccctttcttcaaaaaaaaaaaaaaaatgccgtaggcgccgcaacgcccacctgttgttcaaactcatgggcacgagtggctcgaagattttatacaacaattgctgtagtttcaccgttgctggtgaagaagcatttttttaaaaaaatatagtggtattcattttaattagtttagttgtgcagcgagcaaaatttggacatgctctgctcggaatctgatcgacctagacacagattagcagcagtagctttgtcatctgttccaagagttgcgatctgatagaagaaaaaaaaaccttcccttcaatgtaaaaccgaaactaacaagaaagaagcacagtgccgtttaggcaagtatggagtacgtattaagcatgtagaaggccatgcatgaaccactaacaagaaagaagcgcagtgccattcaggcaagcataagcatgtagattggcatgcatgaacaactaacagtagatcgtctctggtctgattagaagttttttgggaagccaagaaatcatgtacaactggttccatctcaaattccgtggcaaaaagaggcctaagcaacatacctcgagtagatcacattcaagcttggtcacccggtccgtcaatattctgattccgatgacttcgtaggttcctagctcaagccgctcgtgtccaagcgtcacttacgattagctaatgattacggcatctaggaccgactagtggcgcgccgactagctagctaaggtaccgagctcgaattcattccgattaatcgtggcctcttgctcttcaggatgaagagctatgtttaaacgtgcaagcgctactagacaattcagtacattaaaaacgtccgcaatgtgttattaagttgtctaagcgtcaatttgtttacaccacaatatatcctgcca

SEQ ID NO: 50 - DNA, 21169 bp, synthetic construct
  misc_feature 1..21169: note = PHP95499
  source 1..21169: mol_type = other DNA
gtttacccgccaatatatcctgtcaaacactgcggccgcacttgaccgcggatggagccggagctgtggtgaggccatcgacgggaggtgggggagaacacagtctcagtgttctttgtgagtccgcaaggtttttagcttttctgtattaattaaggttgctgttggctgtagaatacggtcgtggaagagctgtatcggtagctactacgtaagctattatatactggaagtctggagctcgtcgatctccggtcgtcttcctccatttctcctcgtcttgctttgactgctgctaccatttgcttctgttttctgatgaagcatgccatgtcggccaccagtgtttgtgtggtttttgcagggaatggctttcaagtgctgtgattgaatggccctcgtcgtcctcggctgagctcacatggacgcgtcatgtgagtgagatatatgatcatatgatgagtggggttcgggtgagtgcgtacttgaagtaggatcccgctttcactcattcattcattggcctttaaaccgggaaattttcgcgaggagatggagggaagcaagcagggtgacgagtgcagagtgccgcgagcgctttgtcaaaaggcaccgccgtaggcaaaaaaatcaatggccctgactgactcgatggtagtactactgtagagactagagagggttgctccccatatcttcgtgtgacttttactccagcattgcatttccgtcattgagacgttaattaatagcagctttcgggacagatgactgtggccatgtttcgtcacggccgcttcgtgccagctgggggtactatagtactgtgattttgttagtaaaaactttcattaggccaccattgacgaccgggccttcgcttttgctgcgctaattaaccatttcccggcgaccgaagggaacatgaacatgccccgacacatgagggcatgaggactagtgttctccctgtcgttcgttgacttgactagtgatagtttaaacgctcttcaactggaagagcggttactaccggttcactagctagctgctaatcgagctagttaccctatgaggtgacatgaagcgctcacggttactatgacggttagcttcacgactgttggtggcagtagcgtacgacttagctatagttccggacttacctagctaataacttcgtatagcatacattatacgaagttatggttaccgaattcgagctcggtaccctggttcacaaactcaatacaacacacagtggagtagggtattacgctccggcggcccgaaccactctaaatccttgtgtcctcgtgtgctcttccaccattaatgactgtaattgcagggacacgaagagttgtagcgcttttgccaacaagatccgctatatgctagtagagtggaacctgcacagcaacaagcatccaataatctgagaataagaattatgtgtggtgatggttctcatctctgcaactcgccattttcgcgagagaaccaaatccaagttggtgaagatcatgatttgggctcatgggctggcatagtagctattacctttgcaattgtggttcgaatctatccgatattctccttttcagggagagctaatgcttatgcttattgggtattttggtttgacactgcttcacgcccaaaaaaaggcaactatgtctgagttggatatggcccaaaaaaaggcagctatgtctgagttggatatggaagtcttctttcgtttagggtgaagtaagaccaagctcatgagcttattatcttaggtcggaacaaattagttgataggcatggcacatttatcaaattataatgattttaacagaaaagcaacacctctttttcagcagcaccagctttgcaagctgcaattgacactccaagcatagtatttgctccaaactcagcctgcatttcgcacaatatcatatctatttccatttggataaaatatattttccagaaatatgggaacagaatcaagatacagaaaaaagttgtggtagtagtggtaagtggaaacacaagtacagtgaaaagatagcattatttctgaacagtcaaattaaccgaaataagtagtatcacatactgcccctaaattgactacacccaatgtaaagaattgcttgagcatattgagccatcagttgtttgtttgtgtaacggatttgacaatgcagagttcaggagcaaaaaaccgcaaaggagagaaagagggaaaggatctcctagtatcccaccttgtggcgcgccctgtcaagtgcatgatggcctggtcgatctgcgtctgctgctgcggttccatcccaacgagtgcctccgacaccttgtcgttgatcacccgcaccgcgtaggcgacccccctggcgaggaacttccgcctctcggaggccccggccgcgtcggcggcggcgccctcgagcgcgcccacgctagccgtagatgctcggtgcacggccttgttggtgtgcaactcgacctcaacggccggtgcgctacgcccgtcaaggatctggcgcgcccgcaccctcgtgatcacggtgggcgcctcccgcctcatgtggccgacgatgaaaagcgccgggttaggggccttggcgcgcaccgccgtattcagggcctcctcgctcttgcgcgagagcaggtgcttccccaggtactcctgcactgacaaggctgccacagcggtggaatttgtcctcacgacttcgccacgtcgtcctcacctccctggcttcccacgactccgccgtatcgaggtgctcggtgggtcgtcttaatccgaagtccgaactaggaagacgagacagagaggtctgaggaatgggcctcgtttgatgttgagctgaattatttttccagcataagcccaggtcttggtccatgaacaaaattactagaaacccagcccagtactacgatctaaaagagggactgccactggatagctctctctagcattctccacgctccaatacagcggcgtcgtgtctatccgggtctatccgcgaacacgtgagaactctccagaaactgctttctcctccacttcatctctctcgctttccctctataaaaagaccccttctaggaattgagggagacagcaagcaccaagcagcgatccgaagctcaatcaattcactcaaacctcttccccaaatcttcgattagatcttcgttgacaagaagactagaaccgaacctgacatgtccaacctgctcacggttcaccagaaccttccggctcttccagtggacgcgacgtccgatgaagtcaggaagaacctcatggacatgttccgcgacaggcaagcgttcagcgagcacacctggaagatgctgctctccgtctgccgctcctgggctgcatggtgcaagctgaacaacaggaagtggttccccgctgagcccgaggacgtgagggattaccttctgtacctgcaagcgcgaggtttgtttctgcttctacctttgatatatatataataattatcattaattagtagtaatataatatttcaaatatttttttcaaaataaaagaatgtagtatatagcaattgcttttctgtagtttataagtgtgtatattttaatttataacttttctaatatatgaccaaaacatggtgatgcctaggtctggcagtgaagaccatccagcaacaccttggacaactgaacatgcttcacaggcgctccggcctcccgcgccccagcgactcgaacgccgtgagcctcgtcatgcgccgcatcaggaaggaaaacgtcgatgccggcgaaagggcaaagcaggccctcgcgttcgagaggaccgatttcgaccaggtccgcagcctgatggagaacagcgacaggtgccaggacattaggaacctggcgttcctcggaattgcatacaacacgctcctcaggatcgcggaaattgcccgcattcgcgtgaaggacattagccgcaccgacggcggcaggatgcttatccacattggcaggaccaagacgctcgtttccaccgcaggcgtcgaaaaggccctcagcctcggagtgaccaagctcgtcgaacgctggatctccgtgtccggcgtcgcggacgacccaaacaactacctcttctgccgcgtccgcaagaacggggtggctgcccctagcgccaccagccaactcagcacgagggccttggaaggtattttcgaggccacccaccgcctgatctacggcgcgaaggatgacagcggtcaacgctacctcgcatggtccgggcactccgcccgcgttggagctgctagggacatggcccgcgccggtgtttccatccccgaaatcatgcaggcgggtggatggacgaacgtgaacattgtcatgaactacattcgcaaccttgacagcgagacgggcgcaatggttcgcctcctggaagatggtgactgagctagacccagctttcttgtacaaagtggccgttaacggatgcagacttgtccatcttctggattggccaacttaattaatgtatgaaataaaaggatgcacacatagtgacatgctaatcactataatgtgggcatcaaagttgtgtgttatgtgtaattactagttatctgaataaaagagaaagagatcatccatatttcttatcctaaatgaatgtcacgtgtctttataattctttgatgaaccagatgcatttcattaaccaaatccatatacatataaatattaatcatatataattaatatcaattgggttagcaaaacaaatctagtctaggtgtgttttgcgaattgcggcaaggttgcgcccgccccagcttggtcagccgctccgggcttagaaggccgatctcgcgggcacccagctttcttctacaaagtggccgtttacggatcggctagaatgtcccgcaccggcttaccgatttgcacctcgctaccctgggttcgaccgaagctgaccgatgcttgcgcccgctcgcgaggccggccaagcttgatatcgaattcctgcagcccatccctcagccgcctttcactatcttttttgcccgagtcattgtcatgtgaaccttggcatgtataatcggtgaattgcgtcgattttcctcttataggtgggccaatgaatccgtgtgatcgcgtctgattggctagagatatgtttcttccttgttggatgtattttcatacataatcatatgcatacaaatatttcattacactttatagaaatggtcagtaataaaccctatcactatgtctggtgtttcattttatttgcttttaaacgaaaattgacttcctgattcaatatttaaggatcgtcaacggtgtgcagttactaaattctggtttgtaggaactatagtaaactattcaagtcttcacttattgtgcactcacctctcgccacatcaccacagatgttattcacgtcttaaatttgaactacacatcatattgacacaatattttttttaaataagcgattaaaacctagcctctatgtcaacaatggtgtacataaccagcgaagtttagggagtaaaaaacatcgccttacacaaagttcgctttaaaaaataaagagtaaattttactttggaccacccttcaaccaatgtttcactttagaacgagtaattttattattgtcactttggaccaccctcaaatcttttttccatctacatccaatttatcatgtcaaagaaatggtctacatacagctaaggagatttatcgacgaatagtagctagcatactcgaggtcattcatatgcttgagaagagagtcgggatagtccaaaataaaacaaaggtaagattacctggtcaaaagtgaaaacatcagttaaaaggtggtataaagtaaaatatcggtaataaaaggtggcccaaagtgaaatttactcttttctactattataaaaattgaggatgtttttgtcggtactttgatacgtcatttttgtatgaattggtttttaagtttattcgcttttggaaatgcatatctgtatttgagtcgggttttaagttcgtttgcttttgtaaatacagagggatttgtataagaaatatctttaaaaaaacccatatgctaatttgacataatttttgagaaaaatatatattcaggcgaattctcacaatgaacaataataagattaaaatagctttcccccgttgcagcgcatgggtattttttctagtaaaaataaaagataaacttagactcaaaacatttacaaaaacaacccctaaagttcctaaagcccaaagtgctatccacgatccatagcaagcccagcccaacccaacccaacccaacccaccccagtccagccaactggacaatagtctccacacccccccactatcaccgtgagttgtccgcacgcaccgcacgtctcgcagccaaaaaaaaaaaaagaaagaaaaaaaagaaaaagaaaaaacagcaggtgggtccgggtcgtgggggccggaaacgcgaggaggatcgcgagccagcgacgaggccggccctccctccgcttccaaagaaacgccccccatcgccactatatacatacccccccctctcctcccatccccccaaccctaccaccaccaccaccaccacctccacctcctcccccctcgctgccggacgacgagctcctcccccctccccctccgccgccgccgcgccggtaaccaccccgcccctctcctctttctttctccgttttttttttccgtcacggtctcgatctttggccttggtagtttgggtgggcgagaggcggcttcgtgcgcgcccagatcggtgcgcgggaggggcgggatctcgcggctggggctctcgccggcgtggatcaggcccggatctcgcggggaatggggctctcggatgtagatctgcgatccgccgttgttgggggagatgatggggggtttaaaatttccgccatgctaaacaagatcaggaagaggggaaaagggcactatggtttatatttttatatatttctgctgcttcgtcaggcttagatgtgctagatctttctttcttctttttgtgggtagaatttgaatccctcagcattgttcatcggtagtttttcttttcatgatttgtgacaaatgcagcctcgtgcggagcttttttgtaggtagaaggatccgcccatggcggccaatgcgggcggcggtggagcgggaggaggcagcggcagcggcagcgtggctgcgccggcggtgtgccgccccagcggctcgcggtggacgccgacgccggagcagatcaggatgctgaaggagctctactacggctgcggcatccggtcgcccagctcggagcagatccagcgcatcaccgccatgctgcggcagcacggcaagatcgagggcaagaacgtcttctactggttccagaaccacaaggcccgcgagcgccagaagcgccgcctcaccagcctcgacgtcaacgtgcccgccgccggcgcggccgacgccaccaccagccaactcggcgtcctctcgctgtcgtcgccgccgccttcaggcgcggcgcctccctcgcccaccctcggcttctacgccgccggcaatggcggcggatcggctgtgctgctggacacgagttccgactggggcagcagcggcgctgctatggccaccgagacatgcttcctgcaggactacatgggcgtgacggacacgggcagctcgtcgcagtggccacgcttctcgtcgtcggacacgataatggcggcggccgcggcgcgggcggcgacgacgcgggcgcccgagacgctccctctcttcccgacctgcggcgacgacggcggcagcggtagcagcagctacttgccgttctggggtgccgcgtccacaactgccggcgccacttcttccgttgcgatccaacagcaacaccagctgcaggagcagtacagcttttacagcaacagcaacagcacccagctggccggcaccggcaaccaagacgtatcggcaacagcagcagcagccgccgccctggagctgagcctcagctcatggtgctccccttaccctgctgcagggagtatgtgagagcaacgcgagctgccactgctcttcactgatgtctctggaatggaaggaggaggaagtgagaacagatcattcgacaaagcagcattagtccgttgatcggtggaagaccactcgtcagtgttgagttgaatgtttgatcaataaaatacggcaatgctgtaagggttgttttttatgccattgataatacactgtactgttcagttgttgaactctatttcttagccatgccaagtgcttttcttattttgaataacattacagcaaaaagttgaaagacaaaaaaaaaaacccccgaacagagtgctttgggtcccaagcttctttagactgtgttcggcgttccccctaaatttctccccctatatctcactcacttgtcacatcagcgttctctttccccctatatctccacgctctacagcagttccacctatatcaaacctctataccccaccacaacaatattatatactttcatcttcaactaactcatgtaccttccaatttttttctactaataattatttacgtgcacagaaacttagcaaggagagagagagcgggaatttaaatgctcggcgttaggcttttagtccgctaggtggctagaccgaggttaggacgctagttcactaggggcctagtggtgttttaagacgtcacggtcaccacgcgtggaccgaagcttgcatgcctgcagtgcagcgtgacccggtcgtgcccctctctagagataatgagcattgcatgtctaagttataaaaaattaccacatattttttttgtcacacttgtttgaagtgcagtttatctatctttatacatatatttaaactttactctacgaataatataatctatagtactacaataatatcagtgttttagagaatcatataaatgaacagttagacatggtctaaaggacaattgagtattttgacaacaggactctacagttttatctttttagtgtgcatgtgttctcctttttttttgcaaatagcttcacctatataatacttcatccattttattagtacatccatttagggtttagggttaatggtttttatagactaatttttttagtacatctattttattctattttagcctctaaattaagaaaactaaaactctattttagtttttttatttaataatttagatataaaatagaataaaataaagtgactaaaaattaaacaaataccctttaagaaattaaaaaaactaaggaaacatttttcttgtttcgagtagataatgccagcctgttaaacgccgtcgacgagtctaacggacaccaaccagcgaaccagcagcgtcgcgtcgggccaagcgaagcagacggcacggcatctctgtcgctgcctctggacccctctcgagagttccgctccaccgttggacttgctccgctgtcggcatccagaaattgcgtggcggagcggcagacgtgagccggcacggcaggcggcctcctcctcctctcacggcaccggcagctacgggggattcctttcccaccgctccttcgcacgtaagcgcttacgcaccgaacaacgtaagcgcttacgcaccgaacaacgtaagcgcttacgctttcccttcctcgcccgccgtaataaatagacaccccctccacaccctctttccccaacctcgtgttgttcggagcgcacacacacacaaccagatctcccccaaatccacccgtcggcacctccgcttcaaggtacgccgctcgtcctcccccccccccctctctaccttctctagatcggcgttccggtccatgcatggttagggcccggtagttctacttctgttcatgtttgtgttagatccgtgtttgtgttagatccgtgctgctagcgttcgtacacggatgcgacctgtacgtcagacacgttctgattgctaacttgccagtgtttctctttggggaatcctgggatggctctagccgttccgcagacgggatcgatttcatgattttttttgtttcgttgcatagggtttggtttgcccttttcctttatttcaatatatgccgtgcacttgtttgtcgggtcatcttttcatgcttttttttgtcttggttgtgatgatgtggtctggttgggcggtcgttctagatcggagtagaattctgtttcaaactacctggtggatttattaattttggatctgtatgtgtgtgccatacatattcatagttacgaattgaagatgatggatggaaatatcgatctaggataggtatacatgttgatgcgggttttactgatgcatatacagagatgctttttgttcgcttggttgtgatgatgtggtgtggttgggcggtcgttcattcgttctagatcggagtagaatactgtttcaaactacctggtgtatttattaattttggaactgtatgtgtgtgtcatacatcttcatagttacgagtttaagatggatggaaatatcgatctaggataggtatacatgttgatgtgggttttactgatgcatatacatgatggcatatgcagcatctattcatatgctctaaccttgagtacctatctattataataaacaagtatgttttataattattttgatcttgatatacttggatgatggcatatgcagcagctatatgtggatttttttagccctgccttcatacgctatttatttgcttggtactgtttcttttgtcgatgctcaccctgttgtttggtgttacttctgcaggtcgactttaacttagcctaggatccatggccactgtgaacaactggctcgctttctccctctccccgcaggagctgccgccctcccagacgacggactccacactcatctcggccgccaccgccgaccatgtctccggcgatgtctgcttcaacatcccccaagattggagcatgaggggatcagagctttcggcgctcgtcgcggagccgaagctggaggacttcctcggcggcatctccttctccgagcagcatcacaaggccaactgcaacatgatacccagcactagcagcacagtttgctacgcgagctcaggtgctagcaccggctaccatcaccagctgtaccaccagcccaccagctcagcgctccacttcgcggactccgtaatggtggcttcctcggccggtgtccacgacggcggtgccatgctcagcgcggccgccgctaacggtgtcgctggcgctgccagtgccaacggcggcggcatcgggctgtccatgattaagaactggctgcggagccaaccggcgcccatgcagccgagggtggcggcggctgagggcgcgcaggggctctctttgtccatgaacatggcggggacgacccaaggcgctgctggcatgccacttctcgctggagagcgcgcacgggcgcccgagagtgtatcgacgtcagcacagggtggagccgtcgtcgtcacggcgccgaaggaggatagcggtggcagcggtgttgccggcgctctagtagccgtgagcacggacacgggtggcagcggcggcgcgtcggctgacaacacggcaaggaagacggtggacacgttcgggcagcgcacgtcgatttaccgtggcgtgacaaggcatagatggactgggagatatgaggcacatctttgggataacagttgcagaagggaagggcaaactcgtaagggtcgtcaagtctatttaggtggctatgataaagaggagaaagctgctagggcttatgatcttgctgctctgaagtactggggtgccacaacaacaacaaattttccagtgagtaactacgaaaaggagctcgaggacatgaagcacatgacaaggcaggagtttgtagcgtctctgagaaggaagagcagtggtttctccagaggtgcatccatttacaggggagtgactaggcatcaccaacatggaagatggcaagcacggattggacgagttgcagggaacaaggatctttacttgggcaccttcagcacccaggaggaggcagcggaggcgtacgacatcgcggcgatcaagttccgcggcctcaacgccgtcaccaacttcgacatgagccgctacgacgtgaagagcatcctggacagcagcgccctccccatcggcagcgccgccaagcgcctcaaggaggccgaggccgcagcgtccgcgcagcaccaccacgccggcgtggtgagctacgacgtcggccgcatcgcctcgcagctcggcgacggcggagccctggcggcggcgtacggcgcgcactaccacggcgccgcctggccgaccatcgcgttccagccgggcgccgccagcacaggcctgtaccacccgtacgcgcagcagccaatgcgcggcggcgggtggtgcaagcaggagcaggaccacgcggtgatcgcggccgcgcacagcctgcaggacctccaccacctgaacctgggcgcggccggcgcgcacgactttttctcggcagggcagcaggccgccgccgctgcgatgcacggcctgggtagcatcgacagtgcgtcgctcgagcacagcaccggctccaactccgtcgtctacaacggcggggtcggcgacagcaacggcgccagcgccgtcggcggcagtggcggtggctacatgatgccgatgagcgctgccggagcaaccactacatcggcaatggtgagccacgagcaggtgcatgcacgggcctacgacgaagccaagcaggctgctcagatggggtacgagagctacctggtgaacgcggagaacaatggtggcggaaggatgtctgcatgggggactgtcgtgtctgcagccgcggcggcagcagcaagcagcaacgacaacatggccgccgacgtcgggcatggcggcgcgcagctcttcagtgtctggaacgacacttaagcgtacctagtggtacctgacatcttatagtctgcaacctctcgtgtctgaattcctatctttatcaagtgttattgcttccacgactataggacagctttcgtcgaaagcttttgctcatgtgatctcgaaggattcatctagtctgatttttcgtgacttgtatcggttttattggattcatccaacatatatcaataaaaaatgagttgtgtttcctttcttcctagttcagttaaaattatttccctcctgcgcttgtgctgtaattgtctgtgtacctgttgtttgtgactgtgttagttcccttggatatgatttcgtatttgatatgtacatggagatagcttagcttcattattggagtatgaagttagtatgacatagtcactctcctggaaaattgacactgcaaaccatatttttattctgaaccacaaatcctagtcagtccgctggcatatgccgtccgtttgctgaatccagaacgtgggtttggagatgtacggctgagatgcctctatgcgaaggggatttcgtggtgaaacgagatgggagtagagcaacgcccgtggaagatgcttcaaacttccacacttttgagcaacgatcggcagtagtaaggtagacgatttcaagatcaaagcatatgaagataaacaacatcaacaacaaaatttgttggggttctatagagagaaacagagctacatacatacactgttttgtatctaccatctgagatgatgaaaagatgaaaaactaaagaatgccccggcgccaacgccaggacacgccgcgcgcgcgtcacccgagccatctcttgacccagccggcgctgtatatttacacacgttgcagcatcgatcaccacctgttcgatcgcgtcgccgtcaccggcgcgccgcgacttattgaactagtctagggcgcggctaacaacctagcttagattgccttgtctaaacccttaggctaacgcgccactctagacgtgcgcacgataacttcgtatagcatacattatacgaagttataacagcggaccgggttaccgaattcctgcccttaaggccaattgttcaagattcattcaacaattgaaacatctcccatgattaaatcagtataaggttgctatggtcttgcttgacaaagtttttttttgagggaatttcaactaaatttttgagtgaaactatcaaatactgattttaaaaaatttttataaaaggaagcgcagagataaaaggccatctatgctacaaaagtacccaaaaatgtaatcctaaagtatgaattgcattttttttttgtttggacgaaaggaaaggagtattaccacaagaatgatatcatcttcatatttagatcttttttgggtaaagcttgagattctctaaatatagagaaatcagaagaaaaaaaaaccgtgttttggtggttttgatttctagcctccacaataactttgacggcgtcgacaagtctaacggacaccaagcagcgaaccaccagcgccgagccaagcgaagcagacggccgagacgttgacaccttcggcgcggcatctctcgagagttccgctccggcgctccacctccaccgctggcggtttcttattccgttccgttccgcctcctgctctgctcctctccacaccacacggcacgaaaccgttacggcaccggcagcacccagcacgggagaggggattcctttcccaccgttccttccctttccgccccgccgctataaatagccagccccatccccagcttttttccccaatctcatctcctctctcctgttgttcggagcacacgcacaatccgatcgatccccaaatccccttcgtctctcctcgcgagcctcgtggatcccagcttcaaggtacggcgatcgatcatcccccctccttctctctaccttcttttctctagactacatcggatggcgatccatggttagggcctgctagtttcccttcctgttttgtcgatggctgcgaggcacaatagatctgatggcgttatgacggctaacttgtcatgttgttgcgatttatagtccctttaggagatcagtttaatttctcggatggttcgagatcggtggtccatggttagtaccctaagatccgcgctgttagggttcgtagatggaggcgacctgttctgattgttaacttgtcagtacctgggaaatcctgggatggttctagctcgtccgcagatgagatcgatttcatgatcctctgtatcttgtttcgttgcctaggttccgtctaatctatccgtggtatgatgtagatgttttgatcgtgctaactacgtcttgtaaagttaattgtcaggtcataatttttagcatgcctttttttttgtttggttttgtctaattgggctgtcgttctagatcagagtagaagactgttccaaactacctgctggatttattgaacttggatctgtatgtgtgtcacatatcttcataaattcatgattaagatggattgaaatatcttttatctttttggtatggatagttctatatgttggtgtggctttgttagatgtatacatgcttagatacatgaagcaacgtgctgctactgtttagtaattgctgttcatttgtctaataaacagataaggatatgtatttatgttgctgttggttttgctggtactttgttggatacaaatgcttcaatacagaaaacagcatgctgctacgatttaccatttatctaatcttatcatatgtctaatctaataaacaaacatgcttttaaattatcttcatatgcttggatgatggcatacacagcggctatgtgtggttttttaaatacccagcatcatgggcatgcatgacactgctttaatatgctttttatttgcttgagactgtttcttttgtttatactgaccctttagttcggtgactcttctgcaggtcgactttaacttagcctaggatccatggcccagtccaagcacggcctgaccaaggagatgaccatgaagtaccgcatggagggctgcgtggacggccacaagttcgtgatcaccggcgagggcatcggctaccccttcaagggcaagcaggccatcaacctgtgcgtggtggagggcggccccttgcccttcgccgaggacatcttgtccgccgccttcatgtacggcaaccgcgtgttcaccgagtacccccaggacatcgtcgactacttcaagaactcctgccccgccggctacacctgggaccgctccttcctgttcgaggacggcgccgtgtgcatctgcaacgccgacatcaccgtgagcgtggaggagaactgcatgtaccacgagtccaagttctacggcgtgaacttccccgccgacggccccgtgatgaagaagatgaccgacaactgggagccctcctgcgagaagatcatccccgtgcccaagcagggcatcttgaagggcgacgtgagcatgtacctgctgctgaaggacggtggccgcttgcgctgccagttcgacaccgtgtacaaggccaagtccgtgccccgcaagatgcccgactggcacttcatccagcacaagctgacccgcgaggaccgcagcgacgccaagaaccagaagtggcacctgaccgagcacgccatcgcctccggctccgccttgccctccggactcagatctcgatagggtaccaatggccagttaacagatccagctgctgctgttctagggttcacaagtctgcctatttgtcttccccaatggagctatggttgtctggtctggtccttggtcgtgtcccgtttcattgtgtactatttacctgtaatgtgtatccttaagtctggtttgatggtgtctgaaacgttttgctgtggtagagcagcatggaagaactataatgaataagtgatccctaatcattgtgtccaaattttgcttctgctatacccttttgtgctgtttcttatgttttgcttaaaaatttgatctgacaaacaaatttgtctaaattatgctcttgttctgactgtgtactgtacacatttgtattgctaccggtttggcacatagttttctctttgattgcagatcaaacccttctgattgcagattgcttggctatggctgatgtgctcactgttcttctttagcttgtatattgctgatggtggcttggctacggctgaaaaagttgctgctgcgccgacttggcaactgttgctccagtaatgctttgtcctctcttcctagccgccgacttggcacttggcagctgttgctcctgtaatgcgttgttatctcttatctcttgagatgtactatgattttgaggctgtttgacttgtgccagattgccagtgctgatgctatattatctcaggtttttatgctagtatatgttttactgtgtgctgcctgtgtcgagttacgtaatctattgaaccgctatgcgtgttgatgccctgttgttgcttgccagattgatgcccctgttgcttgcagcttgcaagctgtagtgaaatcctaaaattcgaaaccaaatctattctgaacttttgaagatctgtgatgtccggaagaaaagattcaaacagataaacgggactctccagaatctataaaataaatgatcgacaaacgctttgctttggtaggcttcctagttagttagcggaccgggatccgacggcgtcttcaccgccccgccgccgcccgagccggacttgtcgctgccgccgccgctgctcatcttgcgcgcttgtgtccctccctcagtccctgcgttcgcggatcgcgggcgggtgcgacccgtttggactccggccggtagccttcgtgccgacctcgctcggtccaccggtttgtcggggacccacatgtcagtgaaggtacgcgtccacgtccacagaccctactaccccagacgagtccaaatcgctgttccctcacactctcgtgtaccagcgcgcggcggaaagcacctttccaacaaccgccgacacgtcggtcccacgtcggcatgctccaccggtcagtgtttggcgtgtacggctcccggcgacgaacgagtgtggcctaagctttcctactcccatcccatctgagccacacatctctctcacgccacgcgcacaaaacagccaggctcccacgcgcatcaaccggctctccctttccgtgccactcgcccccaagccccaaaccctcgccgccgcctccgagacagccgccgccacctaggccatggccaccgccgccgccgcgtctaccgcgctcactggcgccactaccgctgcgcccaaggcgaggcgccgggcgcacctcctggccacccgccgcgccctcgccgcgcccatcaggtgctcagcggcgtcacccgccatgccgatggctcccccggccaccccgctccggccgtggggccccaccgagccccgcaagggtgctgacatcctcgtcgagtccctcgagcgctgcggcgtccgcgacgtcttcgcctaccccggcggcgcgtcgatggagatccaccaggcactcacccgctcccccgtcatcgccaaccacctcttccgccacgagcaaggggaggcctttgccgcctccggctacgcgcgctcctcgggccgcgtcggcgtctgcatcgccacctccggccccggcgccaccaacctagtctccgcgctcgccgacgcgctgctcgattccgtcccgatggtcgccatcacgggacaggtggcgcgacgcatgattggcaccgacgccttccaggagacgcccatcgtcgaggtcacgcgctccatcaccaagcacaactacctggtcctcgacgtcgacgacatcccccgcgtcgtgcaggaggctttcttcctcgcctcctctggtcgaccagggccggtgcttgtcgacatccccaaggacatccagcagcagatggcggtgcctgtctgggacaagcccatgagtctgcctgggtacattgcgcgccttcccaagccccctgcgactgagttgcttgagcaggtgctgcgtcttgttggtgaatcgcggcgccctgttctttatgtgggcggtggctgcgcagcatctggtgaggagttgcgacgctttgtggagctgactggaatcccggtcacaactactcttatgggcctcggcaacttccccagcgacgacccactgtctctgcgcatgctaggtatgcatgggacggtgtatgcaaattatgcagtggataaggccgatctgttgcttgcacttggtgtgcggtttgatgatcgcgtgacagggaagattgaggcttttgcaagcagggctaagattgtgcacgttgatattgatccggctgagattggcaagaacaagcagccacatgtgtccatctgtgcagatgttaagcttgctttgcagggcatgaatgctcttcttgaaggaagcacatcaaagaagagctttgactttggctcatggaacgatgagttggatcagcagaagagggaattcccccttgggtataaaacatctaatgaggagatccagccacaatatgctattcaggttcttgatgagctgacgaaaggcgaggccatcatcggcacaggtgttgggcagcaccagatgtgggcggcacagtactacacttacaagcggccaaggcagtggttgtcttcagctggtcttggggctatgggatttggtttgccggctgctgctggtgcttctgtggcaaacccaggtgtcactgttgttgacatcgatggagatggtagctttctcatgaacgttcaggagctagctatgatccgaattgagaacctcccagtgaaggtctttgtgctaaacaaccagcacctggggatggtggtgcagttggaggacaggttctataaggccaacagagcgcacacatacttgggaaacccagagaatgaaagtgagatatatccagatttcgtgacgatcgccaaagggttcaacattccagccgtccgtgtgacaaagaagaacgaagtccgcgcagcgataaagaagatgctcgagactccagggccgtacctcttggatataatcgtcccacaccaggagcatgtgttgcctatgatccctagtggtggggctttcaaggatatgatcctggatggtgatggcaggactgtgtactgacttcgaataggtacccggggatcctctagtgccgtgggtcgtttaagctgccgctgtacctgtgtcgtctggtgccttctggtgtacctgggaggttgtcgtctatcaagtatctgtggttggtgtcatgagtcagtgagtcccaatactgttcgtgtcctgtgtgcattatacccaaaactgttatgggcaaatcatgaataagcttgatgttcgaacttaaaagtctctgctcaatatggtattatggttgtttttgttcgtctcctaatatttgcctgggatcaaattttattggctggtgttcatttgacctccatgttcttgctaggctccattttttactctacagccataatatgtttgattgtttggtttgttctttgttgtacacctggttctgtcgagcttagttttcgacactggcttacagcttaacatgttgctattttattgggttctgattgctattttattgggttctgattgctagtttttgctgaatccaaaaaccatgttatttatttaagcgatccaggttattattatgatggtggctaagtttttttttttccaagggtaaattttctggattctccagtgtttctgtggccgaattcaatcactagagtcgacctgcaaagcttcggtccgggcctagaaggcccgcgccacttacgcttgattccgatgacttcgtaggttcctagctcaagccgctcgtgtccaagcgtcacttacgattagctaatgattacggcatctaggaccgactagctagctagctaagagctcggtaccgagctcgaattcattccgattaatcgtggcctcttgctcttcaggatgaagagctatgtttaaacgtgcaagcgctactagacaattcagtacattaaaaacgtccgcaatgtgttattaagttgtctaagcgtcaatttgtttacaccacaatatatcctgcca

SEQ ID NO: 51 - DNA, 20416 bp, synthetic construct
  misc_feature 1..20416: note = PHP95502
  source 1..20416: mol_type = other DNA
gtttacccgccaatatatcctgtcaaacactgcggccgcacttgaccgcggatggagccggagctgtggtgaggccatcgacgggaggtgggggagaacacagtctcagtgttctttgtgagtccgcaaggtttttagcttttctgtattaattaaggttgctgttggctgtagaatacggtcgtggaagagctgtatcggtagctactacgtaagctattatatactggaagtctggagctcgtcgatctccggtcgtcttcctccatttctcctcgtcttgctttgactgctgctaccatttgcttctgttttctgatgaagcatgccatgtcggccaccagtgtttgtgtggtttttgcagggaatggctttcaagtgctgtgattgaatggccctcgtcgtcctcggctgagctcacatggacgcgtcatgtgagtgagatatatgatcatatgatgagtggggttcgggtgagtgcgtacttgaagtaggatcccgctttcactcattcattcattggcctttaaaccgggaaattttcgcgaggagatggagggaagcaagcagggtgacgagtgcagagtgccgcgagcgctttgtcaaaaggcaccgccgtaggcaaaaaaatcaatggccctgactgactcgatggtagtactactgtagagactagagagggttgctccccatatcttcgtgtgacttttactccagcattgcatttccgtcattgagacgttaattaatagcagctttcgggacagatgactgtggccatgtttcgtcacggccgcttcgtgccagctgggggtactatagtactgtgattttgttagtaaaaactttcattaggccaccattgacgaccgggccttcgcttttgctgcgctaattaaccatttcccggcgaccgaagggaacatgaacatgccccgacacatgagggcatgaggactagtgttctccctgtcgttcgttgacttgactagtgatagtttaaacgctcttcaactggaagagcggttactaccggttcactagctagctgctaatcgagctagttaccctatgaggtgacatgaagcgctcacggttactatgacggttagcttcacgactgttggtggcagtagcgtacgacttagctatagttccggacttacctagctaataacttcgtatagcatacattatacgaagttatggttaccgagctccaccttgctagttggatattacctcttctcttcaaagtatccttgaacgctcaccggttatcaaatctctacactatagctctgtagtcttgctagatagttagttctttagctctctctagaggttcacaaactcaatacaacacacagtggagtagggtattacgctccggcggcccgaaccactctaaatccttgtgtcctcgtgtgctcttccaccattaatgactgtaattgcagggacacgaagagttgtagcgcttttgccaacaagatccgctatatgctagtagagtggaacctgcacagcaacaagcatccaataatctgagaataagaattatgtgtggtgatggttctcatctctgcaactcgccattttcgcgagagaaccaaatccaagttggtgaagatcatgatttgggctcatgggctggcatagtagctattacctttgcaattgtggttcgaatctatccgatattctccttttcagggagagctaatgcttatgcttattgggtattttggtttgacactgcttcacgcccaaaaaaaggcaactatgtctgagttggatatggcccaaaaaaaggcagctatgtctgagttggatatggaagtcttctttcgtttagggtgaagtaagaccaagctcatgagcttattatcttaggtcggaacaaattagttgataggcatggcacatttatcaaattataatgattttaacagaaaagcaacacctctttttcagcagcaccagctttgcaagctgcaattgacactccaagcatagtatttgctccaaactcagcctgcatttcgcacaatatcatatctatttccatttggataaaatatattttccagaaatatgggaacagaatcaagatacagaaaaaagttgtggtagtagtggtaagtggaaacacaagtacagtgaaaagatagcattatttctgaacagtcaaattaaccgaaataagtagtatcacatactgcccctaaattgactacacccaatgtaaagaattgcttgagcatattgagccatcagttgtttgtttgtgtaacggatttgacaatgcagagttcaggagcaaaaaaccgcaaaggagagaaagagggaaaggatctcctagtatcccaccttgtggcgcgccctgtcaagtgcatgatggcctggtcgatctgcgtctgctgctgcggttccatcccaacgagtgcctccgacaccttgtcgttgatcacccgcaccgcgtaggcgacccccctggcgaggaacttccgcctctcggaggccccggccgcgtcggcggcggcgccctcgagcgcgcccacgctagccgtagatgctcggtgcacggccttgttggtgtgcaactcgacctcaacggccggtgcgctacgcccgtcaaggatctggcgcgcccgcaccctcgtgatcacggtgggcgcctcccgcctcatgtggccgacgatgaaaagcgccgggttaggggccttggcgcgcaccgccgtattcagggcctcctcgctcttgcgcgagagcaggtgcttccccaggtactcctgcactgacaaggctgccacagcggtggaatttgtcctcacgacttcgccacgtcgtcctcacctccctggcttcccacgactccgccgtatcgaggtgctcggtgggtcgtcttaatccgaagtccgaactaggaagacgagacagagaggtctgaggaatgggcctcgtttgatgttgagctgaattatttttccagcataagcccaggtcttggtccatgaacaaaattactagaaacccagcccagtactacgatctaaaagagggactgccactggatagctctctctagcattctccacgctccaatacagcggcgtcgtgtctatccgggtctatccgcgaacacgtgagaactctccagaaactgctttctcctccacttcatctctctcgctttccctctataaaaagaccccttctaggaattgagggagacagcaagcaccaagcagcgatccgaagctcaatcaattcactcaaacctcttccccaaatcttcgattagatcttcgttgacaagaagactagaaccgaacctgacatgtccaacctgctcacggttcaccagaaccttccggctcttccagtggacgcgacgtccgatgaagtcaggaagaacctcatggacatgttccgcgacaggcaagcgttcagcgagcacacctggaagatgctgctctccgtctgccgctcctgggctgcatggtgcaagctgaacaacaggaagtggttccccgctgagcccgaggacgtgagggattaccttctgtacctgcaagcgcgaggtttgtttctgcttctacctttgatatatatataataattatcattaattagtagtaatataatatttcaaatatttttttcaaaataaaagaatgtagtatatagcaattgcttttctgtagtttataagtgtgtatattttaatttataacttttctaatatatgaccaaaacatggtgatgcctaggtctggcagtgaagaccatccagcaacaccttggacaactgaacatgcttcacaggcgctccggcctcccgcgccccagcgactcgaacgccgtgagcctcgtcatgcgccgcatcaggaaggaaaacgtcgatgccggcgaaagggcaaagcaggccctcgcgttcgagaggaccgatttcgaccaggtccgcagcctgatggagaacagcgacaggtgccaggacattaggaacctggcgttcctcggaattgcatacaacacgctcctcaggatcgcggaaattgcccgcattcgcgtgaaggacattagccgcaccgacggcggcaggatgcttatccacattggcaggaccaagacgctcgtttccaccgcaggcgtcgaaaaggccctcagcctcggagtgaccaagctcgtcgaacgctggatctccgtgtccggcgtcgcggacgacccaaacaactacctcttctgccgcgtccgcaagaacggggtggctgcccctagcgccaccagccaactcagcacgagggccttggaaggtattttcgaggccacccaccgcctgatctacggcgcgaaggatgacagcggtcaacgctacctcgcatggtccgggcactccgcccgcgttggagctgctagggacatggcccgcgccggtgtttccatccccgaaatcatgcaggcgggtggatggacgaacgtgaacattgtcatgaactacattcgcaaccttgacagcgagacgggcgcaatggttcgcctcctggaagatggtgactgaggtacccaacctagacttgtccatcttctggattggccaacttaattaatgtatgaaataaaaggatgcacacatagtgacatgctaatcactataatgtgggcatcaaagttgtgtgttatgtgtaattactagttatctgaataaaagagaaagagatcatccatatttcttatcctaaatgaatgtcacgtgtctttataattctttgatgaaccagatgcatttcattaaccaaatccatatacatataaatattaatcatatataattaatatcaattgggttagcaaaacaaatctagtctaggtgtgttttgcgatccgatatcgatcaccttgctagttggatattacctcttctcttcaaagtatccttgaacgctcaccggttatcaaatctctacactatagctctgtagtcttgctagatagttagttctttagctctcgggccctggccgaagcttacactgatagtttaaactgaaggcgggaaacgacaatctgatcatgagcggagaattaagggagtcacgttatgacccccgccgatgacgcgggacaagccgttttacgtttggaactgacagaaccgcaacgattgaaggagccactcagccgcgggtttctggagtttaatgagctaagcacatacgtcagaaaccattattgcgcgttcaaaagtcgcctaaggtcactatcagctagcaaatatttcttgtcaaaaatgctccactgacgttccataaattcccctcggtatccaattagagtctcatattcactctcccggcggatctcgactctagaggatcgctcaggaaggccgctgagatagagccatggcggccaatgcgggcggcggtggagcgggaggaggcagcggcagcggcagcgtggctgcgccggcggtgtgccgccccagcggctcgcggtggacgccgacgccggagcagatcaggatgctgaaggagctctactacggctgcggcatccggtcgcccagctcggagcagatccagcgcatcaccgccatgctgcggcagcacggcaagatcgagggcaagaacgtcttctactggttccagaaccacaaggcccgcgagcgccagaagcgccgcctcaccagcctcgacgtcaacgtgcccgccgccggcgcggccgacgccaccaccagccaactcggcgtcctctcgctgtcgtcgccgccgccttcaggcgcggcgcctccctcgcccaccctcggcttctacgccgccggcaatggcggcggatcggctgtgctgctggacacgagttccgactggggcagcagcggcgctgctatggccaccgagacatgcttcctgcaggactacatgggcgtgacggacacgggcagctcgtcgcagtggccacgcttctcgtcgtcggacacgataatggcggcggccgcggcgcgggcggcgacgacgcgggcgcccgagacgctccctctcttcccgacctgcggcgacgacggcggcagcggtagcagcagctacttgccgttctggggtgccgcgtccacaactgccggcgccacttcttccgttgcgatccaacagcaacaccagctgcaggagcagtacagcttttacagcaacagcaacagcacccagctggccggcaccggcaaccaagacgtatcggcaacagcagcagcagccgccgccctggagctgagcctcagctcatggtgctccccttaccctgctgcagggagtatgtgagagcaacgcgagctgccactgctcttcactgatgtctctggaatggaaggaggaggaagtgagaacagatcattcgacaaagcagcattagtccgttgatcggtggaagaccactcgtcagtgttgagttgaatgtttgatcaataaaatacggcaatgctgtaagggttgttttttatgccattgataatacactgtactgttcagttgttgaactctatttcttagccatgccaagtgcttttcttattttgaataacattacagcaaaaagttgaaagacaaaaaaaaaaacccccgaacagagtgctttgggtcccaagcttctttagactgtgttcggcgttccccctaaatttctccccctatatctcactcacttgtcacatcagcgttctctttccccctatatctccacgctctacagcagttccacctatatcaaacctctataccccaccacaacaatattatatactttcatcttcaactaactcatgtaccttccaatttttttctactaataattatttacgtgcacagaaacttagcaaggagagagagagcgggaatttaaatgctcggcgttaggcttttagtccgctaggtggctagaccgaggttaggacgctagttcactaggggcctagtggtgttttaagacgtcacggtcacccggtccgggcctagaaggccagcttcaagtttgtacaaaaaagcaggctccggccagaatggcccggaccgaagcttgcatgcctgcagtgcagcgtgacccggtcgtgcccctctctagagataatgagcattgcatgtctaagttataaaaaattaccacatattttttttgtcacacttgtttgaagtgcagtttatctatctttatacatatatttaaactttactctacgaataatataatctatagtactacaataatatcagtgttttagagaatcatataaatgaacagttagacatggtctaaaggacaattgagtattttgacaacaggactctacagttttatctttttagtgtgcatgtgttctcctttttttttgcaaatagcttcacctatataatacttcatccattttattagtacatccatttagggtttagggttaatggtttttatagactaatttttttagtacatctattttattctattttagcctctaaattaagaaaactaaaactctattttagtttttttatttaataatttagatataaaatagaataaaataaagtgactaaaaattaaacaaataccctttaagaaattaaaaaaactaaggaaacatttttcttgtttcgagtagataatgccagcctgttaaacgccgtcgacgagtctaacggacaccaaccagcgaaccagcagcgtcgcgtcgggccaagcgaagcagacggcacggcatctctgtcgctgcctctggacccctctcgagagttccgctccaccgttggacttgctccgctgtcggcatccagaaattgcgtggcggagcggcagacgtgagccggcacggcaggcggcctcctcctcctctcacggcaccggcagctacgggggattcctttcccaccgctccttcgcacgtaagcgcttacgcaccgaacaacgtaagcgcttacgcaccgaacaacgtaagcgcttacgctttcccttcctcgcccgccgtaataaatagacaccccctccacaccctctttccccaacctcgtgttgttcggagcgcacacacacacaaccagatctcccccaaatccacccgtcggcacctccgcttcaaggtacgccgctcgtcctcccccccccccctctctaccttctctagatcggcgttccggtccatgcatggttagggcccggtagttctacttctgttcatgtttgtgttagatccgtgtttgtgttagatccgtgctgctagcgttcgtacacggatgcgacctgtacgtcagacacgttctgattgctaacttgccagtgtttctctttggggaatcctgggatggctctagccgttccgcagacgggatcgatttcatgattttttttgtttcgttgcatagggtttggtttgcccttttcctttatttcaatatatgccgtgcacttgtttgtcgggtcatcttttcatgcttttttttgtcttggttgtgatgatgtggtctggttgggcggtcgttctagatcggagtagaattctgtttcaaactacctggtggatttattaattttggatctgtatgtgtgtgccatacatattcatagttacgaattgaagatgatggatggaaatatcgatctaggataggtatacatgttgatgcgggttttactgatgcatatacagagatgctttttgttcgcttggttgtgatgatgtggtgtggttgggcggtcgttcattcgttctagatcggagtagaatactgtttcaaactacctggtgtatttattaattttggaactgtatgtgtgtgtcatacatcttcatagttacgagtttaagatggatggaaatatcgatctaggataggtatacatgttgatgtgggttttactgatgcatatacatgatggcatatgcagcatctattcatatgctctaaccttgagtacctatctattataataaacaagtatgttttataattattttgatcttgatatacttggatgatggcatatgcagcagctatatgtggatttttttagccctgccttcatacgctatttatttgcttggtactgtttcttttgtcgatgctcaccctgttgtttggtgttacttctgcaggtcgactttaacttagcctaggatccatggccactgtgaacaactggctcgctttctccctctccccgcaggagctgccgccctcccagacgacggactccacactcatctcggccgccaccgccgaccatgtctccggcgatgtctgcttcaacatcccccaagattggagcatgaggggatcagagctttcggcgctcgtcgcggagccgaagctggaggacttcctcggcggcatctccttctccgagcagcatcacaaggccaactgcaacatgatacccagcactagcagcacagtttgctacgcgagctcaggtgctagcaccggctaccatcaccagctgtaccaccagcccaccagctcagcgctccacttcgcggactccgtaatggtggcttcctcggccggtgtccacgacggcggtgccatgctcagcgcggccgccgctaacggtgtcgctggcgctgccagtgccaacggcggcggcatcgggctgtccatgattaagaactggctgcggagccaaccggcgcccatgcagccgagggtggcggcggctgagggcgcgcaggggctctctttgtccatgaacatggcggggacgacccaaggcgctgctggcatgccacttctcgctggagagcgcgcacgggcgcccgagagtgtatcgacgtcagcacagggtggagccgtcgtcgtcacggcgccgaaggaggatagcggtggcagcggtgttgccggcgctctagtagccgtgagcacggacacgggtggcagcggcggcgcgtcggctgacaacacggcaaggaagacggtggacacgttcgggcagcgcacgtcgatttaccgtggcgtgacaaggcatagatggactgggagatatgaggcacatctttgggataacagttgcagaagggaagggcaaactcgtaagggtcgtcaagtctatttaggtggctatgataaagaggagaaagctgctagggcttatgatcttgctgctctgaagtactggggtgccacaacaacaacaaattttccagtgagtaactacgaaaaggagctcgaggacatgaagcacatgacaaggcaggagtttgtagcgtctctgagaaggaagagcagtggtttctccagaggtgcatccatttacaggggagtgactaggcatcaccaacatggaagatggcaagcacggattggacgagttgcagggaacaaggatctttacttgggcaccttcagcacccaggaggaggcagcggaggcgtacgacatcgcggcgatcaagttccgcggcctcaacgccgtcaccaacttcgacatgagccgctacgacgtgaagagcatcctggacagcagcgccctccccatcggcagcgccgccaagcgcctcaaggaggccgaggccgcagcgtccgcgcagcaccaccacgccggcgtggtgagctacgacgtcggccgcatcgcctcgcagctcggcgacggcggagccctggcggcggcgtacggcgcgcactaccacggcgccgcctggccgaccatcgcgttccagccgggcgccgccagcacaggcctgtaccacccgtacgcgcagcagccaatgcgcggcggcgggtggtgcaagcaggagcaggaccacgcggtgatcgcggccgcgcacagcctgcaggacctccaccacctgaacctgggcgcggccggcgcgcacgactttttctcggcagggcagcaggccgccgccgctgcgatgcacggcctgggtagcatcgacagtgcgtcgctcgagcacagcaccggctccaactccgtcgtctacaacggcggggtcggcgacagcaacggcgccagcgccgtcggcggcagtggcggtggctacatgatgccgatgagcgctgccggagcaaccactacatcggcaatggtgagccacgagcaggtgcatgcacgggcctacgacgaagccaagcaggctgctcagatggggtacgagagctacctggtgaacgcggagaacaatggtggcggaaggatgtctgcatgggggactgtcgtgtctgcagccgcggcggcagcagcaagcagcaacgacaacatggccgccgacgtcgggcatggcggcgcgcagctcttcagtgtctggaacgacacttaagcgtacctagtggtacctgacatcttatagtctgcaacctctcgtgtctgaattcctatctttatcaagtgttattgcttccacgactataggacagctttcgtcgaaagcttttgctcatgtgatctcgaaggattcatctagtctgatttttcgtgacttgtatcggttttattggattcatccaacatatatcaataaaaaatgagttgtgtttcctttcttcctagttcagttaaaattatttccctcctgcgcttgtgctgtaattgtctgtgtacctgttgtttgtgactgtgttagttcccttggatatgatttcgtatttgatatgtacatggagatagcttagcttcattattggagtatgaagttagtatgacatagtcactctcctggaaaattgacactgcaaaccatatttttattctgaaccacaaatcctagtcagtccgctggcatatgccgtccgtttgctgaatccagaacgtgggtttggagatgtacggctgagatgcctctatgcgaaggggatttcgtggtgaaacgagatgggagtagagcaacgcccgtggaagatgcttcaaacttccacacttttgagcaacgatcggcagtagtaaggtagacgatttcaagatcaaagcatatgaagataaacaacatcaacaacaaaatttgttggggttctatagagagaaacagagctacatacatacactgttttgtatctaccatctgagatgatgaaaagatgaaaaactaaagaatgccccggcgccaacgccaggacacgccgcgcgcgcgtcacccgagccatctcttgacccagccggcgctgtatatttacacacgttgcagcatcgatcaccacctgttcgatcgcgtcgccgtcaccggcgcgccgcgacttattgaactagtctagggcgcggctaacaacctagcttagattgccttgtctaaacccttaggctaacgcgccactctagacgtgcgcacgataacttcgtatagcatacattatacgaagttataacagcggaccgggttaccgaattcctgcccttaaggccaattgttcaagattcattcaacaattgaaacatctcccatgattaaatcagtataaggttgctatggtcttgcttgacaaagtttttttttgagggaatttcaactaaatttttgagtgaaactatcaaatactgattttaaaaaatttttataaaaggaagcgcagagataaaaggccatctatgctacaaaagtacccaaaaatgtaatcctaaagtatgaattgcattttttttttgtttggacgaaaggaaaggagtattaccacaagaatgatatcatcttcatatttagatcttttttgggtaaagcttgagattctctaaatatagagaaatcagaagaaaaaaaaaccgtgttttggtggttttgatttctagcctccacaataactttgacggcgtcgacaagtctaacggacaccaagcagcgaaccaccagcgccgagccaagcgaagcagacggccgagacgttgacaccttcggcgcggcatctctcgagagttccgctccggcgctccacctccaccgctggcggtttcttattccgttccgttccgcctcctgctctgctcctctccacaccacacggcacgaaaccgttacggcaccggcagcacccagcacgggagaggggattcctttcccaccgttccttccctttccgccccgccgctataaatagccagccccatccccagcttttttccccaatctcatctcctctctcctgttgttcggagcacacgcacaatccgatcgatccccaaatccccttcgtctctcctcgcgagcctcgtggatcccagcttcaaggtacggcgatcgatcatcccccctccttctctctaccttcttttctctagactacatcggatggcgatccatggttagggcctgctagtttcccttcctgttttgtcgatggctgcgaggcacaatagatctgatggcgttatgacggctaacttgtcatgttgttgcgatttatagtccctttaggagatcagtttaatttctcggatggttcgagatcggtggtccatggttagtaccctaagatccgcgctgttagggttcgtagatggaggcgacctgttctgattgttaacttgtcagtacctgggaaatcctgggatggttctagctcgtccgcagatgagatcgatttcatgatcctctgtatcttgtttcgttgcctaggttccgtctaatctatccgtggtatgatgtagatgttttgatcgtgctaactacgtcttgtaaagttaattgtcaggtcataatttttagcatgcctttttttttgtttggttttgtctaattgggctgtcgttctagatcagagtagaagactgttccaaactacctgctggatttattgaacttggatctgtatgtgtgtcacatatcttcataaattcatgattaagatggattgaaatatcttttatctttttggtatggatagttctatatgttggtgtggctttgttagatgtatacatgcttagatacatgaagcaacgtgctgctactgtttagtaattgctgttcatttgtctaataaacagataaggatatgtatttatgttgctgttggttttgctggtactttgttggatacaaatgcttcaatacagaaaacagcatgctgctacgatttaccatttatctaatcttatcatatgtctaatctaataaacaaacatgcttttaaattatcttcatatgcttggatgatggcatacacagcggctatgtgtggttttttaaatacccagcatcatgggcatgcatgacactgctttaatatgctttttatttgcttgagactgtttcttttgtttatactgaccctttagttcggtgactcttctgcaggtcgactttaacttagcctaggatccatggcccagtccaagcacggcctgaccaaggagatgaccatgaagtaccgcatggagggctgcgtggacggccacaagttcgtgatcaccggcgagggcatcggctaccccttcaagggcaagcaggccatcaacctgtgcgtggtggagggcggccccttgcccttcgccgaggacatcttgtccgccgccttcatgtacggcaaccgcgtgttcaccgagtacccccaggacatcgtcgactacttcaagaactcctgccccgccggctacacctgggaccgctccttcctgttcgaggacggcgccgtgtgcatctgcaacgccgacatcaccgtgagcgtggaggagaactgcatgtaccacgagtccaagttctacggcgtgaacttccccgccgacggccccgtgatgaagaagatgaccgacaactgggagccctcctgcgagaagatcatccccgtgcccaagcagggcatcttgaagggcgacgtgagcatgtacctgctgctgaaggacggtggccgcttgcgctgccagttcgacaccgtgtacaaggccaagtccgtgccccgcaagatgcccgactggcacttcatccagcacaagctgacccgcgaggaccgcagcgacgccaagaaccagaagtggcacctgaccgagcacgccatcgcctccggctccgccttgccctccggactcagatctcgatagggtaccaatggccagttaacagatccagctgctgctgttctagggttcacaagtctgcctatttgtcttccccaatggagctatggttgtctggtctggtccttggtcgtgtcccgtttcattgtgtactatttacctgtaatgtgtatccttaagtctggtttgatggtgtctgaaacgttttgctgtggtagagcagcatggaagaactataatgaataagtgatccctaatcattgtgtccaaattttgcttctgctatacccttttgtgctgtttcttatgttttgcttaaaaatttgatctgacaaacaaatttgtctaaattatgctcttgttctgactgtgtactgtacacatttgtattgctaccggtttggcacatagttttctctttgattgcagatcaaacccttctgattgcagattgcttggctatggctgatgtgctcactgttcttctttagcttgtatattgctgatggtggcttggctacggctgaaaaagttgctgctgcgccgacttggcaactgttgctccagtaatgctttgtcctctcttcctagccgccgacttggcacttggcagctgttgctcctgtaatgcgttgttatctcttatctcttgagatgtactatgattttgaggctgtttgacttgtgccagattgccagtgctgatgctatattatctcaggtttttatgctagtatatgttttactgtgtgctgcctgtgtcgagttacgtaatctattgaaccgctatgcgtgttgatgccctgttgttgcttgccagattgatgcccctgttgcttgcagcttgcaagctgtagtgaaatcctaaaattcgaaaccaaatctattctgaacttttgaagatctgtgatgtccggaagaaaagattcaaacagataaacgggactctccagaatctataaaataaatgatcgacaaacgctttgctttggtaggcttcctagttagttagcggaccgaagcttcggtccgggcctagaaggccagcttcggccgcccctcggtaccctgggatctgcccttactttaacgcctctaaccaacacccctttatctttataaggaacaataaacagaatttgccccactgttctaaatcacctaataatatccccagctaaaaacaataaaggtttcctagaattaagacaagcatgactgttcctccaggagggtttggaacattgttgcagtcttgcagatacgggcgaagggtgagaaacagagcggagggctggaggtgacctcggtagtcgacgccggagttgagcttgacaacgacggggcggcccctgatggacttgaggaagtccgatggcgtcttcaccgtcccgccggcgcccgaggcgggcctgtcgctgccgccgccgccgctgctcatcttgcgcgctgtgcccccggcggtgtccctgtgttgcggatcgcgggtgggccaggtggatgcgagggcgacccgtttggactccggccggagccgccggatccctggtcggtgtcagtgccgtttactctgggccccacgtgtcagtaccgtctgtagatgacaacaacccgtcgtccacagtcatgtccaaaatatcctttcttcttttttttcgattcggatatctatcttccttttttttttccaaaaatcttcttgacgcaccagcgcgcacgtttgtggtaaacgccgacacgtcggtcccacgtcgatagaccccacccaccagtgagtagcgtgtacgtattcgggggtgacggacgtgtcgccgtcgtcttgctagtcccattcccatctgagccacacatctctgaacaaaaaaaaggagggaggcctccacgcacatccccctccgtgccacccgccccaaaccctcgcgccgcctccgagacagccgccgcaaccatggccaccgccgccgccgcgtctaccgcgctcactggcgccactaccgctgcgcccaaggcgaggcgccgggcgcacctcctggccacccgccgcgccctcgccgcgcccatcaggtgctcagcggcgtcacccgccatgccgatggctcccccggccaccccgctccggccgtggggccccaccgagccccgcaagggtgctgacatcctcgtcgagtccctcgagcgctgcggcgtccgcgacgtcttcgcctaccccggcggcgcgtcgatggagatccaccaggcactcacccgctcccccgtcatcgccaaccacctcttccgccacgagcaaggggaggcctttgccgcctccggctacgcgcgctcctcgggccgcgtcggcgtctgcatcgccacctccggccccggcgccaccaacctagtctccgcgctcgccgacgcgctgctcgattccgtcccgatggtcgccatcacgggacaggtggcgcgacgcatgattggcaccgacgccttccaggagacgcccatcgtcgaggtcacgcgctccatcaccaagcacaactacctggtcctcgacgtcgacgacatcccccgcgtcgtgcaggaggctttcttcctcgcctcctctggtcgaccagggccggtgcttgtcgacatccccaaggacatccagcagcagatggcggtgcctgtctgggacaagcccatgagtctgcctgggtacattgcgcgccttcccaagccccctgcgactgagttgcttgagcaggtgctgcgtcttgttggtgaatcgcggcgccctgttctttatgtgggcggtggctgcgcagcatctggtgaggagttgcgacgctttgtggagctgactggaatcccggtcacaactactcttatgggcctcggcaacttccccagcgacgacccactgtctctgcgcatgctaggtatgcatgggacggtgtatgcaaattatgcagtggataaggccgatctgttgcttgcacttggtgtgcggtttgatgatcgcgtgacagggaagattgaggcttttgcaagcagggctaagattgtgcacgttgatattgatccggctgagattggcaagaacaagcagccacatgtgtccatctgtgcagatgttaagcttgctttgcagggcatgaatgctcttcttgaaggaagcacatcaaagaagagctttgactttggctcatggaacgatgagttggatcagcagaagagggaattcccccttgggtataaaacatctaatgaggagatccagccacaatatgctattcaggttcttgatgagctgacgaaaggcgaggccatcatcggcacaggtgttgggcagcaccagatgtgggcggcacagtactacacttacaagcggccaaggcagtggttgtcttcagctggtcttggggctatgggatttggtttgccggctgctgctggtgcttctgtggcaaacccaggtgtcactgttgttgacatcgatggagatggtagctttctcatgaacgttcaggagctagctatgatccgaattgagaacctcccagtgaaggtctttgtgctaaacaaccagcacctggggatggtggtgcagttggaggacaggttctataaggccaacagagcgcacacatacttgggaaacccagagaatgaaagtgagatatatccagatttcgtgacgatcgccaaagggttcaacattccagccgtccgtgtgacaaagaagaacgaagtccgcgcagcgataaagaagatgctcgagactccagggccgtacctcttggatataatcgtcccacaccaggagcatgtgttgcctatgatccctagtggtggggctttcaaggatatgatcctggatggtgatggcaggactgtgtactgacttcgaataggtacccggggatcctctagtgccgtgggtcgtttaagctgccgctgtacctgtgtcgtctggtgccttctggtgtacctgggaggttgtcgtctatcaagtatctgtggttggtgtcatgagtcagtgagtcccaatactgttcgtgtcctgtgtgcattatacccaaaactgttatgggcaaatcatgaataagcttgatgttcgaacttaaaagtctctgctcaatatggtattatggttgtttttgttcgtctcctaatatttgcctgggatcaaattttattggctggtgttcatttgacctccatgttcttgctaggctccattttttactctacagccataatatgtttgattgtttggtttgttctttgttgtacacctggttctgtcgagcttagttttcgacactggcttacagcttaacatgttgctattttattgggttctgattgctattttattgggttctgattgctagtttttgctgaatccaaaaaccatgttatttatttaagcgatccaggttattattatgatggtggctaagtttttttttttccaagggtaaattttctggattctccagtgtttctgtggccgaattcaatcactagagtcgacctgcaaagcttcggtccgggcctagaaggcccgcgccacttacgcttgattccgatgacttcgtaggttcctagctcaagccgctcgtgtccaagcgtcacttacgattagctaatgattacggcatctaggaccgactagttcttatgtgcttctagtctccaaatgtggttgatagttattttgctctaagatcaacagtaatgaagtataaatcatcgttgtggtgtgctactcggttaattgagcattaacacacacaaacatgacgaggatggtataatctccaaaaatgtgtactttgttaggtgggaccctatagccttgattaatgtgctatgttaggcatgcctggaaacgtgtgacgcatatgttttgtgaacctgttgatattatatgtgcttttatattaccatattttattaaaatactaatatttattactagtaagatataacattctatctagcttaaaaactaaccataaatattccataataactagatttaccaaactaatatactaaatatacataataaatacaaaattaacaagacaataatcaatatttatgagcttaatatatttagacattatggttggtcgacgataatcatgctaacttttcgtaattgcttgattgaaatatgcttagaataatgcctctttgttctacatggcaaatagggaccattatggtgtaacaccctgggaaccacaaacaccccgaaatgctactaaactacacaactaaccttcatatataaaatttcgacagcatctcctttgaaaatttgcatagacgtggaagcaacagagtataaacagatctgcgtttaaacgtgcaagcgctactagacaattcagtacattaaaaacgtccgcaatgtgttattaagttgtctaagcgtcaatttgtttacaccacaatatatcctgcca

SEQ ID NO: 52 - DNA, 20423 bp, synthetic construct
  misc_feature 1..20423: note = PHP95503
  source 1..20423: mol_type = other DNA
gtttacccgccaatatatcctgtcaaacactgcggccgcacttgaccgcggatggagccggagctgtggtgaggccatcgacgggaggtgggggagaacacagtctcagtgttctttgtgagtccgcaaggtttttagcttttctgtattaattaaggttgctgttggctgtagaatacggtcgtggaagagctgtatcggtagctactacgtaagctattatatactggaagtctggagctcgtcgatctccggtcgtcttcctccatttctcctcgtcttgctttgactgctgctaccatttgcttctgttttctgatgaagcatgccatgtcggccaccagtgtttgtgtggtttttgcagggaatggctttcaagtgctgtgattgaatggccctcgtcgtcctcggctgagctcacatggacgcgtcatgtgagtgagatatatgatcatatgatgagtggggttcgggtgagtgcgtacttgaagtaggatcccgctttcactcattcattcattggcctttaaaccgggaaattttcgcgaggagatggagggaagcaagcagggtgacgagtgcagagtgccgcgagcgctttgtcaaaaggcaccgccgtaggcaaaaaaatcaatggccctgactgactcgatggtagtactactgtagagactagagagggttgctccccatatcttcgtgtgacttttactccagcattgcatttccgtcattgagacgttaattaatagcagctttcgggacagatgactgtggccatgtttcgtcacggccgcttcgtgccagctgggggtactatagtactgtgattttgttagtaaaaactttcattaggccaccattgacgaccgggccttcgcttttgctgcgctaattaaccatttcccggcgaccgaagggaacatgaacatgccccgacacatgagggcatgaggactagtgttctccctgtcgttcgttgacttgactagtgatagtttaaacgctcttcaactggaagagcggttactaccggttcactagctagctgctaatcgagctagttaccctatgaggtgacatgaagcgctcacggttactatgacggttagcttcacgactgttggtggcagtagcgtacgacttagctatagttccggacttacctagctaataacttcgtatagcatacattatacgaagttatggttaccgccctggccgaagcttacactgatagtttaaactgaaggcgggaaacgacaatctgatcatgagcggagaattaagggagtcacgttatgacccccgccgatgacgcgggacaagccgttttacgtttggaactgacagaaccgcaacgattgaaggagccactcagccgcgggtttctggagtttaatgagctaagcacatacgtcagaaaccattattgcgcgttcaaaagtcgcctaaggtcactatcagctagcaaatatttcttgtcaaaaatgctccactgacgttccataaattcccctcggtatccaattagagtctcatattcactctcccggcggatctcgactctagaggatcgctcaggaaggccgctgagatagagccatggcggccaatgcgggcggcggtggagcgggaggaggcagcggcagcggcagcgtggctgcgccggcggtgtgccgccccagcggctcgcggtggacgccgacgccggagcagatcaggatgctgaaggagctctactacggctgcggcatccggtcgcccagctcggagcagatccagcgcatcaccgccatgctgcggcagcacggcaagatcgagggcaagaacgtcttctactggttccagaaccacaaggcccgcgagcgccagaagcgccgcctcaccagcctcgacgtcaacgtgcccgccgccggcgcggccgacgccaccaccagccaactcggcgtcctctcgctgtcgtcgccgccgccttcaggcgcggcgcctccctcgcccaccctcggcttctacgccgccggcaatggcggcggatcggctgtgctgctggacacgagttccgactggggcagcagcggcgctgctatggccaccgagacatgcttcctgcaggactacatgggcgtgacggacacgggcagctcgtcgcagtggccacgcttctcgtcgtcggacacgataatggcggcggccgcggcgcgggcggcgacgacgcgggcgcccgagacgctccctctcttcccgacctgcggcgacgacggcggcagcggtagcagcagctacttgccgttctggggtgccgcgtccacaactgccggcgccacttcttccgttgcgatccaacagcaacaccagctgcaggagcagtacagcttttacagcaacagcaacagcacccagctggccggcaccggcaaccaagacgtatcggcaacagcagcagcagccgccgccctggagctgagcctcagctcatggtgctccccttaccctgctgcagggagtatgtgagagcaacgcgagctgccactgctcttcactgatgtctctggaatggaaggaggaggaagtgagaacagatcattcgacaaagcagcattagtccgttgatcggtggaagaccactcgtcagtgttgagttgaatgtttgatcaataaaatacggcaatgctgtaagggttgttttttatgccattgataatacactgtactgttcagttgttgaactctatttcttagccatgccaagtgcttttcttattttgaataacattacagcaaaaagttgaaagacaaaaaaaaaaacccccgaacagagtgctttgggtcccaagcttctttagactgtgttcggcgttccccctaaatttctccccctatatctcactcacttgtcacatcagcgttctctttccccctatatctccacgctctacagcagttccacctatatcaaacctctataccccaccacaacaatattatatactttcatcttcaactaactcatgtaccttccaatttttttctactaataattatttacgtgcacagaaacttagcaaggagagagagagcgggaatttaaatgctcggcgttaggcttttagtccgctaggtggctagaccgaggttaggacgctagttcactaggggcctagtggtgttttaagacgtcacggtcacccggtccgggcctagaaggccagcttcaagtttgtacaaaaaagcaggctccggccagaatggcccggaccgaagcttgcatgcctgcagtgcagcgtgacccggtcgtgcccctctctagagataatgagcattgcatgtctaagttataaaaaattaccacatattttttttgtcacacttgtttgaagtgcagtttatctatctttatacatatatttaaactttactctacgaataatataatctatagtactacaataatatcagtgttttagagaatcatataaatgaacagttagacatggtctaaaggacaattgagtattttgacaacaggactctacagttttatctttttagtgtgcatgtgttctcctttttttttgcaaatagcttcacctatataatacttcatccattttattagtacatccatttagggtttagggttaatggtttttatagactaatttttttagtacatctattttattctattttagcctctaaattaagaaaactaaaactctattttagtttttttatttaataatttagatataaaatagaataaaataaagtgactaaaaattaaacaaataccctttaagaaattaaaaaaactaaggaaacatttttcttgtttcgagtagataatgccagcctgttaaacgccgtcgacgagtctaacggacaccaaccagcgaaccagcagcgtcgcgtcgggccaagcgaagcagacggcacggcatctctgtcgctgcctctggacccctctcgagagttccgctccaccgttggacttgctccgctgtcggcatccagaaattgcgtggcggagcggcagacgtgagccggcacggcaggcggcctcctcctcctctcacggcaccggcagctacgggggattcctttcccaccgctccttcgcacgtaagcgcttacgcaccgaacaacgtaagcgcttacgcaccgaacaacgtaagcgcttacgctttcccttcctcgcccgccgtaataaatagacaccccctccacaccctctttccccaacctcgtgttgttcggagcgcacacacacacaaccagatctcccccaaatccacccgtcggcacctccgcttcaaggtacgccgctcgtcctcccccccccccctctctaccttctctagatcggcgttccggtccatgcatggttagggcccggtagttctacttctgttcatgtttgtgttagatccgtgtttgtgttagatccgtgctgctagcgttcgtacacggatgcgacctgtacgtcagacacgttctgattgctaacttgccagtgtttctctttggggaatcctgggatggctctagccgttccgcagacgggatcgatttcatgattttttttgtttcgttgcatagggtttggtttgcccttttcctttatttcaatatatgccgtgcacttgtttgtcgggtcatcttttcatgcttttttttgtcttggttgtgatgatgtggtctggttgggcggtcgttctagatcggagtagaattctgtttcaaactacctggtggatttattaattttggatctgtatgtgtgtgccatacatattcatagttacgaattgaagatgatggatggaaatatcgatctaggataggtatacatgttgatgcgggttttactgatgcatatacagagatgctttttgttcgcttggttgtgatgatgtggtgtggttgggcggtcgttcattcgttctagatcggagtagaatactgtttcaaactacctggtgtatttattaattttggaactgtatgtgtgtgtcatacatcttcatagttacgagtttaagatggatggaaatatcgatctaggataggtatacatgttgatgtgggttttactgatgcatatacatgatggcatatgcagcatctattcatatgctctaaccttgagtacctatctattataataaacaagtatgttttataattattttgatcttgatatacttggatgatggcatatgcagcagctatatgtggatttttttagccctgccttcatacgctatttatttgcttggtactgtttcttttgtcgatgctcaccctgttgtttggtgttacttctgcaggtcgactttaacttagcctaggatccatggccactgtgaacaactggctcgctttctccctctccccgcaggagctgccgccctcccagacgacggactccacactcatctcggccgccaccgccgaccatgtctccggcgatgtctgcttcaacatcccccaagattggagcatgaggggatcagagctttcggcgctcgtcgcggagccgaagctggaggacttcctcggcggcatctccttctccgagcagcatcacaaggccaactgcaacatgatacccagcactagcagcacagtttgctacgcgagctcaggtgctagcaccggctaccatcaccagctgtaccaccagcccaccagctcagcgctccacttcgcggactccgtaatggtggcttcctcggccggtgtccacgacggcggtgccatgctcagcgcggccgccgctaacggtgtcgctggcgctgccagtgccaacggcggcggcatcgggctgtccatgattaagaactggctgcggagccaaccggcgcccatgcagccgagggtggcggcggctgagggcgcgcaggggctctctttgtccatgaacatggcggggacgacccaaggcgctgctggcatgccacttctcgctggagagcgcgcacgggcgcccgagagtgtatcgacgtcagcacagggtggagccgtcgtcgtcacggcgccgaaggaggatagcggtggcagcggtgttgccggcgctctagtagccgtgagcacggacacgggtggcagcggcggcgcgtcggctgacaacacggcaaggaagacggtggacacgttcgggcagcgcacgtcgatttaccgtggcgtgacaaggcatagatggactgggagatatgaggcacatctttgggataacagttgcagaagggaagggcaaactcgtaagggtcgtcaagtctatttaggtggctatgataaagaggagaaagctgctagggcttatgatcttgctgctctgaagtactggggtgccacaacaacaacaaattttccagtgagtaactacgaaaaggagctcgaggacatgaagcacatgacaaggcaggagtttgtagcgtctctgagaaggaagagcagtggtttctccagaggtgcatccatttacaggggagtgactaggcatcaccaacatggaagatggcaagcacggattggacgagttgcagggaacaaggatctttacttgggcaccttcagcacccaggaggaggcagcggaggcgtacgacatcgcggcgatcaagttccgcggcctcaacgccgtcaccaacttcgacatgagccgctacgacgtgaagagcatcctggacagcagcgccctccccatcggcagcgccgccaagcgcctcaaggaggccgaggccgcagcgtccgcgcagcaccaccacgccggcgtggtgagctacgacgtcggccgcatcgcctcgcagctcggcgacggcggagccctggcggcggcgtacggcgcgcactaccacggcgccgcctggccgaccatcgcgttccagccgggcgccgccagcacaggcctgtaccacccgtacgcgcagcagccaatgcgcggcggcgggtggtgcaagcaggagcaggaccacgcggtgatcgcggccgcgcacagcctgcaggacctccaccacctgaacctgggcgcggccggcgcgcacgactttttctcggcagggcagcaggccgccgccgctgcgatgcacggcctgggtagcatcgacagtgcgtcgctcgagcacagcaccggctccaactccgtcgtctacaacggcggggtcggcgacagcaacggcgccagcgccgtcggcggcagtggcggtggctacatgatgccgatgagcgctgccggagcaaccactacatcggcaatggtgagccacgagcaggtgcatgcacgggcctacgacgaagccaagcaggctgctcagatggggtacgagagctacctggtgaacgcggagaacaatggtggcggaaggatgtctgcatgggggactgtcgtgtctgcagccgcggcggcagcagcaagcagcaacgacaacatggccgccgacgtcgggcatggcggcgcgcagctcttcagtgtctggaacgacacttaagcgtacctagtggtacctgacatcttatagtctgcaacctctcgtgtctgaattcctatctttatcaagtgttattgcttccacgactataggacagctttcgtcgaaagcttttgctcatgtgatctcgaaggattcatctagtctgatttttcgtgacttgtatcggttttattggattcatccaacatatatcaataaaaaatgagttgtgtttcctttcttcctagttcagttaaaattatttccctcctgcgcttgtgctgtaattgtctgtgtacctgttgtttgtgactgtgttagttcccttggatatgatttcgtatttgatatgtacatggagatagcttagcttcattattggagtatgaagttagtatgacatagtcactctcctggaaaattgacactgcaaaccatatttttattctgaaccacaaatcctagtcagtccgctggcatatgccgtccgtttgctgaatccagaacgtgggtttggagatgtacggctgagatgcctctatgcgaaggggatttcgtggtgaaacgagatgggagtagagcaacgcccgtggaagatgcttcaaacttccacacttttgagcaacgatcggcagtagtaaggtagacgatttcaagatcaaagcatatgaagataaacaacatcaacaacaaaatttgttggggttctatagagagaaacagagctacatacatacactgttttgtatctaccatctgagatgatgaaaagatgaaaaactaaagaatgccccggcgccaacgccaggacacgccgcgcgcgcgtcacccgagccatctcttgacccagccggcgctgtatatttacacacgttgcagcatcgatcaccacctgttcgatcgcgtcgccgtcaccggcgcgccgcgacttattgaactagtctagggcgcggctaacaacctagcttagattgccttgtctaaacccttaggctaacgcgccactctagaagagctccaccttgctagttggatattacctcttctcttcaaagtatccttgaacgctcaccggttatcaaatctctacactatagctctgtagtcttgctagatagttagttctttagctctctctagaggttcacaaactcaatacaacacacagtggagtagggtattacgctccggcggcccgaaccactctaaatccttgtgtcctcgtgtgctcttccaccattaatgactgtaattgcagggacacgaagagttgtagcgcttttgccaacaagatccgctatatgctagtagagtggaacctgcacagcaacaagcatccaataatctgagaataagaattatgtgtggtgatggttctcatctctgcaactcgccattttcgcgagagaaccaaatccaagttggtgaagatcatgatttgggctcatgggctggcatagtagctattacctttgcaattgtggttcgaatctatccgatattctccttttcagggagagctaatgcttatgcttattgggtattttggtttgacactgcttcacgcccaaaaaaaggcaactatgtctgagttggatatggcccaaaaaaaggcagctatgtctgagttggatatggaagtcttctttcgtttagggtgaagtaagaccaagctcatgagcttattatcttaggtcggaacaaattagttgataggcatggcacatttatcaaattataatgattttaacagaaaagcaacacctctttttcagcagcaccagctttgcaagctgcaattgacactccaagcatagtatttgctccaaactcagcctgcatttcgcacaatatcatatctatttccatttggataaaatatattttccagaaatatgggaacagaatcaagatacagaaaaaagttgtggtagtagtggtaagtggaaacacaagtacagtgaaaagatagcattatttctgaacagtcaaattaaccgaaataagtagtatcacatactgcccctaaattgactacacccaatgtaaagaattgcttgagcatattgagccatcagttgtttgtttgtgtaacggatttgacaatgcagagttcaggagcaaaaaaccgcaaaggagagaaagagggaaaggatctcctagtatcccaccttgtggcgcgccctgtcaagtgcatgatggcctggtcgatctgcgtctgctgctgcggttccatcccaacgagtgcctccgacaccttgtcgttgatcacccgcaccgcgtaggcgacccccctggcgaggaacttccgcctctcggaggccccggccgcgtcggcggcggcgccctcgagcgcgcccacgctagccgtagatgctcggtgcacggccttgttggtgtgcaactcgacctcaacggccggtgcgctacgcccgtcaaggatctggcgcgcccgcaccctcgtgatcacggtgggcgcctcccgcctcatgtggccgacgatgaaaagcgccgggttaggggccttggcgcgcaccgccgtattcagggcctcctcgctcttgcgcgagagcaggtgcttccccaggtactcctgcactgacaaggctgccacagcggtggaatttgtcctcacgacttcgccacgtcgtcctcacctccctggcttcccacgactccgccgtatcgaggtgctcggtgggtcgtcttaatccgaagtccgaactaggaagacgagacagagaggtctgaggaatgggcctcgtttgatgttgagctgaattatttttccagcataagcccaggtcttggtccatgaacaaaattactagaaacccagcccagtactacgatctaaaagagggactgccactggatagctctctctagcattctccacgctccaatacagcggcgtcgtgtctatccgggtctatccgcgaacacgtgagaactctccagaaactgctttctcctccacttcatctctctcgctttccctctataaaaagaccccttctaggaattgagggagacagcaagcaccaagcagcgatccgaagctcaatcaattcactcaaacctcttccccaaatcttcgattagatcttcgttgacaagaagactagaaccgaacctgacatgtccaacctgctcacggttcaccagaaccttccggctcttccagtggacgcgacgtccgatgaagtcaggaagaacctcatggacatgttccgcgacaggcaagcgttcagcgagcacacctggaagatgctgctctccgtctgccgctcctgggctgcatggtgcaagctgaacaacaggaagtggttccccgctgagcccgaggacgtgagggattaccttctgtacctgcaagcgcgaggtttgtttctgcttctacctttgatatatatataataattatcattaattagtagtaatataatatttcaaatatttttttcaaaataaaagaatgtagtatatagcaattgcttttctgtagtttataagtgtgtatattttaatttataacttttctaatatatgaccaaaacatggtgatgcctaggtctggcagtgaagaccatccagcaacaccttggacaactgaacatgcttcacaggcgctccggcctcccgcgccccagcgactcgaacgccgtgagcctcgtcatgcgccgcatcaggaaggaaaacgtcgatgccggcgaaagggcaaagcaggccctcgcgttcgagaggaccgatttcgaccaggtccgcagcctgatggagaacagcgacaggtgccaggacattaggaacctggcgttcctcggaattgcatacaacacgctcctcaggatcgcggaaattgcccgcattcgcgtgaaggacattagccgcaccgacggcggcaggatgcttatccacattggcaggaccaagacgctcgtttccaccgcaggcgtcgaaaaggccctcagcctcggagtgaccaagctcgtcgaacgctggatctccgtgtccggcgtcgcggacgacccaaacaactacctcttctgccgcgtccgcaagaacggggtggctgcccctagcgccaccagccaactcagcacgagggccttggaaggtattttcgaggccacccaccgcctgatctacggcgcgaaggatgacagcggtcaacgctacctcgcatggtccgggcactccgcccgcgttggagctgctagggacatggcccgcgccggtgtttccatccccgaaatcatgcaggcgggtggatggacgaacgtgaacattgtcatgaactacattcgcaaccttgacagcgagacgggcgcaatggttcgcctcctggaagatggtgactgaggtacccaacctagacttgtccatcttctggattggccaacttaattaatgtatgaaataaaaggatgcacacatagtgacatgctaatcactataatgtgggcatcaaagttgtgtgttatgtgtaattactagttatctgaataaaagagaaagagatcatccatatttcttatcctaaatgaatgtcacgtgtctttataattctttgatgaaccagatgcatttcattaaccaaatccatatacatataaatattaatcatatataattaatatcaattgggttagcaaaacaaatctagtctaggtgtgttttgcgatccgatatcgatcaccttgctagttggatattacctcttctcttcaaagtatccttgaacgctcaccggttatcaaatctctacactatagctctgtagtcttgctagatagttagttctttagctctcgggccctggccgaagcttataacttcgtatagcatacattatacgaagttataacagcggaccgggttaccgaattcctgcccttaaggccaattgttcaagattcattcaacaattgaaacatctcccatgattaaatcagtataaggttgctatggtcttgcttgacaaagtttttttttgagggaatttcaactaaatttttgagtgaaactatcaaatactgattttaaaaaatttttataaaaggaagcgcagagataaaaggccatctatgctacaaaagtacccaaaaatgtaatcctaaagtatgaattgcattttttttttgtttggacgaaaggaaaggagtattaccacaagaatgatatcatcttcatatttagatcttttttgggtaaagcttgagattctctaaatatagagaaatcagaagaaaaaaaaaccgtgttttggtggttttgatttctagcctccacaataactttgacggcgtcgacaagtctaacggacaccaagcagcgaaccaccagcgccgagccaagcgaagcagacggccgagacgttgacaccttcggcgcggcatctctcgagagttccgctccggcgctccacctccaccgctggcggtttcttattccgttccgttccgcctcctgctctgctcctctccacaccacacggcacgaaaccgttacggcaccggcagcacccagcacgggagaggggattcctttcccaccgttccttccctttccgccccgccgctataaatagccagccccatccccagcttttttccccaatctcatctcctctctcctgttgttcggagcacacgcacaatccgatcgatccccaaatccccttcgtctctcctcgcgagcctcgtggatcccagcttcaaggtacggcgatcgatcatcccccctccttctctctaccttcttttctctagactacatcggatggcgatccatggttagggcctgctagtttcccttcctgttttgtcgatggctgcgaggcacaatagatctgatggcgttatgacggctaacttgtcatgttgttgcgatttatagtccctttaggagatcagtttaatttctcggatggttcgagatcggtggtccatggttagtaccctaagatccgcgctgttagggttcgtagatggaggcgacctgttctgattgttaacttgtcagtacctgggaaatcctgggatggttctagctcgtccgcagatgagatcgatttcatgatcctctgtatcttgtttcgttgcctaggttccgtctaatctatccgtggtatgatgtagatgttttgatcgtgctaactacgtcttgtaaagttaattgtcaggtcataatttttagcatgcctttttttttgtttggttttgtctaattgggctgtcgttctagatcagagtagaagactgttccaaactacctgctggatttattgaacttggatctgtatgtgtgtcacatatcttcataaattcatgattaagatggattgaaatatcttttatctttttggtatggatagttctatatgttggtgtggctttgttagatgtatacatgcttagatacatgaagcaacgtgctgctactgtttagtaattgctgttcatttgtctaataaacagataaggatatgtatttatgttgctgttggttttgctggtactttgttggatacaaatgcttcaatacagaaaacagcatgctgctacgatttaccatttatctaatcttatcatatgtctaatctaataaacaaacatgcttttaaattatcttcatatgcttggatgatggcatacacagcggctatgtgtggttttttaaatacccagcatcatgggcatgcatgacactgctttaatatgctttttatttgcttgagactgtttcttttgtttatactgaccctttagttcggtgactcttctgcaggtcgactttaacttagcctaggatccatggcccagtccaagcacggcctgaccaaggagatgaccatgaagtaccgcatggagggctgcgtggacggccacaagttcgtgatcaccggcgagggcatcggctaccccttcaagggcaagcaggccatcaacctgtgcgtggtggagggcggccccttgcccttcgccgaggacatcttgtccgccgccttcatgtacggcaaccgcgtgttcaccgagtacccccaggacatcgtcgactacttcaagaactcctgccccgccggctacacctgggaccgctccttcctgttcgaggacggcgccgtgtgcatctgcaacgccgacatcaccgtgagcgtggaggagaactgcatgtaccacgagtccaagttctacggcgtgaacttccccgccgacggccccgtgatgaagaagatgaccgacaactgggagccctcctgcgagaagatcatccccgtgcccaagcagggcatcttgaagggcgacgtgagcatgtacctgctgctgaaggacggtggccgcttgcgctgccagttcgacaccgtgtacaaggccaagtccgtgccccgcaagatgcccgactggcacttcatccagcacaagctgacccgcgaggaccgcagcgacgccaagaaccagaagtggcacctgaccgagcacgccatcgcctccggctccgccttgccctccggactcagatctcgatagggtaccaatggccagttaacagatccagctgctgctgttctagggttcacaagtctgcctatttgtcttccccaatggagctatggttgtctggtctggtccttggtcgtgtcccgtttcattgtgtactatttacctgtaatgtgtatccttaagtctggtttgatggtgtctgaaacgttttgctgtggtagagcagcatggaagaactataatgaataagtgatccctaatcattgtgtccaaattttgcttctgctatacccttttgtgctgtttcttatgttttgcttaaaaatttgatctgacaaacaaatttgtctaaattatgctcttgttctgactgtgtactgtacacatttgtattgctaccggtttggcacatagttttctctttgattgcagatcaaacccttctgattgcagattgcttggctatggctgatgtgctcactgttcttctttagcttgtatattgctgatggtggcttggctacggctgaaaaagttgctgctgcgccgacttggcaactgttgctccagtaatgctttgtcctctcttcctagccgccgacttggcacttggcagctgttgctcctgtaatgcgttgttatctcttatctcttgagatgtactatgattttgaggctgtttgacttgtgccagattgccagtgctgatgctatattatctcaggtttttatgctagtatatgttttactgtgtgctgcctgtgtcgagttacgtaatctattgaaccgctatgcgtgttgatgccctgttgttgcttgccagattgatgcccctgttgcttgcagcttgcaagctgtagtgaaatcctaaaattcgaaaccaaatctattctgaacttttgaagatctgtgatgtccggaagaaaagattcaaacagataaacgggactctccagaatctataaaataaatgatcgacaaacgctttgctttggtaggcttcctagttagttagcggaccgaagcttcggtccgggcctagaaggccagcttcggccgcccctcggtaccctgggatctgcccttactttaacgcctctaaccaacacccctttatctttataaggaacaataaacagaatttgccccactgttctaaatcacctaataatatccccagctaaaaacaataaaggtttcctagaattaagacaagcatgactgttcctccaggagggtttggaacattgttgcagtcttgcagatacgggcgaagggtgagaaacagagcggagggctggaggtgacctcggtagtcgacgccggagttgagcttgacaacgacggggcggcccctgatggacttgaggaagtccgatggcgtcttcaccgtcccgccggcgcccgaggcgggcctgtcgctgccgccgccgccgctgctcatcttgcgcgctgtgcccccggcggtgtccctgtgttgcggatcgcgggtgggccaggtggatgcgagggcgacccgtttggactccggccggagccgccggatccctggtcggtgtcagtgccgtttactctgggccccacgtgtcagtaccgtctgtagatgacaacaacccgtcgtccacagtcatgtccaaaatatcctttcttcttttttttcgattcggatatctatcttccttttttttttccaaaaatcttcttgacgcaccagcgcgcacgtttgtggtaaacgccgacacgtcggtcccacgtcgatagaccccacccaccagtgagtagcgtgtacgtattcgggggtgacggacgtgtcgccgtcgtcttgctagtcccattcccatctgagccacacatctctgaacaaaaaaaaggagggaggcctccacgcacatccccctccgtgccacccgccccaaaccctcgcgccgcctccgagacagccgccgcaaccatggccaccgccgccgccgcgtctaccgcgctcactggcgccactaccgctgcgcccaaggcgaggcgccgggcgcacctcctggccacccgccgcgccctcgccgcgcccatcaggtgctcagcggcgtcacccgccatgccgatggctcccccggccaccccgctccggccgtggggccccaccgagccccgcaagggtgctgacatcctcgtcgagtccctcgagcgctgcggcgtccgcgacgtcttcgcctaccccggcggcgcgtcgatggagatccaccaggcactcacccgctcccccgtcatcgccaaccacctcttccgccacgagcaaggggaggcctttgccgcctccggctacgcgcgctcctcgggccgcgtcggcgtctgcatcgccacctccggccccggcgccaccaacctagtctccgcgctcgccgacgcgctgctcgattccgtcccgatggtcgccatcacgggacaggtggcgcgacgcatgattggcaccgacgccttccaggagacgcccatcgtcgaggtcacgcgctccatcaccaagcacaactacctggtcctcgacgtcgacgacatcccccgcgtcgtgcaggaggctttcttcctcgcctcctctggtcgaccagggccggtgcttgtcgacatccccaaggacatccagcagcagatggcggtgcctgtctgggacaagcccatgagtctgcctgggtacattgcgcgccttcccaagccccctgcgactgagttgcttgagcaggtgctgcgtcttgttggtgaatcgcggcgccctgttctttatgtgggcggtggctgcgcagcatctggtgaggagttgcgacgctttgtggagctgactggaatcccggtcacaactactcttatgggcctcggcaacttccccagcgacgacccactgtctctgcgcatgctaggtatgcatgggacggtgtatgcaaattatgcagtggataaggccgatctgttgcttgcacttggtgtgcggtttgatgatcgcgtgacagggaagattgaggcttttgcaagcagggctaagattgtgcacgttgatattgatccggctgagattggcaagaacaagcagccacatgtgtccatctgtgcagatgttaagcttgctttgcagggcatgaatgctcttcttgaaggaagcacatcaaagaagagctttgactttggctcatggaacgatgagttggatcagcagaagagggaattcccccttgggtataaaacatctaatgaggagatccagccacaatatgctattcaggttcttgatgagctgacgaaaggcgaggccatcatcggcacaggtgttgggcagcaccagatgtgggcggcacagtactacacttacaagcggccaaggcagtggttgtcttcagctggtcttggggctatgggatttggtttgccggctgctgctggtgcttctgtggcaaacccaggtgtcactgttgttgacatcgatggagatggtagctttctcatgaacgttcaggagctagctatgatccgaattgagaacctcccagtgaaggtctttgtgctaaacaaccagcacctggggatggtggtgcagttggaggacaggttctataaggccaacagagcgcacacatacttgggaaacccagagaatgaaagtgagatatatccagatttcgtgacgatcgccaaagggttcaacattccagccgtccgtgtgacaaagaagaacgaagtccgcgcagcgataaagaagatgctcgagactccagggccgtacctcttggatataatcgtcccacaccaggagcatgtgttgcctatgatccctagtggtggggctttcaaggatatgatcctggatggtgatggcaggactgtgtactgacttcgaataggtacccggggatcctctagtgccgtgggtcgtttaagctgccgctgtacctgtgtcgtctggtgccttctggtgtacctgggaggttgtcgtctatcaagtatctgtggttggtgtcatgagtcagtgagtcccaatactgttcgtgtcctgtgtgcattatacccaaaactgttatgggcaaatcatgaataagcttgatgttcgaacttaaaagtctctgctcaatatggtattatggttgtttttgttcgtctcctaatatttgcctgggatcaaattttattggctggtgttcatttgacctccatgttcttgctaggctccattttttactctacagccataatatgtttgattgtttggtttgttctttgttgtacacctggttctgtcgagcttagttttcgacactggcttacagcttaacatgttgctattttattgggttctgattgctattttattgggttctgattgctagtttttgctgaatccaaaaaccatgttatttatttaagcgatccaggttattattatgatggtggctaagtttttttttttccaagggtaaattttctggattctccagtgtttctgtggccgaattcaatcactagagtcgacctgcaaagcttcggtccgggcctagaaggcccgcgccacttacgcttgattccgatgacttcgtaggttcctagctcaagccgctcgtgtccaagcgtcacttacgattagctaatgattacggcatctaggaccgactagttcttatgtgcttctagtctccaaatgtggttgatagttattttgctctaagatcaacagtaatgaagtataaatcatcgttgtggtgtgctactcggttaattgagcattaacacacacaaacatgacgaggatggtataatctccaaaaatgtgtactttgttaggtgggaccctatagccttgattaatgtgctatgttaggcatgcctggaaacgtgtgacgcatatgttttgtgaacctgttgatattatatgtgcttttatattaccatattttattaaaatactaatatttattactagtaagatataacattctatctagcttaaaaactaaccataaatattccataataactagatttaccaaactaatatactaaatatacataataaatacaaaattaacaagacaataatcaatatttatgagcttaatatatttagacattatggttggtcgacgataatcatgctaacttttcgtaattgcttgattgaaatatgcttagaataatgcctctttgttctacatggcaaatagggaccattatggtgtaacaccctgggaaccacaaacaccccgaaatgctactaaactacacaactaaccttcatatataaaatttcgacagcatctcctttgaaaatttgcatagacgtggaagcaacagagtataaacagatctgcgtttaaacgtgcaagcgctactagacaattcagtacattaaaaacgtccgcaatgtgttattaagttgtctaagcgtcaatttgtttacaccacaatatatcctgcca

SEQ ID NO: 53 - DNA, 28597 bp, synthetic construct
  misc_feature 1..28597: note = PHP95881
  source 1..28597: mol_type = other DNA
gtttacccgccaatatatcctgtcaaacactgatagtttaaactgaaggcgggaaacgacaatctgatcatgagcggagaattaagggagtcacgttatgacccccgccgatgacgcgggacaagccgttttacgtttggaactgacagaaccgcaacgttgaaggagccactcagcaagctggtacgattgtaatacgactcactatagggcgaattgagcgctgtttaaacgctcttcaactggaagagcggttacgctgtttaaacgctcttcaactggaagagcggttactaccggttcactagctagctgctaatcgagctagttaccctatgaggtgacatgaagcgctcacggttactatgacggttagcttcacgactgttggtggcagtagcgtacgacttagctatagttccggacttacccttaagcgatttaaatctgcggttaccgaattcgagctcggtacctagtacccttgtacttttggtttcacctgcatagagaaaacccacaagaatatgacagtctgatttgtcagtctcattctcaagcaacatttctctatccgttactttcatggtgaataacacaatccatcatcaatactttgtgttactcagaaactgaaagttattccgagtcttgcatatctttggacctactcgtttttctaccattattgctgattgttaagctctcgctacttgaatcggcattgttggagtgggaaggttcaaaaaattggagttatgactagttgtctctttctatgtacgatggagaaaatgaataaacaactgagaaaatggctcttgtttagttgatgatgctcttaagctttccactggttgccatatatgatttgggcatttcactttgatcttaatgggccttgtaaagcccaagactcatgattatctttagttgatgctcttaattaggtgtgggcaaataattcaaactgtatgtacccgaccaaaaccaaagcaaaaataatcgaaccaaaccgaaaatttaaaaataaccgaatgaaaactaaatcctataactgaaagaactgaaaccgaatcaaaatatttaatgtaaccaaaaatatccgaaatataattatattgtcaaaaatattaataatttctagattaaataattaaaaatacttaaaaatttatataaaatagtaaaaatactcgaaaataaccacaaatattcaaaaacaaccgaaatatcccaaaatattcaaagcaaaataaccgaatggataccaaattttaaaaccgaaaaaactggaacaaaaccaaaatcgaaccaaaatttcaaaaatcgaataaatactaaactttagaacaaaaaaaaacgataaccgaatgtatacgaaccaaagccgaattagataaccgaacgtccaggactactcttaatctttccgccacttatgatttgggctattactttgtttataatgagccttttcaagctcaagttcatgattgtccgtgagatgagaaactgacttgttggattcgaaaccctagctagtattggttaatacttaatacataaatgacctgcattgacatcatcatccaagaaaataaaaattgtatgcttgagatatttagttttcctagctaggttttctttattttagtaccgaatctttaggtgtgccacgttaatttagacccattttttcatacttaccaactgagtctagtttaatcatgactataatcgtataaaatgattcagtcgacgtcattgcgaacgtatataaaatcatccaaattgacgtcattccaaagaggtaagcatgcttatctaagagtccgagcatactaaacaagacgacattttatttgcactccaaatcaaattttgtattgcctaaagaaaaacaatcaaactcaagtttcttaaaattaatttcattcaaactaatcactttcaatatctcacatattattcatgccatttctatttgtctaaacatgatttaaaaaaaaaagtaaaatacaaagattactatgcaaaaactctataaaaaaaaattcaaatttcttatttatttgtgacatcaaattttcaaaataatttttttaattatcggttgatccggtcagtcgataaaaacataaactttcagcgaccgttaaaactttcctactaccgatttagagaaaatcttagcttgaaacgtaattgtaacctgccttcatgcaagtcgcaagatatgtcatcctaagttgtatatgttttctcaaaagatgtatttacttgagaaaatacgtttcaacgttgatggacaaccaattaagaatcaagcacctttcgtaatcaatttaggcttatcgtctaaggtatactgatttacgacagttgactagacttataaggaacaaaataatagaatagtttctaaacacttcacctaatcatagagactaagatggtaattcgtaaacgacaaagcctagtgacactgtccattgtaaaattccacatcatattagtattaaacatatacatgtagtttcctgaacacatgtagtatcaaacacacttcgtggcttcttcctcgaaacctgcggccgcgctatagttccggacttacccttaagataacttcgtatagcatacattatacgaagttatgggcccacgcgtgaagagcggttaccagagctggtcacctttgtccaccaagatggaactgtcttcggccagaatggccatctggattcagcaggcctagaaggccatttatcgctatcaactttgtatagaaaagttgggccgagctcggtacggccagaatggcccggaccgggttaccaagcggccgcacactgatagtttaaactgaaggcgggaaacgacaatctgatcatgagcggagaattaagggagtcacgttatgacccccgccgatgacgcgggacaagccgttttacgtttggaactgacagaaccgcaacgattgaaggagccactcagccgcgggtttctggagtttaatgagctaagcacatacgtcagaaaccattattgcgcgttcaaaagtcgcctaaggtcactatcagctagcaaatatttcttgtcaaaaatgctccactgacgttccataaattcccctcggtatccaattagagtctcatattcactcccatggcggccaatgcgggcggcggtggagcgggaggaggcagcggcagcggcagcgtggctgcgccggcggtgtgccgccccagcggctcgcggtggacgccgacgccggagcagatcaggatgctgaaggagctctactacggctgcggcatccggtcgcccagctcggagcagatccagcgcatcaccgccatgctgcggcagcacggcaagatcgagggcaagaacgtcttctactggttccagaaccacaaggcccgcgagcgccagaagcgccgcctcaccagcctcgacgtcaacgtgcccgccgccggcgcggccgacgccaccaccagccaactcggcgtcctctcgctgtcgtcgccgccgccttcaggcgcggcgcctccctcgcccaccctcggcttctacgccgccggcaatggcggcggatcggctgtgctgctggacacgagttccgactggggcagcagcggcgctgctatggccaccgagacatgcttcctgcaggactacatgggcgtgacggacacgggcagctcgtcgcagtggccacgcttctcgtcgtcggacacgataatggcggcggccgcggcgcgggcggcgacgacgcgggcgcccgagacgctccctctcttcccgacctgcggcgacgacggcggcagcggtagcagcagctacttgccgttctggggtgccgcgtccacaactgccggcgccacttcttccgttgcgatccaacagcaacaccagctgcaggagcagtacagcttttacagcaacagcaacagcacccagctggccggcaccggcaaccaagacgtatcggcaacagcagcagcagccgccgccctggagctgagcctcagctcatggtgctccccttaccctgctgcagggagtatgtgagagcaacgcgagctgccactgctcttcactgatgtctctggaatggaaggaggaggaagtgagaacagatcattcgacaaagcagcattagtccgttgatcggtggaagaccactcgtcagtgttgagttgaatgtttgatcaataaaatacggcaatgctgtaagggttgttttttatgccattgataatacactgtactgttcagttgttgaactctatttcttagccatgccaagtgcttttcttattttgaataacattacagcaaaaagttgaaagacaaaaaaaaaaacccccgaacagagtgctttgggtcccaagcttctttagactgtgttcggcgttccccctaaatttctccccctatatctcactcacttgtcacatcagcgttctctttccccctatatctccacgctctacagcagttccacctatatcaaacctctataccccaccacaacaatattatatactttcatcttcaactaactcatgtaccttccaatttttttctactaataattatttacgtgcacagaaacttagcaaggagagagagagcgggaatttaaatgctcggcgttaggcttttagtccgctaggtggctagaccgaggttaggacgctagttcactaggggcctagtggtgttttaagacgtcacggtcaccacgcgtggaccgaagcttgcatgcctgcagtgcagcgtgacccggtcgtgcccctctctagagataatgagcattgcatgtctaagttataaaaaattaccacatattttttttgtcacacttgtttgaagtgcagtttatctatctttatacatatatttaaactttactctacgaataatataatctatagtactacaataatatcagtgttttagagaatcatataaatgaacagttagacatggtctaaaggacaattgagtattttgacaacaggactctacagttttatctttttagtgtgcatgtgttctcctttttttttgcaaatagcttcacctatataatacttcatccattttattagtacatccatttagggtttagggttaatggtttttatagactaatttttttagtacatctattttattctattttagcctctaaattaagaaaactaaaactctattttagtttttttatttaataatttagatataaaatagaataaaataaagtgactaaaaattaaacaaataccctttaagaaattaaaaaaactaaggaaacatttttcttgtttcgagtagataatgccagcctgttaaacgccgtcgacgagtctaacggacaccaaccagcgaaccagcagcgtcgcgtcgggccaagcgaagcagacggcacggcatctctgtcgctgcctctggacccctctcgagagttccgctccaccgttggacttgctccgctgtcggcatccagaaattgcgtggcggagcggcagacgtgagccggcacggcaggcggcctcctcctcctctcacggcaccggcagctacgggggattcctttcccaccgctccttcgctttcccttcctcgcccgccgtaataaatagacaccccctccacaccctctttccccaacctcgtgttgttcggagcgcacacacacacaaccagatctcccccaaatccacccgtcggcacctccgcttcaaggtacgccgctcgtcctcccccccccccctctctaccttctctagatcggcgttccggtccatgcatggttagggcccggtagttctacttctgttcatgtttgtgttagatccgtgtttgtgttagatccgtgctgctagcgttcgtacacggatgcgacctgtacgtcagacacgttctgattgctaacttgccagtgtttctctttggggaatcctgggatggctctagccgttccgcagacgggatcgatttcatgattttttttgtttcgttgcatagggtttggtttgcccttttcctttatttcaatatatgccgtgcacttgtttgtcgggtcatcttttcatgcttttttttgtcttggttgtgatgatgtggtctggttgggcggtcgttctagatcggagtagaattctgtttcaaactacctggtggatttattaattttggatctgtatgtgtgtgccatacatattcatagttacgaattgaagatgatggatggaaatatcgatctaggataggtatacatgttgatgcgggttttactgatgcatatacagagatgctttttgttcgcttggttgtgatgatgtggtgtggttgggcggtcgttcattcgttctagatcggagtagaatactgtttcaaactacctggtgtatttattaattttggaactgtatgtgtgtgtcatacatcttcatagttacgagtttaagatggatggaaatatcgatctaggataggtatacatgttgatgtgggttttactgatgcatatacatgatggcatatgcagcatctattcatatgctctaaccttgagtacctatctattataataaacaagtatgttttataattattttgatcttgatatacttggatgatggcatatgcagcagctatatgtggatttttttagcactgccttcatacgctatttatttgcttggtactgtttcttttgtcgatgctcaccctgttgtttggtgttacttctgcaggtcgactttaacttagcctaggatccatggccactgtgaacaactggctcgctttctccctctccccgcaggagctgccgccctcccagacgacggactccacactcatctcggccgccaccgccgaccatgtctccggcgatgtctgcttcaacatcccccaagattggagcatgaggggatcagagctttcggcgctcgtcgcggagccgaagctggaggacttcctcggcggcatctccttctccgagcagcatcacaaggccaactgcaacatgatacccagcactagcagcacagtttgctacgcgagctcaggtgctagcaccggctaccatcaccagctgtaccaccagcccaccagctcagcgctccacttcgcggactccgtaatggtggcttcctcggccggtgtccacgacggcggtgccatgctcagcgcggccgccgctaacggtgtcgctggcgctgccagtgccaacggcggcggcatcgggctgtccatgattaagaactggctgcggagccaaccggcgcccatgcagccgagggtggcggcggctgagggcgcgcaggggctctctttgtccatgaacatggcggggacgacccaaggcgctgctggcatgccacttctcgctggagagcgcgcacgggcgcccgagagtgtatcgacgtcagcacagggtggagccgtcgtcgtcacggcgccgaaggaggatagcggtggcagcggtgttgccggcgctctagtagccgtgagcacggacacgggtggcagcggcggcgcgtcggctgacaacacggcaaggaagacggtggacacgttcgggcagcgcacgtcgatttaccgtggcgtgacaaggcatagatggactgggagatatgaggcacatctttgggataacagttgcagaagggaagggcaaactcgtaagggtcgtcaagtctatttaggtggctatgataaagaggagaaagctgctagggcttatgatcttgctgctctgaagtactggggtgccacaacaacaacaaattttccagtgagtaactacgaaaaggagctcgaggacatgaagcacatgacaaggcaggagtttgtagcgtctctgagaaggaagagcagtggtttctccagaggtgcatccatttacaggggagtgactaggcatcaccaacatggaagatggcaagcacggattggacgagttgcagggaacaaggatctttacttgggcaccttcagcacccaggaggaggcagcggaggcgtacgacatcgcggcgatcaagttccgcggcctcaacgccgtcaccaacttcgacatgagccgctacgacgtgaagagcatcctggacagcagcgccctccccatcggcagcgccgccaagcgcctcaaggaggccgaggccgcagcgtccgcgcagcaccaccacgccggcgtggtgagctacgacgtcggccgcatcgcctcgcagctcggcgacggcggagccctggcggcggcgtacggcgcgcactaccacggcgccgcctggccgaccatcgcgttccagccgggcgccgccagcacaggcctgtaccacccgtacgcgcagcagccaatgcgcggcggcgggtggtgcaagcaggagcaggaccacgcggtgatcgcggccgcgcacagcctgcaggacctccaccacctgaacctgggcgcggccggcgcgcacgactttttctcggcagggcagcaggccgccgccgctgcgatgcacggcctgggtagcatcgacagtgcgtcgctcgagcacagcaccggctccaactccgtcgtctacaacggcggggtcggcgacagcaacggcgccagcgccgtcggcggcagtggcggtggctacatgatgccgatgagcgctgccggagcaaccactacatcggcaatggtgagccacgagcaggtgcatgcacgggcctacgacgaagccaagcaggctgctcagatggggtacgagagctacctggtgaacgcggagaacaatggtggcggaaggatgtctgcatgggggactgtcgtgtctgcagccgcggcggcagcagcaagcagcaacgacaacatggccgccgacgtcgggcatggcggcgcgcagctcttcagtgtctggaacgacacttaagcgtacctagtggtacctgacatcttatagtctgcaacctctcgtgtctgaattcctatctttatcaagtgttattgcttccacgactataggacagctttcgtcgaaagcttttgctcatgtgatctcgaaggattcatctagtctgatttttcgtgacttgtatcggttttattggattcatccaacatatatcaataaaaaatgagttgtgtttcctttcttcctagttcagttaaaattatttccctcctgcgcttgtgctgtaattgtctgtgtacctgttgtttgtgactgtgttagttcccttggatatgatttcgtatttgatatgtacatggagatagcttagcttcattattggagtatgaagttagtatgacatagtcactctcctggaaaattgacactgcaaaccatatttttattctgaaccacaaatcctagtcagtccgctggcatatgccgtccgtttgctgaatccagaacgtgggtttggagatgtacggctgagatgcctctatgcgaaggggatttcgtggtgaaacgagatgggagtagagcaacgcccgtggaagatgcttcaaacttccacacttttgagcaacgatcggcagtagtaaggtagacgatttcaagatcaaagcatatgaagataaacaacatcaacaacaaaatttgttggggttctatagagagaaacagagctacatacatacactgttttgtatctaccatctgagatgatgaaaagatgaaaaactaaagaatgccccggcgccaacgccaggacacgccgcgcgcgcgtcacccgagccatctcttgacccagccggcgctgtatatttacacacgttgcagcatcgatcaccacctgttcgatcgcgtcgccgtcaccggcgcgccgcgacttattgaactagtctagggcgcggctaacaacctagcttagattgccttgtctaaacccttaggctaacgcgccacggtaacccggtccgggcctagaaggccccagagctggtcaccccatacgattggaagcttcaagtttgtacaaaaaagcaggctccggccagagttacccggaccgaagcttgcatgcctgcagtgcagcgtgacccggtcgtgcccctctctagagataatgagcattgcatgtctaagttataaaaaattaccacatattttttttgtcacacttgtttgaagtgcagtttatctatctttatacatatatttaaactttactctacgaataatataatctatagtactacaataatatcagtgttttagagaatcatataaatgaacagttagacatggtctaaaggacaattgagtattttgacaacaggactctacagttttatctttttagtgtgcatgtgttctcctttttttttgcaaatagcttcacctatataatacttcatccattttattagtacatccatttagggtttagggttaatggtttttatagactaatttttttagtacatctattttattctattttagcctctaaattaagaaaactaaaactctattttagtttttttatttaataatttagatataaaatagaataaaataaagtgactaaaaattaaacaaataccctttaagaaattaaaaaaactaaggaaacatttttcttgtttcgagtagataatgccagcctgttaaacgccgtcgacgagtctaacggacaccaaccagcgaaccagcagcgtcgcgtcgggccaagcgaagcagacggcacggcatctctgtcgctgcctctggacccctctcgagagttccgctccaccgttggacttgctccgctgtcggcatccagaaattgcgtggcggagcggcagacgtgagccggcacggcaggcggcctcctcctcctctcacggcaccggcagctacgggggattcctttcccaccgctccttcgctttcccttcctcgcccgccgtaataaatagacaccccctccacaccctctttccccaacctcgtgttgttcggagcgcacacacacacaaccagatctcccccaaatccacccgtcggcacctccgcttcaaggtacgccgctcgtcctcccccccccccctctctaccttctctagatcggcgttccggtccatgcatggttagggcccggtagttctacttctgttcatgtttgtgttagatccgtgtttgtgttagatccgtgctgctagcgttcgtacacggatgcgacctgtacgtcagacacgttctgattgctaacttgccagtgtttctctttggggaatcctgggatggctctagccgttccgcagacgggatcgatttcatgattttttttgtttcgttgcatagggtttggtttgcccttttcctttatttcaatatatgccgtgcacttgtttgtcgggtcatcttttcatgcttttttttgtcttggttgtgatgatgtggtctggttgggcggtcgttctagatcggagtagaattctgtttcaaactacctggtggatttattaattttggatctgtatgtgtgtgccatacatattcatagttacgaattgaagatgatggatggaaatatcgatctaggataggtatacatgttgatgcgggttttactgatgcatatacagagatgctttttgttcgcttggttgtgatgatgtggtgtggttgggcggtcgttcattcgttctagatcggagtagaatactgtttcaaactacctggtgtatttattaattttggaactgtatgtgtgtgtcatacatcttcatagttacgagtttaagatggatggaaatatcgatctaggataggtatacatgttgatgtgggttttactgatgcatatacatgatggcatatgcagcatctattcatatgctctaaccttgagtacctatctattataataaacaagtatgttttataattattttgatcttgatatacttggatgatggcatatgcagcagctatatgtggatttttttagccctgccttcatacgctatttatttgcttggtactgtttcttttgtcgatgctcaccctgttgtttggtgttacttctgcaggtcgactttaacttagcctaggatggacaacttcctgccgttcccgagcagcaacgccaacagcgtgcaggagctgagcatggacccgaacaacaacaggagccacttcaccaccgtgccgacctacgaccaccaccaggcccagccgcaccacttcctgccgccgttcagctacccggtggagcagatggccgccgtgatgaacccgcagccggtgtacctgagcgagtgctacccgcagatcccggtgacccagaccggcagcgagttcggcagcctggtgggcaacccgtgcctgtggcaggagaggggcggcttcctggacccgaggatgaccaagatggccaggatcaacaggaagaacgccatgatgaggagcaggaacaacagcagcccgaacagcagcccgagcgagctggtggacagcaagaggcagctgatgatgctgaacctgaagaacaacgtgcagatcagcgacaagaaggacagctaccagcagagcaccttcgacaacaagaagctgagggtgctgtgcgagaaggagctgaagaacagcgacgtgggcagcctgggcaggatcgtgctgccgaagagggacgccgaggccaacctgccgaagctgagcgacaaggagggcatcgtggtgcagatgagggacgtgttcagcatgcagagctggagcttcaagtacaagttctggagcaacaacaagagcaggatgtacgtgctggagaacaccggcgagttcgtgaagcagaacggcgccgagatcggcgacttcctgaccatctacgaggacgagagcaagaacctgtacttcgccatgaacggcaacagcggcaagcagaacgagggcagggagaacgagagcagggagaggaaccactacgaggaggccatgctggactacatcccgagggacgaggaggaggccagcatcgccatgctgatcggcaacctgaacgaccactacccgatcccgaacgacctgatggacctgaccaccgacctgcagcaccaccaggccaccagcagcagcatgccgccggaggaccacgcctacgtgggcagcagcgacgaccaggtgagcttcaacgacttcgagtggtggtagggtaccgttaacagatctactaactatctatactgtaataatgttgtatagccgccggatagctagctagtttagtcattcagcggcgatgggtaataataaagtgtcatccatccatcaccatgcgtggcaacgtgagcaatgacctgattgaacaaattgaaatgaaaagaagaaatatgttatatgtcaacgagatttcctcataatgccactgacgacgtgtgtccaagaaatgtatcagtgatacgtatattcacaatttttttatgacttatactcacaatttgtttttttactacttatactcacaatttgttgtgcgtaccataacaatttcgatcgaatatatatcagaaagttgacgaaagtaagctcactcaaaaagttaaatgggctgcggaagctgcgtcaggcccaagttttggctattctatccggtatccacgattttgatggctgagggacatatgttcgcttaagcttcggtccgggcctagaaggccgatctcccgggcacccagctttcttgtacaaagtggccgttaacggatcggccagaatggcccggaccgggttaccgaattcgagctcggtaccctggttcacaaactcaatacaacacacagtggagtagggtattacgctccggcggcccgaaccactctaaatccttgtgtcctcgtgtgctcttccaccattaatgactgtaattgcagggacacgaagagttgtagcgcttttgccaacaagatccgctatatgctagtagagtggaacctgcacagcaacaagcatccaataatctgagaataagaattatgtgtggtgatggttctcatctctgcaactcgccattttcgcgagagaaccaaatccaagttggtgaagatcatgatttgggctcatgggctggcatagtagctattacctttgcaattgtggttcgaatctatccgatattctccttttcagggagagctaatgcttatgcttattgggtattttggtttgacactgcttcacgcccaaaaaaaggcaactatgtctgagttggatatggcccaaaaaaaggcagctatgtctgagttggatatggaagtcttctttcgtttagggtgaagtaagaccaagctcatgagcttattatcttaggtcggaacaaattagttgataggcatggcacatttatcaaattataatgattttaacagaaaagcaacacctctttttcagcagcaccagctttgcaagctgcaattgacactccaagcatagtatttgctccaaactcagcctgcatttcgcacaatatcatatctatttccatttggataaaatatattttccagaaatatgggaacagaatcaagatacagaaaaaagttgtggtagtagtggtaagtggaaacacaagtacagtgaaaagatagcattatttctgaacagtcaaattaaccgaaataagtagtatcacatactgcccctaaattgactacacccaatgtaaagaattgcttgagcatattgagccatcagttgtttgtttgtgtaacggatttgacaatgcagagttcaggagcaaaaaaccgcaaaggagagaaagagggaaaggatctcctagtatcccaccttgtggcgcgccctgtcaagtgcatgatggcctggtcgatctgcgtctgctgctgcggttccatcccaacgagtgcctccgacaccttgtcgttgatcacccgcaccgcgtaggcgacccccctggcgaggaacttccgcctctcggaggccccggccgcgtcggcggcggcgccctcgagcgcgcccacgctagccgtagatgctcggtgcacggccttgttggtgtgcaactcgacctcaacggccggtgcgctacgcccgtcaaggatctggcgcgcccgcaccctcgtgatcacggtgggcgcctcccgcctcatgtggccgacgatgaaaagcgccgggttaggggccttggcgcgcaccgccgtattcagggcctcctcgctcttgcgcgagagcaggtgcttccccaggtactcctgcactgacaaggctgccacagcggtggaatttgtcctcacgacttcgccacgtcgtcctcacctccctggcttcccacgactccgccgtatcgaggtgctcggtgggtcgtcttaatccgaagtccgaactaggaagacgagacagagaggtctgaggaatgggcctcgtttgatgttgagctgaattatttttccagcataagcccaggtcttggtccatgaacaaaattactagaaacccagcccagtactacgatctaaaagagggactgccactggatagctctctctagcattctccacgctccaatacagcggcgtcgtgtctatccgggtctatccgcgaacacgtgagaactctccagaaactgctttctcctccacttcatctctctcgctttccctctataaaaagaccccttctaggaattgagggagacagcaagcaccaagcagcgatccgaagctcaatcaattcactcaaacctcttccccaaatcttcgattagatcttcgttgacaagaagactagaaccgaacctgacatgtccaacctgctcacggttcaccagaaccttccggctcttccagtggacgcgacgtccgatgaagtcaggaagaacctcatggacatgttccgcgacaggcaagcgttcagcgagcacacctggaagatgctgctctccgtctgccgctcctgggctgcatggtgcaagctgaacaacaggaagtggttccccgctgagcccgaggacgtgagggattaccttctgtacctgcaagcgcgaggtttgtttctgcttctacctttgatatatatataataattatcattaattagtagtaatataatatttcaaatatttttttcaaaataaaagaatgtagtatatagcaattgcttttctgtagtttataagtgtgtatattttaatttataacttttctaatatatgaccaaaacatggtgatgcctaggtctggcagtgaagaccatccagcaacaccttggacaactgaacatgcttcacaggcgctccggcctcccgcgccccagcgactcgaacgccgtgagcctcgtcatgcgccgcatcaggaaggaaaacgtcgatgccggcgaaagggcaaagcaggccctcgcgttcgagaggaccgatttcgaccaggtccgcagcctgatggagaacagcgacaggtgccaggacattaggaacctggcgttcctcggaattgcatacaacacgctcctcaggatcgcggaaattgcccgcattcgcgtgaaggacattagccgcaccgacggcggcaggatgcttatccacattggcaggaccaagacgctcgtttccaccgcaggcgtcgaaaaggccctcagcctcggagtgaccaagctcgtcgaacgctggatctccgtgtccggcgtcgcggacgacccaaacaactacctcttctgccgcgtccgcaagaacggggtggctgcccctagcgccaccagccaactcagcacgagggccttggaaggtattttcgaggccacccaccgcctgatctacggcgcgaaggatgacagcggtcaacgctacctcgcatggtccgggcactccgcccgcgttggagctgctagggacatggcccgcgccggtgtttccatccccgaaatcatgcaggcgggtggatggacgaacgtgaacattgtcatgaactacattcgcaaccttgacagcgagacgggcgcaatggttcgcctcctggaagatggtgactgaggtacccaacctagacttgtccatcttctggattggccaacttaattaatgtatgaaataaaaggatgcacacatagtgacatgctaatcactataatgtgggcatcaaagttgtgtgttatgtgtaattactagttatctgaataaaagagaaagagatcatccatatttcttatcctaaatgaatgtcacgtgtctttataattctttgatgaaccagatgcatttcattaaccaaatccatatacatataaatattaatcatatataattaatatcaattgggttagcaaaacaaatctagtctaggtgtgttttgcgatccgatatcgaattggccacggtaccagctgctgctgttctagggttcacaagtctgcctatttgtcttccccaatggagctatggttgtctggtctggtccttggtcgtgtcccgtttcattgtgtactatttacctgtaatgtgtatccttaagtctggtttgatggtgtctgaaacgttttgctgtggtagagcagcatggaagaactataatgaataagtgatccctaatcattgtgtccaaattttgcttctgctatacccttttgtgctgtttcttatgttttgcttaaaaatttgatctgacaaacaaatttgtctaaattatgctcttgttctgactgtgtactgtacacatttgtattgctaccggtttggcacatagttttctctttgattgcagatcaaacccttctgattgcagattgcttggctatggctgatgtgctcactgttcttctttagcttgtatattgctgatggtggcttggctacggctgaaaaagttgctgctgcgccgacttggcaactgttgctccagtaatgctttgtcctctcttcctagccgccgacttggcacttggcagctgttgctcctgtaatgcgttgttatctcttatctcttgagatgtactatgattttgaggctgtttgacttgtgccagattgccagtgctgatgctatattatctcaggtttttatgctagtatatgttttactgtgtgctgcctgtgtcgagttacgtaatctattgaaccgctatgcgtgttgatgccctgttgttgcttgccagattgatgcccctgttgcttgcagcttgcaagctgtagtgaaatcctaaaattccaaaccaaatctattctgaacttttgaagatctgtgatgtccggaagaaaagattcaaacagataaacgggactctccagaatctataaaataaatgatcgacaaacgctttgctttggtaggcttcaagcttggtcacccggtccgggcctagaaggccagcttcggccgccccgggcaactttattatacaaagttgatagataaatcagatatctggttcctaaggacccggcggaccgattaaactgattcggtccgacgcgttacctaataacttcgtatagcatacattatacgaagttattagctaactaactagtaagcttaagccatgggtcgacggatccgttaactagcgtggcatttggcaccgccgcacactatgcgagctaggagtgctagtttacagatgaaactatgaaaccaagaaaacacaattgtccgtagctagcgcgtggcgtcgtgtcaagcttcacacagtatcttcgttcttcactataaatcgcgcctgttgttcgtgagacccaccaccgtggataacagtcccctaataataagcgatcaacagcactgctgatggctgaacaccgaggcgccgccgcgcgtaaccatccgccggagcagcccgtcgtgccggcgaacgacgccttccccgaccgcgcccagcagctctgcctcgacgccgggcgcgcgctcgcgatgtgcggcgtgctcgtcgccgtccctcccgcattttacgcgtcgacgtcgcggacgacaccgcacttgccttcgtcggcttcgtcctctggatcatcggtgcgtggctgtgcctcctggcgctcacgcccttggctccacgggcggtgagggcgggcggggccgccgccagcaccttgctgatcaggtgcctgtccctttcatgaactactagcgcccgcgcccgcggccgccgggcacaagagaacacatcgatgttcgctgcgtacgtcagcaataaggcactctttgtcagtagtcgagtgcatatgttgggtgtttgccctgggagatttcaagtgttgtggccattatcccgcaggataaaaaatcggcggcttttggattgatacggaaaataacgatgtttcatgctcgtgttgtgtgtgtgacatcttgtcagccaagtttttaaccgttgctactccccctctgtgggctcagtgtgtggaccggaatacgtcgtacataggccgtagcctaagcccaatatgccgtttttcaggttggcctgtgtgacgacaagcgggtctcaaaagcccatcacgcaactggcctgcaattattggaggagagcgcgtcgagttggttccagaggctgcgtggtggggccggactctgcgacgacctctcgttcgcgtccgatttggttgccgtgagccgtgacgtaacgcctccttccgttcctccctatataagttccacccccgggtccggtttccccaagccccagtgacccccgatcccgatcgcgaaatctccgcacccgccggcaagggaccgaagcaagcctctctcccgaccgtcgcatcaaggtacgcgtccgctcgatctgtcctcttccttctcgatttgacttgctgtggtgcccgatcacgggatcagaatcgcaccagtgtagatttcgcatgttctaagatgtgttagtttccaggctaatccagttctcttgacgcccgatccgatcgagctccgtgtttatttcagcctaatcgtagtattcccctaaaatttcctcattagggggttcgcaagattgttggtcgacaggttcacttatgctcgatcgcttacttttagtcgattcatgctgcgtactattgttgccccccgtggttttatcttttctcgtgtgaaatccagtagatatagtagatatcgtagcattaggttttaattcaatcgattgattattgtatcatcaaaattgagaagttcgaatcatgcctatcatgctgcctcaaccgaaatcctgtatattgaagtttcaattcaattgattgatcattcattagattcaaccaaaatctagaaggttagatgacgcatgtcatgctgcctgcgtagtttacctttgatctgtttatgattaccttatcagtaggatatttgtgattttgggaagtagcactaactgattcatgctgacatgatgttccctttcagattatactgttgagtcctatctaattgatgctttgtatgctatatgaatacgtcatggtaaattagcagttaattagcatattagcaattgggcgtacctcatcaggattgctcttgtagatgtgtgtggtgatgtttcttgttcaattcatgttctgctttaaaagtatgtgttctctgtttgttaattaagattcatggttataatgatttggacctaattaatcagggttgcccttttagatgcgtggttacttgttgagttcatttttttcctgctatagttgtatgcgtttgttcattcatggttagatttgatttgtttcttctctattccatgccttccatatacttcaattgtagcttaacatgagatttctgtatatgcaggtcgaccgccggggatccacacgacaccatggcccagtccaagcacggcctgaccaaggagatgaccatgaagtaccgcatggagggctgcgtggacggccacaagttcgtgatcaccggcgagggcatcggctaccccttcaagggcaagcaggccatcaacctgtgcgtggtggagggcggccccttgcccttcgccgaggacatcttgtccgccgccttcatgtacggcaaccgcgtgttcaccgagtacccccaggacatcgtcgactacttcaagaactcctgccccgccggctacacctgggaccgctccttcctgttcgaggacggcgccgtgtgcatctgcaacgccgacatcaccgtgagcgtggaggagaactgcatgtaccacgagtccaagttctacggcgtgaacttccccgccgacggccccgtgatgaagaagatgaccgacaactgggagccctcctgcgagaagatcatccccgtgcccaagcagggcatcttgaagggcgacgtgagcatgtacctgctgctgaaggacggtggccgcttgcgctgccagttcgacaccgtgtacaaggccaagtccgtgccccgcaagatgcccgactggcacttcatccagcacaagctgacccgcgaggaccgcagcgacgccaagaaccagaagtggcacctgaccgagcacgccatcgcctccggctccgccttgccctccggactcagatctcgatagagtcaacctagacttgtccatcttctggattggccaacttaattaatgtatgaaataaaaggatgcacacatagtgacatgctaatcactataatgtgggcatcaaagttgtgtgttatgtgtaattactagttatctgaataaaagagaaagagatcatccatatttcttatcctaaatgaatgtcacgtgtctttataattctttgatgaaccagatgcatttcattaaccaaatccatatacatataaatattaatcatatataattaatatcaattgggttagcaaaacaaatctagtctaggtgtgttttgcgaattgcggcgcccttactttaacgcctctaaccaacacccctttatctttataaggaacaataaacagaatttgccccactgttctaaatcacctaataatatccccagctaaaaacaataaaggtttcctagaattaagacaagcatgactgttcctccaggagggtttggaacattgttgcagtcttgcagatacgggcgaagggtgagaaacagagcggagggctggaggtgacctcggtagtcgacgccggagttgagcttgacaacgacggggcggcccctgatggacttgaggaagtccgatggcgtcttcaccgtcccgccggcgcccgaggcgggcctgtcgctgccgccgccgccgctgctcatcttgcgcgctgtgcccccggcggtgtccctgtgttgcggatcgcgggtgggccaggtggatgcgagggcgacccgtttggactccggccggagccgccggatccctggtcggtgtcagtgccgtttactctgggccccacgtgtcagtaccgtctgtagatgacaacaacccgtcgtccacagtcatgtccaaaatatcctttcttcttttttttcgattcggatatctatcttccttttttttttccaaaaatcttcttgacgcaccagcgcgcacgtttgtggtaaacgccgacacgtcggtcccacgtcgatagaccccacccaccagtgagtagcgtgtacgtattcgggggtgacggacgtgtcgccgtcgtcttgctagtcccattcccatctgagccacacatctctgaacaaaaaaaaggagggaggcctccacgcacatccccctccgtgccacccgccccaaaccctcgcgccgcctccgagacagccgccgcaaccatggccaccgccgccgccgcgtctaccgcgctcactggcgccactaccgctgcgcccaaggcgaggcgccgggcgcacctcctggccacccgccgcgccctcgccgcgcccatcaggtgctcagcggcgtcacccgccatgccgatggctcccccggccaccccgctccggccgtggggccccaccgagccccgcaagggtgctgacatcctcgtcgagtccctcgagcgctgcggcgtccgcgacgtcttcgcctaccccggcggcgcgtccatggagatccaccaggcactcacccgctcccccgtcatcgccaaccacctcttccgccacgagcaaggggaggcctttgccgcctccggctacgcgcgctcctcgggccgcgtcggcgtctgcatcgccacctccggccccggcgccaccaacctagtctccgcgctcgccgacgcgctgctcgattccgtccccatggtcgccatcacgggacaggtggcgcgacgcatgattggcaccgacgccttccaggagacgcccatcgtcgaggtcacccgctccatcaccaagcacaactacctggtcctcgacgtcgacgacatcccccgcgtcgtgcaggaggctttcttcctcgcctcctctggtcgaccagggccggtgcttgtcgacatccccaaggacatccagcagcagatggcggtgcctgtctgggacaagcccatgagtctgcctgggtacattgcgcgccttcccaagccccctgcgactgagttgcttgagcaggtgctgcgtcttgttggtgaatcgcggcgccctgttctttatgtgggcggtggctgcgcagcatctggtgaggagttgcgacgctttgtggagctgactggaatcccggtcacaactactcttatgggcctcggcaacttccccagcgacgacccactgtctctgcgcatgctaggtatgcatgggacggtgtatgcaaattatgcagtggataaggccgatctgttgcttgcacttggtgtgcggtttgatgatcgcgtgacagggaagattgaggcttttgcaagcagggctaagattgtgcacgttgatattgatccggctgagattggcaagaacaagcagccacatgtgtccatctgtgcagatgttaagcttgctttgcagggcatgaatgctcttcttgaaggaagcacatcaaagaagagctttgactttggctcatggaacgatgagttggatcagcagaagagggaattcccccttgggtataaaacatctaatgaggagatccagccacaatatgctattcaggttcttgatgagctgacgaaaggcgaggccatcatcggcacaggtgttgggcagcaccagatgtgggcggcacagtactacacttacaagcggccaaggcagtggttgtcttcagctggtcttggggctatgggatttggtttgccggctgctgctggtgcttctgtggcaaacccaggtgtcactgttgttgacatcgatggagatggtagctttctcatgaacgttcaggagctagctatgatccgaattgagaacctcccagtgaaggtctttgtgctaaacaaccagcacctggggatggtggtgcagttggaggacaggttctataaggccaacagagcgcacacatacttgggaaacccagagaatgaaagtgagatatatccagatttcgtgacgatcgccaaagggttcaacattccagcggtccgtgtgacaaagaagaacgaagtccgcgcagcgataaagaagatgctcgagactccagggccgtacctcttggatataatcgtcccacaccaggagcatgtgttgcctatgatccctagtggtggggctttcaaggatatgatcctggatggtgatggcaggactgtgtactgactagctagtcagttaacagatctgccagatcctcggtgtacaaataacccgtcttatcctatgagacgggccggcgtcagtgtgttctggaggaatttttatgtcagagcctttttctttgtgtgcttgatgtagatgccaagggaagcttattggctgttgaagcttgatgcaaaataaattatggaactctgttttttgtttatctaataataactagcaaatatgcttccattgcattgaaactaacagccttttgtgtttccaagttttattttgtgacaatgtcatctatttcaattagttgtggaatcggaaacttgcaggactaacttggaaactccaatccctcagcatcctggactttttcctggtgtaatccatgtagatattattttaatcatcattttagttctggaggtttttccatctccggttttgctcccctttcttcaaaaaaaaaaaaaaaatgccgtaggcgccgcaacgcccacctgttgttcaaactcatgggcacgagtggctcgaagattttatacaacaattgctgtagtttcaccgttgctggtgaagaagcatttttttaaaaaaatatagtggtattcattttaattagtttagttgtgcagcgagcaaaatttggacatgctctgctcggaatctgatcgacctagacacagattagcagcagtagctttgtcatctgttccaagagttgcgatctgatagaagaaaaaaaaaccttcccttcaatgtaaaaccgaaactaacaagaaagaagcacagtgccgtttaggcaagtatggagtacgtattaagcatgtagaaggccatgcatgaaccactaacaagaaagaagcgcagtgccattcaggcaagcataagcatgtagattggcatgcatgaacaactaacagtagatcgtctctggtctgattagaagttttttgggaagccaagaaatcatgtacaactggttccatctcaaattccgtggcaaaaagaggcctaagcaacatacctcgagtagatcacattcaagcttggtcacccggtccgtcaatattctgattccgatgacttcgtaggttcctagctcaagccgctcgtgtccaagcgtcacttacgattagctaatgattacggcatctaggaccgactagtggcgcgccgactagctagctaaggtaccgagctcgaattcattccgattaatcgtggcctcttgctcttcaggatgaagagctatgtttaaacgtgcaagcgctactagacaattcagtacattaaaaacgtccgcaatgtgttattaagttgtctaagcgtcaatttgtttacaccacaatatatcctgccaccagccagccaacagctccccgaccggcagctcggcacaaaatcaccactcgatacaggcagcccatcagtccgggacggcgtcagcgggagagccgttgtaaggcggcagactttgctcatgttaccgatgctattcggaagaacggcaactaagctgccgggtttgaaacacggatgatctcgcggagggtagcatgttgattgtaacgatgacagagcgttgctgcctgtgatcaaatatcatctccctcgcagagatccgaattatcagccttcttattcatttctcgcttaaccgtgacaggctgtcgatcttgagaactatgccgacataataggaaatcgctggataaagccgctgaggaagctgagtggcgctatttctttagaagtgaacgttgacgatcgtcgggcccaggtagaatccgcctgagtcgcaagggtgacttcgcctatattggacgacggcgcgcagagggcgacctctttttgggttacgattgtaggattatcactaaaacaatacatgaacatattcaaatggcaatctctctaaggcattggaaataaatacaaataacagttgggtggagtttttcgacctgtgggcgttaaccttctgttaacctaaaagctcttgcccaaacagcagaatcggcgctaattgccagcggcggaacttttccagtttcgcgaaaaatatcgccactggcaaggaatgggtttgagatggcgaagtctgtcctaaaagcagcgcctgtagttgtagggttgacggccttgatggagcgtcatgccgatgccctctcgagccaacttcaagcacatcatcttaaggttttcccgccgcattccgagaagggcattcgaacattcgggccatcggaggcgtccaagctgctcggcgttggcgagtcatatttacggcagaccgcgtctgagatgccagagttgaatgttagcatgagcccgggtggcaggcgaatgttctcaattgaagatatccatgcgattcggaagtatatggatcaggtcggccgcgggaaccggcgctacctgccacatcgtcgaggcggcgagcagcttcaggttatctctgtgatgaatttcaaaggtgggtcgggtaagaccaccaccgccgcgcatctggcgcagtacctcgctatgcgcggatatcgagtcttggccattgatctcgatcctcaagcgagcctttctgcactctttgggagccaaccggagacggacgttggcccgaacgaaacgctctacggcgctataaggtatgatgatgagcaggtggcaatcgaacgagtcgtccgagggacttacattcccgacctccacctgattcctggtaatcttgagctgatggagtttgaacacgatacgccacgcgcgctgatgaaccgcaaagagggcgacacgctcttttatggtcgcatcagccaagtaattgaagatatcgcggataactatgacgtcgtggtcatcgactgccctccccagcttgggtatctcacgctatccgcattgactgcggcgacgtccattcttgtcacggtccatccgcagatgctggatgtgatgtcgatgaaccagtttctggcaatgacatcgaaccttttgcgtgaaatcgagaatgctggcgccaagttcaagtttaattggatgcgctatctgataacccgtttcgaaccgagcgacggaccacagaaccaaatggtaggttatctgcggtcgatttttggcgaaaatgtcctcaattttccgatgcttaaaaccaccgcggtttcggacgctggcctgacaaaccagactctattcgaagtggagcgtggcctgttcacgcgctcgacctatgatcgagccttggaggcgatgaacgccgtcaacgacgagatcgaaacactgatcaaaaaagcatggggtaggcccacatgagccggaagcacatccttggcgtctcaactgacgcccctgagacgtcgcccgccgacaataggacggcaaagaaccgctccatgccgctcctcggcgtaacaaggaaggagcgcgatccggcaacgaagctcacagcgaacattggtaacgcactgcgagagcaaaacgatcgtcttagccgtgccgaagagatcgagcggcgtctcgctgaaggtcaggcagtgatagagttggatgcctcgtcaatagaaccgtctttcgtgcaggatcgtatgcgaggggacattgacgggctccttacttcgatccgggaacaaggacagcaagtcccaatccttgtgcgaccgcatccgagccagccgggccgatatcaggttgccttcggccaccgccggctacgcgccgtttcagaactcggacttccggtcagagcggtcgttcgcgaactgacggacgagcaagtggtcgtagcacagggtcaggaaaacaatgagcgcgaagatcttaccttcatcgaaaaggcgcgcttcgcacatcgcctgaacaggcagttttctcgagagattgtcatcgccgcgatgtcgatcgacaagagcaatttgtccaagatgcttctgctcgttgacgccctcccctctgaactgaccgatgctattggtgccgctcctggtgttggacggccgagttggcaacaacttgccgagctgattgag

SEQ ID NO: 54 - DNA, 25687 bp, synthetic construct
  misc_feature 1..25687: note = PHP95882
  source 1..25687: mol_type = other DNA
gtttacccgccaatatatcctgtcaaacactgatagtttaaactgaaggcgggaaacgacaatctgatcatgagcggagaattaagggagtcacgttatgacccccgccgatgacgcgggacaagccgttttacgtttggaactgacagaaccgcaacgttgaaggagccactcagcaagctggtacgattgtaatacgactcactatagggcgaattgagcgctgtttaaacgctcttcaactggaagagcggttacgctgtttaaacgctcttcaactggaagagcggttactaccggttcactagctagctgctaatcgagctagttaccctatgaggtgacatgaagcgctcacggttactatgacggttagcttcacgactgttggtggcagtagcgtacgacttagctatagttccggacttacccttaagcgatttaaatctgcggttaccgaattcgagctcggtacctagtacccttgtacttttggtttcacctgcatagagaaaacccacaagaatatgacagtctgatttgtcagtctcattctcaagcaacatttctctatccgttactttcatggtgaataacacaatccatcatcaatactttgtgttactcagaaactgaaagttattccgagtcttgcatatctttggacctactcgtttttctaccattattgctgattgttaagctctcgctacttgaatcggcattgttggagtgggaaggttcaaaaaattggagttatgactagttgtctctttctatgtacgatggagaaaatgaataaacaactgagaaaatggctcttgtttagttgatgatgctcttaagctttccactggttgccatatatgatttgggcatttcactttgatcttaatgggccttgtaaagcccaagactcatgattatctttagttgatgctcttaattaggtgtgggcaaataattcaaactgtatgtacccgaccaaaaccaaagcaaaaataatcgaaccaaaccgaaaatttaaaaataaccgaatgaaaactaaatcctataactgaaagaactgaaaccgaatcaaaatatttaatgtaaccaaaaatatccgaaatataattatattgtcaaaaatattaataatttctagattaaataattaaaaatacttaaaaatttatataaaatagtaaaaatactcgaaaataaccacaaatattcaaaaacaaccgaaatatcccaaaatattcaaagcaaaataaccgaatggataccaaattttaaaaccgaaaaaactggaacaaaaccaaaatcgaaccaaaatttcaaaaatcgaataaatactaaactttagaacaaaaaaaaacgataaccgaatgtatacgaaccaaagccgaattagataaccgaacgtccaggactactcttaatctttccgccacttatgatttgggctattactttgtttataatgagccttttcaagctcaagttcatgattgtccgtgagatgagaaactgacttgttggattcgaaaccctagctagtattggttaatacttaatacataaatgacctgcattgacatcatcatccaagaaaataaaaattgtatgcttgagatatttagttttcctagctaggttttctttattttagtaccgaatctttaggtgtgccacgttaatttagacccattttttcatacttaccaactgagtctagtttaatcatgactataatcgtataaaatgattcagtcgacgtcattgcgaacgtatataaaatcatccaaattgacgtcattccaaagaggtaagcatgcttatctaagagtccgagcatactaaacaagacgacattttatttgcactccaaatcaaattttgtattgcctaaagaaaaacaatcaaactcaagtttcttaaaattaatttcattcaaactaatcactttcaatatctcacatattattcatgccatttctatttgtctaaacatgatttaaaaaaaaaagtaaaatacaaagattactatgcaaaaactctataaaaaaaaattcaaatttcttatttatttgtgacatcaaattttcaaaataatttttttaattatcggttgatccggtcagtcgataaaaacataaactttcagcgaccgttaaaactttcctactaccgatttagagaaaatcttagcttgaaacgtaattgtaacctgccttcatgcaagtcgcaagatatgtcatcctaagttgtatatgttttctcaaaagatgtatttacttgagaaaatacgtttcaacgttgatggacaaccaattaagaatcaagcacctttcgtaatcaatttaggcttatcgtctaaggtatactgatttacgacagttgactagacttataaggaacaaaataatagaatagtttctaaacacttcacctaatcatagagactaagatggtaattcgtaaacgacaaagcctagtgacactgtccattgtaaaattccacatcatattagtattaaacatatacatgtagtttcctgaacacatgtagtatcaaacacacttcgtggcttcttcctcgaaacctgcggccgcgctatagttccggacttacccttaagataacttcgtatagcatacattatacgaagttatgggcccacgcgtgaagagcggttaccagagctggtcacctttgtccaccaagatggaactgtcttcggccagaatggccatctggattcagcaggcctagaaggccatttatcgctatcaactttgtatagaaaagttgggccgagctcggtacggccagaatggcccggaccgggttaccaagcggccgcacactgatagtttaaactgaaggcgggaaacgacaatctgatcatgagcggagaattaagggagtcacgttatgacccccgccgatgacgcgggacaagccgttttacgtttggaactgacagaaccgcaacgattgaaggagccactcagccgcgggtttctggagtttaatgagctaagcacatacgtcagaaaccattattgcgcgttcaaaagtcgcctaaggtcactatcagctagcaaatatttcttgtcaaaaatgctccactgacgttccataaattcccctcggtatccaattagagtctcatattcactcccatggcggccaatgcgggcggcggtggagcgggaggaggcagcggcagcggcagcgtggctgcgccggcggtgtgccgccccagcggctcgcggtggacgccgacgccggagcagatcaggatgctgaaggagctctactacggctgcggcatccggtcgcccagctcggagcagatccagcgcatcaccgccatgctgcggcagcacggcaagatcgagggcaagaacgtcttctactggttccagaaccacaaggcccgcgagcgccagaagcgccgcctcaccagcctcgacgtcaacgtgcccgccgccggcgcggccgacgccaccaccagccaactcggcgtcctctcgctgtcgtcgccgccgccttcaggcgcggcgcctccctcgcccaccctcggcttctacgccgccggcaatggcggcggatcggctgtgctgctggacacgagttccgactggggcagcagcggcgctgctatggccaccgagacatgcttcctgcaggactacatgggcgtgacggacacgggcagctcgtcgcagtggccacgcttctcgtcgtcggacacgataatggcggcggccgcggcgcgggcggcgacgacgcgggcgcccgagacgctccctctcttcccgacctgcggcgacgacggcggcagcggtagcagcagctacttgccgttctggggtgccgcgtccacaactgccggcgccacttcttccgttgcgatccaacagcaacaccagctgcaggagcagtacagcttttacagcaacagcaacagcacccagctggccggcaccggcaaccaagacgtatcggcaacagcagcagcagccgccgccctggagctgagcctcagctcatggtgctccccttaccctgctgcagggagtatgtgagagcaacgcgagctgccactgctcttcactgatgtctctggaatggaaggaggaggaagtgagaacagatcattcgacaaagcagcattagtccgttgatcggtggaagaccactcgtcagtgttgagttgaatgtttgatcaataaaatacggcaatgctgtaagggttgttttttatgccattgataatacactgtactgttcagttgttgaactctatttcttagccatgccaagtgcttttcttattttgaataacattacagcaaaaagttgaaagacaaaaaaaaaaacccccgaacagagtgctttgggtcccaagcttctttagactgtgttcggcgttccccctaaatttctccccctatatctcactcacttgtcacatcagcgttctctttccccctatatctccacgctctacagcagttccacctatatcaaacctctataccccaccacaacaatattatatactttcatcttcaactaactcatgtaccttccaatttttttctactaataattatttacgtgcacagaaacttagcaaggagagagagagcgggaatttaaatgctcggcgttaggcttttagtccgctaggtggctagaccgaggttaggacgctagttcactaggggcctagtggtgttttaagacgtcacggtcaccacgcgtggaccgaagcttgcatgcctgcagtgcagcgtgacccggtcgtgcccctctctagagataatgagcattgcatgtctaagttataaaaaattaccacatattttttttgtcacacttgtttgaagtgcagtttatctatctttatacatatatttaaactttactctacgaataatataatctatagtactacaataatatcagtgttttagagaatcatataaatgaacagttagacatggtctaaaggacaattgagtattttgacaacaggactctacagttttatctttttagtgtgcatgtgttctcctttttttttgcaaatagcttcacctatataatacttcatccattttattagtacatccatttagggtttagggttaatggtttttatagactaatttttttagtacatctattttattctattttagcctctaaattaagaaaactaaaactctattttagtttttttatttaataatttagatataaaatagaataaaataaagtgactaaaaattaaacaaataccctttaagaaattaaaaaaactaaggaaacatttttcttgtttcgagtagataatgccagcctgttaaacgccgtcgacgagtctaacggacaccaaccagcgaaccagcagcgtcgcgtcgggccaagcgaagcagacggcacggcatctctgtcgctgcctctggacccctctcgagagttccgctccaccgttggacttgctccgctgtcggcatccagaaattgcgtggcggagcggcagacgtgagccggcacggcaggcggcctcctcctcctctcacggcaccggcagctacgggggattcctttcccaccgctccttcgctttcccttcctcgcccgccgtaataaatagacaccccctccacaccctctttccccaacctcgtgttgttcggagcgcacacacacacaaccagatctcccccaaatccacccgtcggcacctccgcttcaaggtacgccgctcgtcctcccccccccccctctctaccttctctagatcggcgttccggtccatgcatggttagggcccggtagttctacttctgttcatgtttgtgttagatccgtgtttgtgttagatccgtgctgctagcgttcgtacacggatgcgacctgtacgtcagacacgttctgattgctaacttgccagtgtttctctttggggaatcctgggatggctctagccgttccgcagacgggatcgatttcatgattttttttgtttcgttgcatagggtttggtttgcccttttcctttatttcaatatatgccgtgcacttgtttgtcgggtcatcttttcatgcttttttttgtcttggttgtgatgatgtggtctggttgggcggtcgttctagatcggagtagaattctgtttcaaactacctggtggatttattaattttggatctgtatgtgtgtgccatacatattcatagttacgaattgaagatgatggatggaaatatcgatctaggataggtatacatgttgatgcgggttttactgatgcatatacagagatgctttttgttcgcttggttgtgatgatgtggtgtggttgggcggtcgttcattcgttctagatcggagtagaatactgtttcaaactacctggtgtatttattaattttggaactgtatgtgtgtgtcatacatcttcatagttacgagtttaagatggatggaaatatcgatctaggataggtatacatgttgatgtgggttttactgatgcatatacatgatggcatatgcagcatctattcatatgctctaaccttgagtacctatctattataataaacaagtatgttttataattattttgatcttgatatacttggatgatggcatatgcagcagctatatgtggatttttttagcactgccttcatacgctatttatttgcttggtactgtttcttttgtcgatgctcaccctgttgtttggtgttacttctgcaggtcgactttaacttagcctaggatccatggccactgtgaacaactggctcgctttctccctctccccgcaggagctgccgccctcccagacgacggactccacactcatctcggccgccaccgccgaccatgtctccggcgatgtctgcttcaacatcccccaagattggagcatgaggggatcagagctttcggcgctcgtcgcggagccgaagctggaggacttcctcggcggcatctccttctccgagcagcatcacaaggccaactgcaacatgatacccagcactagcagcacagtttgctacgcgagctcaggtgctagcaccggctaccatcaccagctgtaccaccagcccaccagctcagcgctccacttcgcggactccgtaatggtggcttcctcggccggtgtccacgacggcggtgccatgctcagcgcggccgccgctaacggtgtcgctggcgctgccagtgccaacggcggcggcatcgggctgtccatgattaagaactggctgcggagccaaccggcgcccatgcagccgagggtggcggcggctgagggcgcgcaggggctctctttgtccatgaacatggcggggacgacccaaggcgctgctggcatgccacttctcgctggagagcgcgcacgggcgcccgagagtgtatcgacgtcagcacagggtggagccgtcgtcgtcacggcgccgaaggaggatagcggtggcagcggtgttgccggcgctctagtagccgtgagcacggacacgggtggcagcggcggcgcgtcggctgacaacacggcaaggaagacggtggacacgttcgggcagcgcacgtcgatttaccgtggcgtgacaaggcatagatggactgggagatatgaggcacatctttgggataacagttgcagaagggaagggcaaactcgtaagggtcgtcaagtctatttaggtggctatgataaagaggagaaagctgctagggcttatgatcttgctgctctgaagtactggggtgccacaacaacaacaaattttccagtgagtaactacgaaaaggagctcgaggacatgaagcacatgacaaggcaggagtttgtagcgtctctgagaaggaagagcagtggtttctccagaggtgcatccatttacaggggagtgactaggcatcaccaacatggaagatggcaagcacggattggacgagttgcagggaacaaggatctttacttgggcaccttcagcacccaggaggaggcagcggaggcgtacgacatcgcggcgatcaagttccgcggcctcaacgccgtcaccaacttcgacatgagccgctacgacgtgaagagcatcctggacagcagcgccctccccatcggcagcgccgccaagcgcctcaaggaggccgaggccgcagcgtccgcgcagcaccaccacgccggcgtggtgagctacgacgtcggccgcatcgcctcgcagctcggcgacggcggagccctggcggcggcgtacggcgcgcactaccacggcgccgcctggccgaccatcgcgttccagccgggcgccgccagcacaggcctgtaccacccgtacgcgcagcagccaatgcgcggcggcgggtggtgcaagcaggagcaggaccacgcggtgatcgcggccgcgcacagcctgcaggacctccaccacctgaacctgggcgcggccggcgcgcacgactttttctcggcagggcagcaggccgccgccgctgcgatgcacggcctgggtagcatcgacagtgcgtcgctcgagcacagcaccggctccaactccgtcgtctacaacggcggggtcggcgacagcaacggcgccagcgccgtcggcggcagtggcggtggctacatgatgccgatgagcgctgccggagcaaccactacatcggcaatggtgagccacgagcaggtgcatgcacgggcctacgacgaagccaagcaggctgctcagatggggtacgagagctacctggtgaacgcggagaacaatggtggcggaaggatgtctgcatgggggactgtcgtgtctgcagccgcggcggcagcagcaagcagcaacgacaacatggccgccgacgtcgggcatggcggcgcgcagctcttcagtgtctggaacgacacttaagcgtacctagtggtacctgacatcttatagtctgcaacctctcgtgtctgaattcctatctttatcaagtgttattgcttccacgactataggacagctttcgtcgaaagcttttgctcatgtgatctcgaaggattcatctagtctgatttttcgtgacttgtatcggttttattggattcatccaacatatatcaataaaaaatgagttgtgtttcctttcttcctagttcagttaaaattatttccctcctgcgcttgtgctgtaattgtctgtgtacctgttgtttgtgactgtgttagttcccttggatatgatttcgtatttgatatgtacatggagatagcttagcttcattattggagtatgaagttagtatgacatagtcactctcctggaaaattgacactgcaaaccatatttttattctgaaccacaaatcctagtcagtccgctggcatatgccgtccgtttgctgaatccagaacgtgggtttggagatgtacggctgagatgcctctatgcgaaggggatttcgtggtgaaacgagatgggagtagagcaacgcccgtggaagatgcttcaaacttccacacttttgagcaacgatcggcagtagtaaggtagacgatttcaagatcaaagcatatgaagataaacaacatcaacaacaaaatttgttggggttctatagagagaaacagagctacatacatacactgttttgtatctaccatctgagatgatgaaaagatgaaaaactaaagaatgccccggcgccaacgccaggacacgccgcgcgcgcgtcacccgagccatctcttgacccagccggcgctgtatatttacacacgttgcagcatcgatcaccacctgttcgatcgcgtcgccgtcaccggcgcgccgcgacttattgaactagtctagggcgcggctaacaacctagcttagattgccttgtctaaacccttaggctaacgcgccacggtaacccggtccgggcctagaaggccccagagctggtcaccccatacgattggaagcttcaagtttgtacaaaaaagcaggctccggccagagttacccggaccgaagcttgcatgcctgcagtgcagcgtgacccggtcgtgcccctctctagagataatgagcattgcatgtctaagttataaaaaattaccacatattttttttgtcacacttgtttgaagtgcagtttatctatctttatacatatatttaaactttactctacgaataatataatctatagtactacaataatatcagtgttttagagaatcatataaatgaacagttagacatggtctaaaggacaattgagtattttgacaacaggactctacagttttatctttttagtgtgcatgtgttctcctttttttttgcaaatagcttcacctatataatacttcatccattttattagtacatccatttagggtttagggttaatggtttttatagactaatttttttagtacatctattttattctattttagcctctaaattaagaaaactaaaactctattttagtttttttatttaataatttagatataaaatagaataaaataaagtgactaaaaattaaacaaataccctttaagaaattaaaaaaactaaggaaacatttttcttgtttcgagtagataatgccagcctgttaaacgccgtcgacgagtctaacggacaccaaccagcgaaccagcagcgtcgcgtcgggccaagcgaagcagacggcacggcatctctgtcgctgcctctggacccctctcgagagttccgctccaccgttggacttgctccgctgtcggcatccagaaattgcgtggcggagcggcagacgtgagccggcacggcaggcggcctcctcctcctctcacggcaccggcagctacgggggattcctttcccaccgctccttcgctttcccttcctcgcccgccgtaataaatagacaccccctccacaccctctttccccaacctcgtgttgttcggagcgcacacacacacaaccagatctcccccaaatccacccgtcggcacctccgcttcaaggtacgccgctcgtcctcccccccccccctctctaccttctctagatcggcgttccggtccatgcatggttagggcccggtagttctacttctgttcatgtttgtgttagatccgtgtttgtgttagatccgtgctgctagcgttcgtacacggatgcgacctgtacgtcagacacgttctgattgctaacttgccagtgtttctctttggggaatcctgggatggctctagccgttccgcagacgggatcgatttcatgattttttttgtttcgttgcatagggtttggtttgcccttttcctttatttcaatatatgccgtgcacttgtttgtcgggtcatcttttcatgcttttttttgtcttggttgtgatgatgtggtctggttgggcggtcgttctagatcggagtagaattctgtttcaaactacctggtggatttattaattttggatctgtatgtgtgtgccatacatattcatagttacgaattgaagatgatggatggaaatatcgatctaggataggtatacatgttgatgcgggttttactgatgcatatacagagatgctttttgttcgcttggttgtgatgatgtggtgtggttgggcggtcgttcattcgttctagatcggagtagaatactgtttcaaactacctggtgtatttattaattttggaactgtatgtgtgtgtcatacatcttcatagttacgagtttaagatggatggaaatatcgatctaggataggtatacatgttgatgtgggttttactgatgcatatacatgatggcatatgcagcatctattcatatgctctaaccttgagtacctatctattataataaacaagtatgttttataattattttgatcttgatatacttggatgatggcatatgcagcagctatatgtggatttttttagccctgccttcatacgctatttatttgcttggtactgtttcttttgtcgatgctcaccctgttgtttggtgttacttctgcaggtcgactttaacttagcctaggatccatggactccagcagcttcctccctgccgccggcgcggagaatggctcggcggcgggcggcgccaacaatggcggcgctgctcagcagcatgcggcgccggcgatccgcgagcaggaccggctgatgccgatcgcgaacgtgatccgcatcatgcggcgcgtgctgccggcgcacgccaagattagcgacgacgccaaggagacgatccaggagtgcgtgtcggagtacatcagcttcatcacgggggaggccaacgagcggtgccagcgggagcagcgcaagaccatcaccgccgaggacgtgctgtgggccatgagccgcctcggcttcgacgactacgtcgagccgctcggcgcctacctccaccgctaccgcgagttcgagggcgacgcgcgcggcgtcgggctcgtccctggggccgccccatcgcgcggcggcgaccaccacccgcactccatgtcgccagcggcgatgctcaagtcccgcgggccagtctccggagccgccatgctaccgcaccaccaccaccaccacgacatgcagatgcacgccgccatgtacgggggaacggccgtgcccccgccggccgggcctcctcaccacggcgggttcctcatgccacacccacagggtagtagccactacctgccttacgcgtacgagcccacgtacggcggtgagcacgcgatggctgcatactatggaggcgccgcgtacgcgcccggcaacggcgggagcggcgacggcagtggcagtggcggcggtggcgggagcgcgtcgcacacaccgcagggcagcggcggcttggagcacccgcacccgttcgcgtacaagtagggtaccgttaacagatctactaactatctatactgtaataatgttgtatagccgccggatagctagctagtttagtcattcagcggcgatgggtaataataaagtgtcatccatccatcaccatgcgtggcaacgtgagcaatgacctgattgaacaaattgaaatgaaaagaagaaatatgttatatgtcaacgagatttcctcataatgccactgacgacgtgtgtccaagaaatgtatcagtgatacgtatattcacaatttttttatgacttatactcacaatttgtttttttactacttatactcacaatttgttgtgcgtaccataacaatttcgatcgaatatatatcagaaagttgacgaaagtaagctcactcaaaaagttaaatgggctgcggaagctgcgtcaggcccaagttttggctattctatccggtatccacgattttgatggctgagggacatatgttcgcttaagcttcggtccgggcctagaaggccgatctcccgggcacccagctttcttgtacaaagtggccgttaacggatcggccagaatggcccggaccgggttaccgaattcgagctcggtaccctggttcacaaactcaatacaacacacagtggagtagggtattacgctccggcggcccgaaccactctaaatccttgtgtcctcgtgtgctcttccaccattaatgactgtaattgcagggacacgaagagttgtagcgcttttgccaacaagatccgctatatgctagtagagtggaacctgcacagcaacaagcatccaataatctgagaataagaattatgtgtggtgatggttctcatctctgcaactcgccattttcgcgagagaaccaaatccaagttggtgaagatcatgatttgggctcatgggctggcatagtagctattacctttgcaattgtggttcgaatctatccgatattctccttttcagggagagctaatgcttatgcttattgggtattttggtttgacactgcttcacgcccaaaaaaaggcaactatgtctgagttggatatggcccaaaaaaaggcagctatgtctgagttggatatggaagtcttctttcgtttagggtgaagtaagaccaagctcatgagcttattatcttaggtcggaacaaattagttgataggcatggcacatttatcaaattataatgattttaacagaaaagcaacacctctttttcagcagcaccagctttgcaagctgcaattgacactccaagcatagtatttgctccaaactcagcctgcatttcgcacaatatcatatctatttccatttggataaaatatattttccagaaatatgggaacagaatcaagatacagaaaaaagttgtggtagtagtggtaagtggaaacacaagtacagtgaaaagatagcattatttctgaacagtcaaattaaccgaaataagtagtatcacatactgcccctaaattgactacacccaatgtaaagaattgcttgagcatattgagccatcagttgtttgtttgtgtaacggatttgacaatgcagagttcaggagcaaaaaaccgcaaaggagagaaagagggaaaggatctcctagtatcccaccttgtggcgcgccctgtcaagtgcatgatggcctggtcgatctgcgtctgctgctgcggttccatcccaacgagtgcctccgacaccttgtcgttgatcacccgcaccgcgtaggcgacccccctggcgaggaacttccgcctctcggaggccccggccgcgtcggcggcggcgccctcgagcgcgcccacgctagccgtagatgctcggtgcacggccttgttggtgtgcaactcgacctcaacggccggtgcgctacgcccgtcaaggatctggcgcgcccgcaccctcgtgatcacggtgggcgcctcccgcctcatgtggccgacgatgaaaagcgccgggttaggggccttggcgcgcaccgccgtattcagggcctcctcgctcttgcgcgagagcaggtgcttccccaggtactcctgcactgacaaggctgccacagcggtggaatttgtcctcacgacttcgccacgtcgtcctcacctccctggcttcccacgactccgccgtatcgaggtgctcggtgggtcgtcttaatccgaagtccgaactaggaagacgagacagagaggtctgaggaatgggcctcgtttgatgttgagctgaattatttttccagcataagcccaggtcttggtccatgaacaaaattactagaaacccagcccagtactacgatctaaaagagggactgccactggatagctctctctagcattctccacgctccaatacagcggcgtcgtgtctatccgggtctatccgcgaacacgtgagaactctccagaaactgctttctcctccacttcatctctctcgctttccctctataaaaagaccccttctaggaattgagggagacagcaagcaccaagcagcgatccgaagctcaatcaattcactcaaacctcttccccaaatcttcgattagatcttcgttgacaagaagactagaaccgaacctgacatgtccaacctgctcacggttcaccagaaccttccggctcttccagtggacgcgacgtccgatgaagtcaggaagaacctcatggacatgttccgcgacaggcaagcgttcagcgagcacacctggaagatgctgctctccgtctgccgctcctgggctgcatggtgcaagctgaacaacaggaagtggttccccgctgagcccgaggacgtgagggattaccttctgtacctgcaagcgcgaggtttgtttctgcttctacctttgatatatatataataattatcattaattagtagtaatataatatttcaaatatttttttcaaaataaaagaatgtagtatatagcaattgcttttctgtagtttataagtgtgtatattttaatttataacttttctaatatatgaccaaaacatggtgatgcctaggtctggcagtgaagaccatccagcaacaccttggacaactgaacatgcttcacaggcgctccggcctcccgcgccccagcgactcgaacgccgtgagcctcgtcatgcgccgcatcaggaaggaaaacgtcgatgccggcgaaagggcaaagcaggccctcgcgttcgagaggaccgatttcgaccaggtccgcagcctgatggagaacagcgacaggtgccaggacattaggaacctggcgttcctcggaattgcatacaacacgctcctcaggatcgcggaaattgcccgcattcgcgtgaaggacattagccgcaccgacggcggcaggatgcttatccacattggcaggaccaagacgctcgtttccaccgcaggcgtcgaaaaggccctcagcctcggagtgaccaagctcgtcgaacgctggatctccgtgtccggcgtcgcggacgacccaaacaactacctcttctgccgcgtccgcaagaacggggtggctgcccctagcgccaccagccaactcagcacgagggccttggaaggtattttcgaggccacccaccgcctgatctacggcgcgaaggatgacagcggtcaacgctacctcgcatggtccgggcactccgcccgcgttggagctgctagggacatggcccgcgccggtgtttccatccccgaaatcatgcaggcgggtggatggacgaacgtgaacattgtcatgaactacattcgcaaccttgacagcgagacgggcgcaatggttcgcctcctggaagatggtgactgaggtacccaacctagacttgtccatcttctggattggccaacttaattaatgtatgaaataaaaggatgcacacatagtgacatgctaatcactataatgtgggcatcaaagttgtgtgttatgtgtaattactagttatctgaataaaagagaaagagatcatccatatttcttatcctaaatgaatgtcacgtgtctttataattctttgatgaaccagatgcatttcattaaccaaatccatatacatataaatattaatcatatataattaatatcaattgggttagcaaaacaaatctagtctaggtgtgttttgcgatccgatatcgaattggccacggtaccagctgctgctgttctagggttcacaagtctgcctatttgtcttccccaatggagctatggttgtctggtctggtccttggtcgtgtcccgtttcattgtgtactatttacctgtaatgtgtatccttaagtctggtttgatggtgtctgaaacgttttgctgtggtagagcagcatggaagaactataatgaataagtgatccctaatcattgtgtccaaattttgcttctgctatacccttttgtgctgtttcttatgttttgcttaaaaatttgatctgacaaacaaatttgtctaaattatgctcttgttctgactgtgtactgtacacatttgtattgctaccggtttggcacatagttttctctttgattgcagatcaaacccttctgattgcagattgcttggctatggctgatgtgctcactgttcttctttagcttgtatattgctgatggtggcttggctacggctgaaaaagttgctgctgcgccgacttggcaactgttgctccagtaatgctttgtcctctcttcctagccgccgacttggcacttggcagctgttgctcctgtaatgcgttgttatctcttatctcttgagatgtactatgattttgaggctgtttgacttgtgccagattgccagtgctgatgctatattatctcaggtttttatgctagtatatgttttactgtgtgctgcctgtgtcgagttacgtaatctattgaaccgctatgcgtgttgatgccctgttgttgcttgccagattgatgcccctgttgcttgcagcttgcaagctgtagtgaaatcctaaaattccaaaccaaatctattctgaacttttgaagatctgtgatgtccggaagaaaagattcaaacagataaacgggactctccagaatctataaaataaatgatcgacaaacgctttgctttggtaggcttcaagcttggtcacccggtccgggcctagaaggccagcttcggccgccccgggcaactttattatacaaagttgatagataaatcagatatctggttcctaaggacccggcggaccgattaaactgattcggtccgacgcgttacctaataacttcgtatagcatacattatacgaagttattagctaactaactagtaagcttaagccatgggtcgacggatccgttaactagcgtggcatttggcaccgccgcacactatgcgagctaggagtgctagtttacagatgaaactatgaaaccaagaaaacacaattgtccgtagctagcgcgtggcgtcgtgtcaagcttcacacagtatcttcgttcttcactataaatcgcgcctgttgttcgtgagacccaccaccgtggataacagtcccctaataataagcgatcaacagcactgctgatggctgaacaccgaggcgccgccgcgcgtaaccatccgccggagcagcccgtcgtgccggcgaacgacgccttccccgaccgcgcccagcagctctgcctcgacgccgggcgcgcgctcgcgatgtgcggcgtgctcgtcgccgtccctcccgcattttacgcgtcgacgtcgcggacgacaccgcacttgccttcgtcggcttcgtcctctggatcatcggtgcgtggctgtgcctcctggcgctcacgcccttggctccacgggcggtgagggcgggcggggccgccgccagcaccttgctgatcaggtgcctgtccctttcatgaactactagcgcccgcgcccgcggccgccgggcacaagagaacacatcgatgttcgctgcgtacgtcagcaataaggcactctttgtcagtagtcgagtgcatatgttgggtgtttgccctgggagatttcaagtgttgtggccattatcccgcaggataaaaaatcggcggcttttggattgatacggaaaataacgatgtttcatgctcgtgttgtgtgtgtgacatcttgtcagccaagtttttaaccgttgctactccccctctgtgggctcagtgtgtggaccggaatacgtcgtacataggccgtagcctaagcccaatatgccgtttttcaggttggcctgtgtgacgacaagcgggtctcaaaagcccatcacgcaactggcctgcaattattggaggagagcgcgtcgagttggttccagaggctgcgtggtggggccggactctgcgacgacctctcgttcgcgtccgatttggttgccgtgagccgtgacgtaacgcctccttccgttcctccctatataagttccacccccgggtccggtttccccaagccccagtgacccccgatcccgatcgcgaaatctccgcacccgccggcaagggaccgaagcaagcctctctcccgaccgtcgcatcaaggtacgcgtccgctcgatctgtcctcttccttctcgatttgacttgctgtggtgcccgatcacgggatcagaatcgcaccagtgtagatttcgcatgttctaagatgtgttagtttccaggctaatccagttctcttgacgcccgatccgatcgagctccgtgtttatttcagcctaatcgtagtattcccctaaaatttcctcattagggggttcgcaagattgttggtcgacaggttcacttatgctcgatcgcttacttttagtcgattcatgctgcgtactattgttgccccccgtggttttatcttttctcgtgtgaaatccagtagatatagtagatatcgtagcattaggttttaattcaatcgattgattattgtatcatcaaaattgagaagttcgaatcatgcctatcatgctgcctcaaccgaaatcctgtatattgaagtttcaattcaattgattgatcattcattagattcaaccaaaatctagaaggttagatgacgcatgtcatgctgcctgcgtagtttacctttgatctgtttatgattaccttatcagtaggatatttgtgattttgggaagtagcactaactgattcatgctgacatgatgttccctttcagattatactgttgagtcctatctaattgatgctttgtatgctatatgaatacgtcatggtaaattagcagttaattagcatattagcaattgggcgtacctcatcaggattgctcttgtagatgtgtgtggtgatgtttcttgttcaattcatgttctgctttaaaagtatgtgttctctgtttgttaattaagattcatggttataatgatttggacctaattaatcagggttgcccttttagatgcgtggttacttgttgagttcatttttttcctgctatagttgtatgcgtttgttcattcatggttagatttgatttgtttcttctctattccatgccttccatatacttcaattgtagcttaacatgagatttctgtatatgcaggtcgaccgccggggatccacacgacaccatggcccagtccaagcacggcctgaccaaggagatgaccatgaagtaccgcatggagggctgcgtggacggccacaagttcgtgatcaccggcgagggcatcggctaccccttcaagggcaagcaggccatcaacctgtgcgtggtggagggcggccccttgcccttcgccgaggacatcttgtccgccgccttcatgtacggcaaccgcgtgttcaccgagtacccccaggacatcgtcgactacttcaagaactcctgccccgccggctacacctgggaccgctccttcctgttcgaggacggcgccgtgtgcatctgcaacgccgacatcaccgtgagcgtggaggagaactgcatgtaccacgagtccaagttctacggcgtgaacttccccgccgacggccccgtgatgaagaagatgaccgacaactgggagccctcctgcgagaagatcatccccgtgcccaagcagggcatcttgaagggcgacgtgagcatgtacctgctgctgaaggacggtggccgcttgcgctgccagttcgacaccgtgtacaaggccaagtccgtgccccgcaagatgcccgactggcacttcatccagcacaagctgacccgcgaggaccgcagcgacgccaagaaccagaagtggcacctgaccgagcacgccatcgcctccggctccgccttgccctccggactcagatctcgatagagtcaacctagacttgtccatcttctggattggccaacttaattaatgtatgaaataaaaggatgcacacatagtgacatgctaatcactataatgtgggcatcaaagttgtgtgttatgtgtaattactagttatctgaataaaagagaaagagatcatccatatttcttatcctaaatgaatgtcacgtgtctttataattctttgatgaaccagatgcatttcattaaccaaatccatatacatataaatattaatcatatataattaatatcaattgggttagcaaaacaaatctagtctaggtgtgttttgcgaattgcggcgcccttactttaacgcctctaaccaacacccctttatctttataaggaacaataaacagaatttgccccactgttctaaatcacctaataatatccccagctaaaaacaataaaggtttcctagaattaagacaagcatgactgttcctccaggagggtttggaacattgttgcagtcttgcagatacgggcgaagggtgagaaacagagcggagggctggaggtgacctcggtagtcgacgccggagttgagcttgacaacgacggggcggcccctgatggacttgaggaagtccgatggcgtcttcaccgtcccgccggcgcccgaggcgggcctgtcgctgccgccgccgccgctgctcatcttgcgcgctgtgcccccggcggtgtccctgtgttgcggatcgcgggtgggccaggtggatgcgagggcgacccgtttggactccggccggagccgccggatccctggtcggtgtcagtgccgtttactctgggccccacgtgtcagtaccgtctgtagatgacaacaacccgtcgtccacagtcatgtccaaaatatcctttcttcttttttttcgattcggatatctatcttccttttttttttccaaaaatcttcttgacgcaccagcgcgcacgtttgtggtaaacgccgacacgtcggtcccacgtcgatagaccccacccaccagtgagtagcgtgtacgtattcgggggtgacggacgtgtcgccgtcgtcttgctagtcccattcccatctgagccacacatctctgaacaaaaaaaaggagggaggcctccacgcacatccccctccgtgccacccgccccaaaccctcgcgccgcctccgagacagccgccgcaaccatggccaccgccgccgccgcgtctaccgcgctcactggcgccactaccgctgcgcccaaggcgaggcgccgggcgcacctcctggccacccgccgcgccctcgccgcgcccatcaggtgctcagcggcgtcacccgccatgccgatggctcccccggccaccccgctccggccgtggggccccaccgagccccgcaagggtgctgacatcctcgtcgagtccctcgagcgctgcggcgtccgcgacgtcttcgcctaccccggcggcgcgtccatggagatccaccaggcactcacccgctcccccgtcatcgccaaccacctcttccgccacgagcaaggggaggcctttgccgcctccggctacgcgcgctcctcgggccgcgtcggcgtctgcatcgccacctccggccccggcgccaccaacctagtctccgcgctcgccgacgcgctgctcgattccgtccccatggtcgccatcacgggacaggtggcgcgacgcatgattggcaccgacgccttccaggagacgcccatcgtcgaggtcacccgctccatcaccaagcacaactacctggtcctcgacgtcgacgacatcccccgcgtcgtgcaggaggctttcttcctcgcctcctctggtcgaccagggccggtgcttgtcgacatccccaaggacatccagcagcagatggcggtgcctgtctgggacaagcccatgagtctgcctgggtacattgcgcgccttcccaagccccctgcgactgagttgcttgagcaggtgctgcgtcttgttggtgaatcgcggcgccctgttctttatgtgggcggtggctgcgcagcatctggtgaggagttgcgacgctttgtggagctgactggaatcccggtcacaactactcttatgggcctcggcaacttccccagcgacgacccactgtctctgcgcatgctaggtatgcatgggacggtgtatgcaaattatgcagtggataaggccgatctgttgcttgcacttggtgtgcggtttgatgatcgcgtgacagggaagattgaggcttttgcaagcagggctaagattgtgcacgttgatattgatccggctgagattggcaagaacaagcagccacatgtgtccatctgtgcagatgttaagcttgctttgcagggcatgaatgctcttcttgaaggaagcacatcaaagaagagctttgactttggctcatggaacgatgagttggatcagcagaagagggaattcccccttgggtataaaacatctaatgaggagatccagccacaatatgctattcaggttcttgatgagctgacgaaaggcgaggccatcatcggcacaggtgttgggcagcaccagatgtgggcggcacagtactacacttacaagcggccaaggcagtggttgtcttcagctggtcttggggctatgggatttggtttgccggctgctgctggtgcttctgtggcaaacccaggtgtcactgttgttgacatcgatggagatggtagctttctcatgaacgttcaggagctagctatgatccgaattgagaacctcccagtgaaggtctttgtgctaaacaaccagcacctggggatggtggtgcagttggaggacaggttctataaggccaacagagcgcacacatacttgggaaacccagagaatgaaagtgagatatatccagatttcgtgacgatcgccaaagggttcaacattccagcggtccgtgtgacaaagaagaacgaagtccgcgcagcgataaagaagatgctcgagactccagggccgtacctcttggatataatcgtcccacaccaggagcatgtgttgcctatgatccctagtggtggggctttcaaggatatgatcctggatggtgatggcaggactgtgtactgactagctagtcagttaacagatctgccagatcctcggtgtacaaataacccgtcttatcctatgagacgggccggcgtcagtgtgttctggaggaatttttatgtcagagcctttttctttgtgtgcttgatgtagatgccaagggaagcttattggctgttgaagcttgatgcaaaataaattatggaactctgttttttgtttatctaataataactagcaaatatgcttccattgcattgaaactaacagccttttgtgtttccaagttttattttgtgacaatgtcatctatttcaattagttgtggaatcggaaacttgcaggactaacttggaaactccaatccctcagcatcctggactttttcctggtgtaatccatgtagatattattttaatcatcattttagttctggaggtttttccatctccggttttgctcccctttcttcaaaaaaaaaaaaaaaatgccgtaggcgccgcaacgcccacctgttgttcaaactcatgggcacgagtggctcgaagattttatacaacaattgctgtagtttcaccgttgctggtgaagaagcatttttttaaaaaaatatagtggtattcattttaattagtttagttgtgcagcgagcaaaatttggacatgctctgctcggaatctgatcgacctagacacagattagcagcagtagctttgtcatctgttccaagagttgcgatctgatagaagaaaaaaaaaccttcccttcaatgtaaaaccgaaactaacaagaaagaagcacagtgccgtttaggcaagtatggagtacgtattaagcatgtagaaggccatgcatgaaccactaacaagaaagaagcgcagtgccattcaggcaagcataagcatgtagattggcatgcatgaacaactaacagtagatcgtctctggtctgattagaagttttttgggaagccaagaaatcatgtacaactggttccatctcaaattccgtggcaaaaagaggcctaagcaacatacctcgagtagatcacattcaagcttggtcacccggtccgtcaatattctgattccgatgacttcgtaggttcctagctcaagccgctcgtgtccaagcgtcacttacgattagctaatgattacggcatctaggaccgactagtggcgcgccgactagctagctaaggtaccgagctcgaattcattccgattaatcgtggcctcttgctcttcaggatgaagagctatgtttaaacgtgcaagcgctactagacaattcagtacattaaaaacgtccgcaatgtgttattaagttgtctaagcgtcaatttgtttacaccacaatatatcctgcca

SEQ ID NO: 55 - DNA, 25621 bp, synthetic construct
  misc_feature 1..25621: note = PHP95886
  source 1..25621: mol_type = other DNA
gtttacccgccaatatatcctgtcaaacactgatagtttaaactgaaggcgggaaacgacaatctgatcatgagcggagaattaagggagtcacgttatgacccccgccgatgacgcgggacaagccgttttacgtttggaactgacagaaccgcaacgttgaaggagccactcagcaagctggtacgattgtaatacgactcactatagggcgaattgagcgctgtttaaacgctcttcaactggaagagcggttacgctgtttaaacgctcttcaactggaagagcggttactaccggttcactagctagctgctaatcgagctagttaccctatgaggtgacatgaagcgctcacggttactatgacggttagcttcacgactgttggtggcagtagcgtacgacttagctatagttccggacttacccttaagcgatttaaatctgcggttaccgaattcgagctcggtacctagtacccttgtacttttggtttcacctgcatagagaaaacccacaagaatatgacagtctgatttgtcagtctcattctcaagcaacatttctctatccgttactttcatggtgaataacacaatccatcatcaatactttgtgttactcagaaactgaaagttattccgagtcttgcatatctttggacctactcgtttttctaccattattgctgattgttaagctctcgctacttgaatcggcattgttggagtgggaaggttcaaaaaattggagttatgactagttgtctctttctatgtacgatggagaaaatgaataaacaactgagaaaatggctcttgtttagttgatgatgctcttaagctttccactggttgccatatatgatttgggcatttcactttgatcttaatgggccttgtaaagcccaagactcatgattatctttagttgatgctcttaattaggtgtgggcaaataattcaaactgtatgtacccgaccaaaaccaaagcaaaaataatcgaaccaaaccgaaaatttaaaaataaccgaatgaaaactaaatcctataactgaaagaactgaaaccgaatcaaaatatttaatgtaaccaaaaatatccgaaatataattatattgtcaaaaatattaataatttctagattaaataattaaaaatacttaaaaatttatataaaatagtaaaaatactcgaaaataaccacaaatattcaaaaacaaccgaaatatcccaaaatattcaaagcaaaataaccgaatggataccaaattttaaaaccgaaaaaactggaacaaaaccaaaatcgaaccaaaatttcaaaaatcgaataaatactaaactttagaacaaaaaaaaacgataaccgaatgtatacgaaccaaagccgaattagataaccgaacgtccaggactactcttaatctttccgccacttatgatttgggctattactttgtttataatgagccttttcaagctcaagttcatgattgtccgtgagatgagaaactgacttgttggattcgaaaccctagctagtattggttaatacttaatacataaatgacctgcattgacatcatcatccaagaaaataaaaattgtatgcttgagatatttagttttcctagctaggttttctttattttagtaccgaatctttaggtgtgccacgttaatttagacccattttttcatacttaccaactgagtctagtttaatcatgactataatcgtataaaatgattcagtcgacgtcattgcgaacgtatataaaatcatccaaattgacgtcattccaaagaggtaagcatgcttatctaagagtccgagcatactaaacaagacgacattttatttgcactccaaatcaaattttgtattgcctaaagaaaaacaatcaaactcaagtttcttaaaattaatttcattcaaactaatcactttcaatatctcacatattattcatgccatttctatttgtctaaacatgatttaaaaaaaaaagtaaaatacaaagattactatgcaaaaactctataaaaaaaaattcaaatttcttatttatttgtgacatcaaattttcaaaataatttttttaattatcggttgatccggtcagtcgataaaaacataaactttcagcgaccgttaaaactttcctactaccgatttagagaaaatcttagcttgaaacgtaattgtaacctgccttcatgcaagtcgcaagatatgtcatcctaagttgtatatgttttctcaaaagatgtatttacttgagaaaatacgtttcaacgttgatggacaaccaattaagaatcaagcacctttcgtaatcaatttaggcttatcgtctaaggtatactgatttacgacagttgactagacttataaggaacaaaataatagaatagtttctaaacacttcacctaatcatagagactaagatggtaattcgtaaacgacaaagcctagtgacactgtccattgtaaaattccacatcatattagtattaaacatatacatgtagtttcctgaacacatgtagtatcaaacacacttcgtggcttcttcctcgaaacctgcggccgcgctatagttccggacttacccttaagataacttcgtatagcatacattatacgaagttatgggcccacgcgtgaagagcggttaccagagctggtcacctttgtccaccaagatggaactgtcttcggccagaatggccatctggattcagcaggcctagaaggccatttatcgctatcaactttgtatagaaaagttgggccgagctcggtacggccagaatggcccggaccgggttaccaagcggccgcacactgatagtttaaactgaaggcgggaaacgacaatctgatcatgagcggagaattaagggagtcacgttatgacccccgccgatgacgcgggacaagccgttttacgtttggaactgacagaaccgcaacgattgaaggagccactcagccgcgggtttctggagtttaatgagctaagcacatacgtcagaaaccattattgcgcgttcaaaagtcgcctaaggtcactatcagctagcaaatatttcttgtcaaaaatgctccactgacgttccataaattcccctcggtatccaattagagtctcatattcactcccatggcggccaatgcgggcggcggtggagcgggaggaggcagcggcagcggcagcgtggctgcgccggcggtgtgccgccccagcggctcgcggtggacgccgacgccggagcagatcaggatgctgaaggagctctactacggctgcggcatccggtcgcccagctcggagcagatccagcgcatcaccgccatgctgcggcagcacggcaagatcgagggcaagaacgtcttctactggttccagaaccacaaggcccgcgagcgccagaagcgccgcctcaccagcctcgacgtcaacgtgcccgccgccggcgcggccgacgccaccaccagccaactcggcgtcctctcgctgtcgtcgccgccgccttcaggcgcggcgcctccctcgcccaccctcggcttctacgccgccggcaatggcggcggatcggctgtgctgctggacacgagttccgactggggcagcagcggcgctgctatggccaccgagacatgcttcctgcaggactacatgggcgtgacggacacgggcagctcgtcgcagtggccacgcttctcgtcgtcggacacgataatggcggcggccgcggcgcgggcggcgacgacgcgggcgcccgagacgctccctctcttcccgacctgcggcgacgacggcggcagcggtagcagcagctacttgccgttctggggtgccgcgtccacaactgccggcgccacttcttccgttgcgatccaacagcaacaccagctgcaggagcagtacagcttttacagcaacagcaacagcacccagctggccggcaccggcaaccaagacgtatcggcaacagcagcagcagccgccgccctggagctgagcctcagctcatggtgctccccttaccctgctgcagggagtatgtgagagcaacgcgagctgccactgctcttcactgatgtctctggaatggaaggaggaggaagtgagaacagatcattcgacaaagcagcattagtccgttgatcggtggaagaccactcgtcagtgttgagttgaatgtttgatcaataaaatacggcaatgctgtaagggttgttttttatgccattgataatacactgtactgttcagttgttgaactctatttcttagccatgccaagtgcttttcttattttgaataacattacagcaaaaagttgaaagacaaaaaaaaaaacccccgaacagagtgctttgggtcccaagcttctttagactgtgttcggcgttccccctaaatttctccccctatatctcactcacttgtcacatcagcgttctctttccccctatatctccacgctctacagcagttccacctatatcaaacctctataccccaccacaacaatattatatactttcatcttcaactaactcatgtaccttccaatttttttctactaataattatttacgtgcacagaaacttagcaaggagagagagagcgggaatttaaatgctcggcgttaggcttttagtccgctaggtggctagaccgaggttaggacgctagttcactaggggcctagtggtgttttaagacgtcacggtcaccacgcgtggaccgaagcttgcatgcctgcagtgcagcgtgacccggtcgtgcccctctctagagataatgagcattgcatgtctaagttataaaaaattaccacatattttttttgtcacacttgtttgaagtgcagtttatctatctttatacatatatttaaactttactctacgaataatataatctatagtactacaataatatcagtgttttagagaatcatataaatgaacagttagacatggtctaaaggacaattgagtattttgacaacaggactctacagttttatctttttagtgtgcatgtgttctcctttttttttgcaaatagcttcacctatataatacttcatccattttattagtacatccatttagggtttagggttaatggtttttatagactaatttttttagtacatctattttattctattttagcctctaaattaagaaaactaaaactctattttagtttttttatttaataatttagatataaaatagaataaaataaagtgactaaaaattaaacaaataccctttaagaaattaaaaaaactaaggaaacatttttcttgtttcgagtagataatgccagcctgttaaacgccgtcgacgagtctaacggacaccaaccagcgaaccagcagcgtcgcgtcgggccaagcgaagcagacggcacggcatctctgtcgctgcctctggacccctctcgagagttccgctccaccgttggacttgctccgctgtcggcatccagaaattgcgtggcggagcggcagacgtgagccggcacggcaggcggcctcctcctcctctcacggcaccggcagctacgggggattcctttcccaccgctccttcgctttcccttcctcgcccgccgtaataaatagacaccccctccacaccctctttccccaacctcgtgttgttcggagcgcacacacacacaaccagatctcccccaaatccacccgtcggcacctccgcttcaaggtacgccgctcgtcctcccccccccccctctctaccttctctagatcggcgttccggtccatgcatggttagggcccggtagttctacttctgttcatgtttgtgttagatccgtgtttgtgttagatccgtgctgctagcgttcgtacacggatgcgacctgtacgtcagacacgttctgattgctaacttgccagtgtttctctttggggaatcctgggatggctctagccgttccgcagacgggatcgatttcatgattttttttgtttcgttgcatagggtttggtttgcccttttcctttatttcaatatatgccgtgcacttgtttgtcgggtcatcttttcatgcttttttttgtcttggttgtgatgatgtggtctggttgggcggtcgttctagatcggagtagaattctgtttcaaactacctggtggatttattaattttggatctgtatgtgtgtgccatacatattcatagttacgaattgaagatgatggatggaaatatcgatctaggataggtatacatgttgatgcgggttttactgatgcatatacagagatgctttttgttcgcttggttgtgatgatgtggtgtggttgggcggtcgttcattcgttctagatcggagtagaatactgtttcaaactacctggtgtatttattaattttggaactgtatgtgtgtgtcatacatcttcatagttacgagtttaagatggatggaaatatcgatctaggataggtatacatgttgatgtgggttttactgatgcatatacatgatggcatatgcagcatctattcatatgctctaaccttgagtacctatctattataataaacaagtatgttttataattattttgatcttgatatacttggatgatggcatatgcagcagctatatgtggatttttttagcactgccttcatacgctatttatttgcttggtactgtttcttttgtcgatgctcaccctgttgtttggtgttacttctgcaggtcgactttaacttagcctaggatccatggccactgtgaacaactggctcgctttctccctctccccgcaggagctgccgccctcccagacgacggactccacactcatctcggccgccaccgccgaccatgtctccggcgatgtctgcttcaacatcccccaagattggagcatgaggggatcagagctttcggcgctcgtcgcggagccgaagctggaggacttcctcggcggcatctccttctccgagcagcatcacaaggccaactgcaacatgatacccagcactagcagcacagtttgctacgcgagctcaggtgctagcaccggctaccatcaccagctgtaccaccagcccaccagctcagcgctccacttcgcggactccgtaatggtggcttcctcggccggtgtccacgacggcggtgccatgctcagcgcggccgccgctaacggtgtcgctggcgctgccagtgccaacggcggcggcatcgggctgtccatgattaagaactggctgcggagccaaccggcgcccatgcagccgagggtggcggcggctgagggcgcgcaggggctctctttgtccatgaacatggcggggacgacccaaggcgctgctggcatgccacttctcgctggagagcgcgcacgggcgcccgagagtgtatcgacgtcagcacagggtggagccgtcgtcgtcacggcgccgaaggaggatagcggtggcagcggtgttgccggcgctctagtagccgtgagcacggacacgggtggcagcggcggcgcgtcggctgacaacacggcaaggaagacggtggacacgttcgggcagcgcacgtcgatttaccgtggcgtgacaaggcatagatggactgggagatatgaggcacatctttgggataacagttgcagaagggaagggcaaactcgtaagggtcgtcaagtctatttaggtggctatgataaagaggagaaagctgctagggcttatgatcttgctgctctgaagtactggggtgccacaacaacaacaaattttccagtgagtaactacgaaaaggagctcgaggacatgaagcacatgacaaggcaggagtttgtagcgtctctgagaaggaagagcagtggtttctccagaggtgcatccatttacaggggagtgactaggcatcaccaacatggaagatggcaagcacggattggacgagttgcagggaacaaggatctttacttgggcaccttcagcacccaggaggaggcagcggaggcgtacgacatcgcggcgatcaagttccgcggcctcaacgccgtcaccaacttcgacatgagccgctacgacgtgaagagcatcctggacagcagcgccctccccatcggcagcgccgccaagcgcctcaaggaggccgaggccgcagcgtccgcgcagcaccaccacgccggcgtggtgagctacgacgtcggccgcatcgcctcgcagctcggcgacggcggagccctggcggcggcgtacggcgcgcactaccacggcgccgcctggccgaccatcgcgttccagccgggcgccgccagcacaggcctgtaccacccgtacgcgcagcagccaatgcgcggcggcgggtggtgcaagcaggagcaggaccacgcggtgatcgcggccgcgcacagcctgcaggacctccaccacctgaacctgggcgcggccggcgcgcacgactttttctcggcagggcagcaggccgccgccgctgcgatgcacggcctgggtagcatcgacagtgcgtcgctcgagcacagcaccggctccaactccgtcgtctacaacggcggggtcggcgacagcaacggcgccagcgccgtcggcggcagtggcggtggctacatgatgccgatgagcgctgccggagcaaccactacatcggcaatggtgagccacgagcaggtgcatgcacgggcctacgacgaagccaagcaggctgctcagatggggtacgagagctacctggtgaacgcggagaacaatggtggcggaaggatgtctgcatgggggactgtcgtgtctgcagccgcggcggcagcagcaagcagcaacgacaacatggccgccgacgtcgggcatggcggcgcgcagctcttcagtgtctggaacgacacttaagcgtacctagtggtacctgacatcttatagtctgcaacctctcgtgtctgaattcctatctttatcaagtgttattgcttccacgactataggacagctttcgtcgaaagcttttgctcatgtgatctcgaaggattcatctagtctgatttttcgtgacttgtatcggttttattggattcatccaacatatatcaataaaaaatgagttgtgtttcctttcttcctagttcagttaaaattatttccctcctgcgcttgtgctgtaattgtctgtgtacctgttgtttgtgactgtgttagttcccttggatatgatttcgtatttgatatgtacatggagatagcttagcttcattattggagtatgaagttagtatgacatagtcactctcctggaaaattgacactgcaaaccatatttttattctgaaccacaaatcctagtcagtccgctggcatatgccgtccgtttgctgaatccagaacgtgggtttggagatgtacggctgagatgcctctatgcgaaggggatttcgtggtgaaacgagatgggagtagagcaacgcccgtggaagatgcttcaaacttccacacttttgagcaacgatcggcagtagtaaggtagacgatttcaagatcaaagcatatgaagataaacaacatcaacaacaaaatttgttggggttctatagagagaaacagagctacatacatacactgttttgtatctaccatctgagatgatgaaaagatgaaaaactaaagaatgccccggcgccaacgccaggacacgccgcgcgcgcgtcacccgagccatctcttgacccagccggcgctgtatatttacacacgttgcagcatcgatcaccacctgttcgatcgcgtcgccgtcaccggcgcgccgcgacttattgaactagtctagggcgcggctaacaacctagcttagattgccttgtctaaacccttaggctaacgcgccacggtaacccggtccgggcctagaaggccccagagctggtcaccccatacgattggaagcttcaagtttgtacaaaaaagcaggctccggccagagttacccggaccgaagcttgcatgcctgcagtgcagcgtgacccggtcgtgcccctctctagagataatgagcattgcatgtctaagttataaaaaattaccacatattttttttgtcacacttgtttgaagtgcagtttatctatctttatacatatatttaaactttactctacgaataatataatctatagtactacaataatatcagtgttttagagaatcatataaatgaacagttagacatggtctaaaggacaattgagtattttgacaacaggactctacagttttatctttttagtgtgcatgtgttctcctttttttttgcaaatagcttcacctatataatacttcatccattttattagtacatccatttagggtttagggttaatggtttttatagactaatttttttagtacatctattttattctattttagcctctaaattaagaaaactaaaactctattttagtttttttatttaataatttagatataaaatagaataaaataaagtgactaaaaattaaacaaataccctttaagaaattaaaaaaactaaggaaacatttttcttgtttcgagtagataatgccagcctgttaaacgccgtcgacgagtctaacggacaccaaccagcgaaccagcagcgtcgcgtcgggccaagcgaagcagacggcacggcatctctgtcgctgcctctggacccctctcgagagttccgctccaccgttggacttgctccgctgtcggcatccagaaattgcgtggcggagcggcagacgtgagccggcacggcaggcggcctcctcctcctctcacggcaccggcagctacgggggattcctttcccaccgctccttcgctttcccttcctcgcccgccgtaataaatagacaccccctccacaccctctttccccaacctcgtgttgttcggagcgcacacacacacaaccagatctcccccaaatccacccgtcggcacctccgcttcaaggtacgccgctcgtcctcccccccccccctctctaccttctctagatcggcgttccggtccatgcatggttagggcccggtagttctacttctgttcatgtttgtgttagatccgtgtttgtgttagatccgtgctgctagcgttcgtacacggatgcgacctgtacgtcagacacgttctgattgctaacttgccagtgtttctctttggggaatcctgggatggctctagccgttccgcagacgggatcgatttcatgattttttttgtttcgttgcatagggtttggtttgcccttttcctttatttcaatatatgccgtgcacttgtttgtcgggtcatcttttcatgcttttttttgtcttggttgtgatgatgtggtctggttgggcggtcgttctagatcggagtagaattctgtttcaaactacctggtggatttattaattttggatctgtatgtgtgtgccatacatattcatagttacgaattgaagatgatggatggaaatatcgatctaggataggtatacatgttgatgcgggttttactgatgcatatacagagatgctttttgttcgcttggttgtgatgatgtggtgtggttgggcggtcgttcattcgttctagatcggagtagaatactgtttcaaactacctggtgtatttattaattttggaactgtatgtgtgtgtcatacatcttcatagttacgagtttaagatggatggaaatatcgatctaggataggtatacatgttgatgtgggttttactgatgcatatacatgatggcatatgcagcatctattcatatgctctaaccttgagtacctatctattataataaacaagtatgttttataattattttgatcttgatatacttggatgatggcatatgcagcagctatatgtggatttttttagccctgccttcatacgctatttatttgcttggtactgtttcttttgtcgatgctcaccctgttgtttggtgttacttctgcaggtcgactttaacttagcctaggatccatgagcagcagcaagcacagcagcgtgttcaactacagcgccctgttcctgagcctgttcctgcagcagatggaccagaacagcctgcaccacctggacagcccgaagatcgagaacgagtacgagccggacagcctgtacgacatgctggacaagctgccgccgctggacagcctgctggacatggaggacctgaagccgaacgccggcctgcacttccagttccactacaacagcttcgaggacttcttcgagaacatcgaggtggacaacaccatcccgagcgacatccacctgctgacccaggagccgtacttcagcagcgacagcagcagcagcagcccgctggccatccagaacgacggcctgatcagcaacgtgaaggtggagaaggtgaccgtgaagaagaagaggaacctgaagaagaagaggcaggacaagctggagatgagcgagatcaagcagttcttcgacaggccgatcatgaaggccgccaaggagctgaacgtgggcctgaccgtgctgaagaagaggtgcagggagctgggcatctacaggtggccgcacaggaagctgaagagcctgaacagcctgatcaagaacctgaagaacgtgggcatggaggaggaggtgaagaacctggaggagcacaggttcctgatcgagcaggagccggacgccgagctgagcgacggcaccaagaagctgaggcaggcctgcttcaaggccaactacaagaggaggaagagcctgggcgacgactactactaaggtaccgttaacagatctactaactatctatactgtaataatgttgtatagccgccggatagctagctagtttagtcattcagcggcgatgggtaataataaagtgtcatccatccatcaccatgcgtggcaacgtgagcaatgacctgattgaacaaattgaaatgaaaagaagaaatatgttatatgtcaacgagatttcctcataatgccactgacgacgtgtgtccaagaaatgtatcagtgatacgtatattcacaatttttttatgacttatactcacaatttgtttttttactacttatactcacaatttgttgtgcgtaccataacaatttcgatcgaatatatatcagaaagttgacgaaagtaagctcactcaaaaagttaaatgggctgcggaagctgcgtcaggcccaagttttggctattctatccggtatccacgattttgatggctgagggacatatgttcgcttaagcttcggtccgggcctagaaggccgatctcccgggcacccagctttcttgtacaaagtggccgttaacggatcggccagaatggcccggaccgggttaccgaattcgagctcggtaccctggttcacaaactcaatacaacacacagtggagtagggtattacgctccggcggcccgaaccactctaaatccttgtgtcctcgtgtgctcttccaccattaatgactgtaattgcagggacacgaagagttgtagcgcttttgccaacaagatccgctatatgctagtagagtggaacctgcacagcaacaagcatccaataatctgagaataagaattatgtgtggtgatggttctcatctctgcaactcgccattttcgcgagagaaccaaatccaagttggtgaagatcatgatttgggctcatgggctggcatagtagctattacctttgcaattgtggttcgaatctatccgatattctccttttcagggagagctaatgcttatgcttattgggtattttggtttgacactgcttcacgcccaaaaaaaggcaactatgtctgagttggatatggcccaaaaaaaggcagctatgtctgagttggatatggaagtcttctttcgtttagggtgaagtaagaccaagctcatgagcttattatcttaggtcggaacaaattagttgataggcatggcacatttatcaaattataatgattttaacagaaaagcaacacctctttttcagcagcaccagctttgcaagctgcaattgacactccaagcatagtatttgctccaaactcagcctgcatttcgcacaatatcatatctatttccatttggataaaatatattttccagaaatatgggaacagaatcaagatacagaaaaaagttgtggtagtagtggtaagtggaaacacaagtacagtgaaaagatagcattatttctgaacagtcaaattaaccgaaataagtagtatcacatactgcccctaaattgactacacccaatgtaaagaattgcttgagcatattgagccatcagttgtttgtttgtgtaacggatttgacaatgcagagttcaggagcaaaaaaccgcaaaggagagaaagagggaaaggatctcctagtatcccaccttgtggcgcgccctgtcaagtgcatgatggcctggtcgatctgcgtctgctgctgcggttccatcccaacgagtgcctccgacaccttgtcgttgatcacccgcaccgcgtaggcgacccccctggcgaggaacttccgcctctcggaggccccggccgcgtcggcggcggcgccctcgagcgcgcccacgctagccgtagatgctcggtgcacggccttgttggtgtgcaactcgacctcaacggccggtgcgctacgcccgtcaaggatctggcgcgcccgcaccctcgtgatcacggtgggcgcctcccgcctcatgtggccgacgatgaaaagcgccgggttaggggccttggcgcgcaccgccgtattcagggcctcctcgctcttgcgcgagagcaggtgcttccccaggtactcctgcactgacaaggctgccacagcggtggaatttgtcctcacgacttcgccacgtcgtcctcacctccctggcttcccacgactccgccgtatcgaggtgctcggtgggtcgtcttaatccgaagtccgaactaggaagacgagacagagaggtctgaggaatgggcctcgtttgatgttgagctgaattatttttccagcataagcccaggtcttggtccatgaacaaaattactagaaacccagcccagtactacgatctaaaagagggactgccactggatagctctctctagcattctccacgctccaatacagcggcgtcgtgtctatccgggtctatccgcgaacacgtgagaactctccagaaactgctttctcctccacttcatctctctcgctttccctctataaaaagaccccttctaggaattgagggagacagcaagcaccaagcagcgatccgaagctcaatcaattcactcaaacctcttccccaaatcttcgattagatcttcgttgacaagaagactagaaccgaacctgacatgtccaacctgctcacggttcaccagaaccttccggctcttccagtggacgcgacgtccgatgaagtcaggaagaacctcatggacatgttccgcgacaggcaagcgttcagcgagcacacctggaagatgctgctctccgtctgccgctcctgggctgcatggtgcaagctgaacaacaggaagtggttccccgctgagcccgaggacgtgagggattaccttctgtacctgcaagcgcgaggtttgtttctgcttctacctttgatatatatataataattatcattaattagtagtaatataatatttcaaatatttttttcaaaataaaagaatgtagtatatagcaattgcttttctgtagtttataagtgtgtatattttaatttataacttttctaatatatgaccaaaacatggtgatgcctaggtctggcagtgaagaccatccagcaacaccttggacaactgaacatgcttcacaggcgctccggcctcccgcgccccagcgactcgaacgccgtgagcctcgtcatgcgccgcatcaggaaggaaaacgtcgatgccggcgaaagggcaaagcaggccctcgcgttcgagaggaccgatttcgaccaggtccgcagcctgatggagaacagcgacaggtgccaggacattaggaacctggcgttcctcggaattgcatacaacacgctcctcaggatcgcggaaattgcccgcattcgcgtgaaggacattagccgcaccgacggcggcaggatgcttatccacattggcaggaccaagacgctcgtttccaccgcaggcgtcgaaaaggccctcagcctcggagtgaccaagctcgtcgaacgctggatctccgtgtccggcgtcgcggacgacccaaacaactacctcttctgccgcgtccgcaagaacggggtggctgcccctagcgccaccagccaactcagcacgagggccttggaaggtattttcgaggccacccaccgcctgatctacggcgcgaaggatgacagcggtcaacgctacctcgcatggtccgggcactccgcccgcgttggagctgctagggacatggcccgcgccggtgtttccatccccgaaatcatgcaggcgggtggatggacgaacgtgaacattgtcatgaactacattcgcaaccttgacagcgagacgggcgcaatggttcgcctcctggaagatggtgactgaggtacccaacctagacttgtccatcttctggattggccaacttaattaatgtatgaaataaaaggatgcacacatagtgacatgctaatcactataatgtgggcatcaaagttgtgtgttatgtgtaattactagttatctgaataaaagagaaagagatcatccatatttcttatcctaaatgaatgtcacgtgtctttataattctttgatgaaccagatgcatttcattaaccaaatccatatacatataaatattaatcatatataattaatatcaattgggttagcaaaacaaatctagtctaggtgtgttttgcgatccgatatcgaattggccacggtaccagctgctgctgttctagggttcacaagtctgcctatttgtcttccccaatggagctatggttgtctggtctggtccttggtcgtgtcccgtttcattgtgtactatttacctgtaatgtgtatccttaagtctggtttgatggtgtctgaaacgttttgctgtggtagagcagcatggaagaactataatgaataagtgatccctaatcattgtgtccaaattttgcttctgctatacccttttgtgctgtttcttatgttttgcttaaaaatttgatctgacaaacaaatttgtctaaattatgctcttgttctgactgtgtactgtacacatttgtattgctaccggtttggcacatagttttctctttgattgcagatcaaacccttctgattgcagattgcttggctatggctgatgtgctcactgttcttctttagcttgtatattgctgatggtggcttggctacggctgaaaaagttgctgctgcgccgacttggcaactgttgctccagtaatgctttgtcctctcttcctagccgccgacttggcacttggcagctgttgctcctgtaatgcgttgttatctcttatctcttgagatgtactatgattttgaggctgtttgacttgtgccagattgccagtgctgatgctatattatctcaggtttttatgctagtatatgttttactgtgtgctgcctgtgtcgagttacgtaatctattgaaccgctatgcgtgttgatgccctgttgttgcttgccagattgatgcccctgttgcttgcagcttgcaagctgtagtgaaatcctaaaattccaaaccaaatctattctgaacttttgaagatctgtgatgtccggaagaaaagattcaaacagataaacgggactctccagaatctataaaataaatgatcgacaaacgctttgctttggtaggcttcaagcttggtcacccggtccgggcctagaaggccagcttcggccgccccgggcaactttattatacaaagttgatagataaatcagatatctggttcctaaggacccggcggaccgattaaactgattcggtccgacgcgttacctaataacttcgtatagcatacattatacgaagttattagctaactaactagtaagcttaagccatgggtcgacggatccgttaactagcgtggcatttggcaccgccgcacactatgcgagctaggagtgctagtttacagatgaaactatgaaaccaagaaaacacaattgtccgtagctagcgcgtggcgtcgtgtcaagcttcacacagtatcttcgttcttcactataaatcgcgcctgttgttcgtgagacccaccaccgtggataacagtcccctaataataagcgatcaacagcactgctgatggctgaacaccgaggcgccgccgcgcgtaaccatccgccggagcagcccgtcgtgccggcgaacgacgccttccccgaccgcgcccagcagctctgcctcgacgccgggcgcgcgctcgcgatgtgcggcgtgctcgtcgccgtccctcccgcattttacgcgtcgacgtcgcggacgacaccgcacttgccttcgtcggcttcgtcctctggatcatcggtgcgtggctgtgcctcctggcgctcacgcccttggctccacgggcggtgagggcgggcggggccgccgccagcaccttgctgatcaggtgcctgtccctttcatgaactactagcgcccgcgcccgcggccgccgggcacaagagaacacatcgatgttcgctgcgtacgtcagcaataaggcactctttgtcagtagtcgagtgcatatgttgggtgtttgccctgggagatttcaagtgttgtggccattatcccgcaggataaaaaatcggcggcttttggattgatacggaaaataacgatgtttcatgctcgtgttgtgtgtgtgacatcttgtcagccaagtttttaaccgttgctactccccctctgtgggctcagtgtgtggaccggaatacgtcgtacataggccgtagcctaagcccaatatgccgtttttcaggttggcctgtgtgacgacaagcgggtctcaaaagcccatcacgcaactggcctgcaattattggaggagagcgcgtcgagttggttccagaggctgcgtggtggggccggactctgcgacgacctctcgttcgcgtccgatttggttgccgtgagccgtgacgtaacgcctccttccgttcctccctatataagttccacccccgggtccggtttccccaagccccagtgacccccgatcccgatcgcgaaatctccgcacccgccggcaagggaccgaagcaagcctctctcccgaccgtcgcatcaaggtacgcgtccgctcgatctgtcctcttccttctcgatttgacttgctgtggtgcccgatcacgggatcagaatcgcaccagtgtagatttcgcatgttctaagatgtgttagtttccaggctaatccagttctcttgacgcccgatccgatcgagctccgtgtttatttcagcctaatcgtagtattcccctaaaatttcctcattagggggttcgcaagattgttggtcgacaggttcacttatgctcgatcgcttacttttagtcgattcatgctgcgtactattgttgccccccgtggttttatcttttctcgtgtgaaatccagtagatatagtagatatcgtagcattaggttttaattcaatcgattgattattgtatcatcaaaattgagaagttcgaatcatgcctatcatgctgcctcaaccgaaatcctgtatattgaagtttcaattcaattgattgatcattcattagattcaaccaaaatctagaaggttagatgacgcatgtcatgctgcctgcgtagtttacctttgatctgtttatgattaccttatcagtaggatatttgtgattttgggaagtagcactaactgattcatgctgacatgatgttccctttcagattatactgttgagtcctatctaattgatgctttgtatgctatatgaatacgtcatggtaaattagcagttaattagcatattagcaattgggcgtacctcatcaggattgctcttgtagatgtgtgtggtgatgtttcttgttcaattcatgttctgctttaaaagtatgtgttctctgtttgttaattaagattcatggttataatgatttggacctaattaatcagggttgcccttttagatgcgtggttacttgttgagttcatttttttcctgctatagttgtatgcgtttgttcattcatggttagatttgatttgtttcttctctattccatgccttccatatacttcaattgtagcttaacatgagatttctgtatatgcaggtcgaccgccggggatccacacgacaccatggcccagtccaagcacggcctgaccaaggagatgaccatgaagtaccgcatggagggctgcgtggacggccacaagttcgtgatcaccggcgagggcatcggctaccccttcaagggcaagcaggccatcaacctgtgcgtggtggagggcggccccttgcccttcgccgaggacatcttgtccgccgccttcatgtacggcaaccgcgtgttcaccgagtacccccaggacatcgtcgactacttcaagaactcctgccccgccggctacacctgggaccgctccttcctgttcgaggacggcgccgtgtgcatctgcaacgccgacatcaccgtgagcgtggaggagaactgcatgtaccacgagtccaagttctacggcgtgaacttccccgccgacggccccgtgatgaagaagatgaccgacaactgggagccctcctgcgagaagatcatccccgtgcccaagcagggcatcttgaagggcgacgtgagcatgtacctgctgctgaaggacggtggccgcttgcgctgccagttcgacaccgtgtacaaggccaagtccgtgccccgcaagatgcccgactggcacttcatccagcacaagctgacccgcgaggaccgcagcgacgccaagaaccagaagtggcacctgaccgagcacgccatcgcctccggctccgccttgccctccggactcagatctcgatagagtcaacctagacttgtccatcttctggattggccaacttaattaatgtatgaaataaaaggatgcacacatagtgacatgctaatcactataatgtgggcatcaaagttgtgtgttatgtgtaattactagttatctgaataaaagagaaagagatcatccatatttcttatcctaaatgaatgtcacgtgtctttataattctttgatgaaccagatgcatttcattaaccaaatccatatacatataaatattaatcatatataattaatatcaattgggttagcaaaacaaatctagtctaggtgtgttttgcgaattgcggcgcccttactttaacgcctctaaccaacacccctttatctttataaggaacaataaacagaatttgccccactgttctaaatcacctaataatatccccagctaaaaacaataaaggtttcctagaattaagacaagcatgactgttcctccaggagggtttggaacattgttgcagtcttgcagatacgggcgaagggtgagaaacagagcggagggctggaggtgacctcggtagtcgacgccggagttgagcttgacaacgacggggcggcccctgatggacttgaggaagtccgatggcgtcttcaccgtcccgccggcgcccgaggcgggcctgtcgctgccgccgccgccgctgctcatcttgcgcgctgtgcccccggcggtgtccctgtgttgcggatcgcgggtgggccaggtggatgcgagggcgacccgtttggactccggccggagccgccggatccctggtcggtgtcagtgccgtttactctgggccccacgtgtcagtaccgtctgtagatgacaacaacccgtcgtccacagtcatgtccaaaatatcctttcttcttttttttcgattcggatatctatcttccttttttttttccaaaaatcttcttgacgcaccagcgcgcacgtttgtggtaaacgccgacacgtcggtcccacgtcgatagaccccacccaccagtgagtagcgtgtacgtattcgggggtgacggacgtgtcgccgtcgtcttgctagtcccattcccatctgagccacacatctctgaacaaaaaaaaggagggaggcctccacgcacatccccctccgtgccacccgccccaaaccctcgcgccgcctccgagacagccgccgcaaccatggccaccgccgccgccgcgtctaccgcgctcactggcgccactaccgctgcgcccaaggcgaggcgccgggcgcacctcctggccacccgccgcgccctcgccgcgcccatcaggtgctcagcggcgtcacccgccatgccgatggctcccccggccaccccgctccggccgtggggccccaccgagccccgcaagggtgctgacatcctcgtcgagtccctcgagcgctgcggcgtccgcgacgtcttcgcctaccccggcggcgcgtccatggagatccaccaggcactcacccgctcccccgtcatcgccaaccacctcttccgccacgagcaaggggaggcctttgccgcctccggctacgcgcgctcctcgggccgcgtcggcgtctgcatcgccacctccggccccggcgccaccaacctagtctccgcgctcgccgacgcgctgctcgattccgtccccatggtcgccatcacgggacaggtggcgcgacgcatgattggcaccgacgccttccaggagacgcccatcgtcgaggtcacccgctccatcaccaagcacaactacctggtcctcgacgtcgacgacatcccccgcgtcgtgcaggaggctttcttcctcgcctcctctggtcgaccagggccggtgcttgtcgacatccccaaggacatccagcagcagatggcggtgcctgtctgggacaagcccatgagtctgcctgggtacattgcgcgccttcccaagccccctgcgactgagttgcttgagcaggtgctgcgtcttgttggtgaatcgcggcgccctgttctttatgtgggcggtggctgcgcagcatctggtgaggagttgcgacgctttgtggagctgactggaatcccggtcacaactactcttatgggcctcggcaacttccccagcgacgacccactgtctctgcgcatgctaggtatgcatgggacggtgtatgcaaattatgcagtggataaggccgatctgttgcttgcacttggtgtgcggtttgatgatcgcgtgacagggaagattgaggcttttgcaagcagggctaagattgtgcacgttgatattgatccggctgagattggcaagaacaagcagccacatgtgtccatctgtgcagatgttaagcttgctttgcagggcatgaatgctcttcttgaaggaagcacatcaaagaagagctttgactttggctcatggaacgatgagttggatcagcagaagagggaattcccccttgggtataaaacatctaatgaggagatccagccacaatatgctattcaggttcttgatgagctgacgaaaggcgaggccatcatcggcacaggtgttgggcagcaccagatgtgggcggcacagtactacacttacaagcggccaaggcagtggttgtcttcagctggtcttggggctatgggatttggtttgccggctgctgctggtgcttctgtggcaaacccaggtgtcactgttgttgacatcgatggagatggtagctttctcatgaacgttcaggagctagctatgatccgaattgagaacctcccagtgaaggtctttgtgctaaacaaccagcacctggggatggtggtgcagttggaggacaggttctataaggccaacagagcgcacacatacttgggaaacccagagaatgaaagtgagatatatccagatttcgtgacgatcgccaaagggttcaacattccagcggtccgtgtgacaaagaagaacgaagtccgcgcagcgataaagaagatgctcgagactccagggccgtacctcttggatataatcgtcccacaccaggagcatgtgttgcctatgatccctagtggtggggctttcaaggatatgatcctggatggtgatggcaggactgtgtactgactagctagtcagttaacagatctgccagatcctcggtgtacaaataacccgtcttatcctatgagacgggccggcgtcagtgtgttctggaggaatttttatgtcagagcctttttctttgtgtgcttgatgtagatgccaagggaagcttattggctgttgaagcttgatgcaaaataaattatggaactctgttttttgtttatctaataataactagcaaatatgcttccattgcattgaaactaacagccttttgtgtttccaagttttattttgtgacaatgtcatctatttcaattagttgtggaatcggaaacttgcaggactaacttggaaactccaatccctcagcatcctggactttttcctggtgtaatccatgtagatattattttaatcatcattttagttctggaggtttttccatctccggttttgctcccctttcttcaaaaaaaaaaaaaaaatgccgtaggcgccgcaacgcccacctgttgttcaaactcatgggcacgagtggctcgaagattttatacaacaattgctgtagtttcaccgttgctggtgaagaagcatttttttaaaaaaatatagtggtattcattttaattagtttagttgtgcagcgagcaaaatttggacatgctctgctcggaatctgatcgacctagacacagattagcagcagtagctttgtcatctgttccaagagttgcgatctgatagaagaaaaaaaaaccttcccttcaatgtaaaaccgaaactaacaagaaagaagcacagtgccgtttaggcaagtatggagtacgtattaagcatgtagaaggccatgcatgaaccactaacaagaaagaagcgcagtgccattcaggcaagcataagcatgtagattggcatgcatgaacaactaacagtagatcgtctctggtctgattagaagttttttgggaagccaagaaatcatgtacaactggttccatctcaaattccgtggcaaaaagaggcctaagcaacatacctcgagtagatcacattcaagcttggtcacccggtccgtcaatattctgattccgatgacttcgtaggttcctagctcaagccgctcgtgtccaagcgtcacttacgattagctaatgattacggcatctaggaccgactagtggcgcgccgactagctagctaaggtaccgagctcgaattcattccgattaatcgtggcctcttgctcttcaggatgaagagctatgtttaaacgtgcaagcgctactagacaattcagtacattaaaaacgtccgcaatgtgttattaagttgtctaagcgtcaatttgtttacaccacaatatatcctgcca

SEQ ID NO: 56 - DNA, 25489 bp, synthetic construct
  misc_feature 1..25489: note = PHP95892
  source 1..25489: mol_type = other DNA
gtttacccgccaatatatcctgtcaaacactgatagtttaaactgaaggcgggaaacgacaatctgatcatgagcggagaattaagggagtcacgttatgacccccgccgatgacgcgggacaagccgttttacgtttggaactgacagaaccgcaacgttgaaggagccactcagcaagctggtacgattgtaatacgactcactatagggcgaattgagcgctgtttaaacgctcttcaactggaagagcggttacgctgtttaaacgctcttcaactggaagagcggttactaccggttcactagctagctgctaatcgagctagttaccctatgaggtgacatgaagcgctcacggttactatgacggttagcttcacgactgttggtggcagtagcgtacgacttagctatagttccggacttacccttaagcgatttaaatctgcggttaccgaattcgagctcggtacctagtacccttgtacttttggtttcacctgcatagagaaaacccacaagaatatgacagtctgatttgtcagtctcattctcaagcaacatttctctatccgttactttcatggtgaataacacaatccatcatcaatactttgtgttactcagaaactgaaagttattccgagtcttgcatatctttggacctactcgtttttctaccattattgctgattgttaagctctcgctacttgaatcggcattgttggagtgggaaggttcaaaaaattggagttatgactagttgtctctttctatgtacgatggagaaaatgaataaacaactgagaaaatggctcttgtttagttgatgatgctcttaagctttccactggttgccatatatgatttgggcatttcactttgatcttaatgggccttgtaaagcccaagactcatgattatctttagttgatgctcttaattaggtgtgggcaaataattcaaactgtatgtacccgaccaaaaccaaagcaaaaataatcgaaccaaaccgaaaatttaaaaataaccgaatgaaaactaaatcctataactgaaagaactgaaaccgaatcaaaatatttaatgtaaccaaaaatatccgaaatataattatattgtcaaaaatattaataatttctagattaaataattaaaaatacttaaaaatttatataaaatagtaaaaatactcgaaaataaccacaaatattcaaaaacaaccgaaatatcccaaaatattcaaagcaaaataaccgaatggataccaaattttaaaaccgaaaaaactggaacaaaaccaaaatcgaaccaaaatttcaaaaatcgaataaatactaaactttagaacaaaaaaaaacgataaccgaatgtatacgaaccaaagccgaattagataaccgaacgtccaggactactcttaatctttccgccacttatgatttgggctattactttgtttataatgagccttttcaagctcaagttcatgattgtccgtgagatgagaaactgacttgttggattcgaaaccctagctagtattggttaatacttaatacataaatgacctgcattgacatcatcatccaagaaaataaaaattgtatgcttgagatatttagttttcctagctaggttttctttattttagtaccgaatctttaggtgtgccacgttaatttagacccattttttcatacttaccaactgagtctagtttaatcatgactataatcgtataaaatgattcagtcgacgtcattgcgaacgtatataaaatcatccaaattgacgtcattccaaagaggtaagcatgcttatctaagagtccgagcatactaaacaagacgacattttatttgcactccaaatcaaattttgtattgcctaaagaaaaacaatcaaactcaagtttcttaaaattaatttcattcaaactaatcactttcaatatctcacatattattcatgccatttctatttgtctaaacatgatttaaaaaaaaaagtaaaatacaaagattactatgcaaaaactctataaaaaaaaattcaaatttcttatttatttgtgacatcaaattttcaaaataatttttttaattatcggttgatccggtcagtcgataaaaacataaactttcagcgaccgttaaaactttcctactaccgatttagagaaaatcttagcttgaaacgtaattgtaacctgccttcatgcaagtcgcaagatatgtcatcctaagttgtatatgttttctcaaaagatgtatttacttgagaaaatacgtttcaacgttgatggacaaccaattaagaatcaagcacctttcgtaatcaatttaggcttatcgtctaaggtatactgatttacgacagttgactagacttataaggaacaaaataatagaatagtttctaaacacttcacctaatcatagagactaagatggtaattcgtaaacgacaaagcctagtgacactgtccattgtaaaattccacatcatattagtattaaacatatacatgtagtttcctgaacacatgtagtatcaaacacacttcgtggcttcttcctcgaaacctgcggccgcgctatagttccggacttacccttaagataacttcgtatagcatacattatacgaagttatgggcccacgcgtgaagagcggttaccagagctggtcacctttgtccaccaagatggaactgtcttcggccagaatggccatctggattcagcaggcctagaaggccatttatcgctatcaactttgtatagaaaagttgggccgagctcggtacggccagaatggcccggaccgggttaccaagcggccgcacactgatagtttaaactgaaggcgggaaacgacaatctgatcatgagcggagaattaagggagtcacgttatgacccccgccgatgacgcgggacaagccgttttacgtttggaactgacagaaccgcaacgattgaaggagccactcagccgcgggtttctggagtttaatgagctaagcacatacgtcagaaaccattattgcgcgttcaaaagtcgcctaaggtcactatcagctagcaaatatttcttgtcaaaaatgctccactgacgttccataaattcccctcggtatccaattagagtctcatattcactcccatggcggccaatgcgggcggcggtggagcgggaggaggcagcggcagcggcagcgtggctgcgccggcggtgtgccgccccagcggctcgcggtggacgccgacgccggagcagatcaggatgctgaaggagctctactacggctgcggcatccggtcgcccagctcggagcagatccagcgcatcaccgccatgctgcggcagcacggcaagatcgagggcaagaacgtcttctactggttccagaaccacaaggcccgcgagcgccagaagcgccgcctcaccagcctcgacgtcaacgtgcccgccgccggcgcggccgacgccaccaccagccaactcggcgtcctctcgctgtcgtcgccgccgccttcaggcgcggcgcctccctcgcccaccctcggcttctacgccgccggcaatggcggcggatcggctgtgctgctggacacgagttccgactggggcagcagcggcgctgctatggccaccgagacatgcttcctgcaggactacatgggcgtgacggacacgggcagctcgtcgcagtggccacgcttctcgtcgtcggacacgataatggcggcggccgcggcgcgggcggcgacgacgcgggcgcccgagacgctccctctcttcccgacctgcggcgacgacggcggcagcggtagcagcagctacttgccgttctggggtgccgcgtccacaactgccggcgccacttcttccgttgcgatccaacagcaacaccagctgcaggagcagtacagcttttacagcaacagcaacagcacccagctggccggcaccggcaaccaagacgtatcggcaacagcagcagcagccgccgccctggagctgagcctcagctcatggtgctccccttaccctgctgcagggagtatgtgagagcaacgcgagctgccactgctcttcactgatgtctctggaatggaaggaggaggaagtgagaacagatcattcgacaaagcagcattagtccgttgatcggtggaagaccactcgtcagtgttgagttgaatgtttgatcaataaaatacggcaatgctgtaagggttgttttttatgccattgataatacactgtactgttcagttgttgaactctatttcttagccatgccaagtgcttttcttattttgaataacattacagcaaaaagttgaaagacaaaaaaaaaaacccccgaacagagtgctttgggtcccaagcttctttagactgtgttcggcgttccccctaaatttctccccctatatctcactcacttgtcacatcagcgttctctttccccctatatctccacgctctacagcagttccacctatatcaaacctctataccccaccacaacaatattatatactttcatcttcaactaactcatgtaccttccaatttttttctactaataattatttacgtgcacagaaacttagcaaggagagagagagcgggaatttaaatgctcggcgttaggcttttagtccgctaggtggctagaccgaggttaggacgctagttcactaggggcctagtggtgttttaagacgtcacggtcaccacgcgtggaccgaagcttgcatgcctgcagtgcagcgtgacccggtcgtgcccctctctagagataatgagcattgcatgtctaagttataaaaaattaccacatattttttttgtcacacttgtttgaagtgcagtttatctatctttatacatatatttaaactttactctacgaataatataatctatagtactacaataatatcagtgttttagagaatcatataaatgaacagttagacatggtctaaaggacaattgagtattttgacaacaggactctacagttttatctttttagtgtgcatgtgttctcctttttttttgcaaatagcttcacctatataatacttcatccattttattagtacatccatttagggtttagggttaatggtttttatagactaatttttttagtacatctattttattctattttagcctctaaattaagaaaactaaaactctattttagtttttttatttaataatttagatataaaatagaataaaataaagtgactaaaaattaaacaaataccctttaagaaattaaaaaaactaaggaaacatttttcttgtttcgagtagataatgccagcctgttaaacgccgtcgacgagtctaacggacaccaaccagcgaaccagcagcgtcgcgtcgggccaagcgaagcagacggcacggcatctctgtcgctgcctctggacccctctcgagagttccgctccaccgttggacttgctccgctgtcggcatccagaaattgcgtggcggagcggcagacgtgagccggcacggcaggcggcctcctcctcctctcacggcaccggcagctacgggggattcctttcccaccgctccttcgctttcccttcctcgcccgccgtaataaatagacaccccctccacaccctctttccccaacctcgtgttgttcggagcgcacacacacacaaccagatctcccccaaatccacccgtcggcacctccgcttcaaggtacgccgctcgtcctcccccccccccctctctaccttctctagatcggcgttccggtccatgcatggttagggcccggtagttctacttctgttcatgtttgtgttagatccgtgtttgtgttagatccgtgctgctagcgttcgtacacggatgcgacctgtacgtcagacacgttctgattgctaacttgccagtgtttctctttggggaatcctgggatggctctagccgttccgcagacgggatcgatttcatgattttttttgtttcgttgcatagggtttggtttgcccttttcctttatttcaatatatgccgtgcacttgtttgtcgggtcatcttttcatgcttttttttgtcttggttgtgatgatgtggtctggttgggcggtcgttctagatcggagtagaattctgtttcaaactacctggtggatttattaattttggatctgtatgtgtgtgccatacatattcatagttacgaattgaagatgatggatggaaatatcgatctaggataggtatacatgttgatgcgggttttactgatgcatatacagagatgctttttgttcgcttggttgtgatgatgtggtgtggttgggcggtcgttcattcgttctagatcggagtagaatactgtttcaaactacctggtgtatttattaattttggaactgtatgtgtgtgtcatacatcttcatagttacgagtttaagatggatggaaatatcgatctaggataggtatacatgttgatgtgggttttactgatgcatatacatgatggcatatgcagcatctattcatatgctctaaccttgagtacctatctattataataaacaagtatgttttataattattttgatcttgatatacttggatgatggcatatgcagcagctatatgtggatttttttagcactgccttcatacgctatttatttgcttggtactgtttcttttgtcgatgctcaccctgttgtttggtgttacttctgcaggtcgactttaacttagcctaggatccatggccactgtgaacaactggctcgctttctccctctccccgcaggagctgccgccctcccagacgacggactccacactcatctcggccgccaccgccgaccatgtctccggcgatgtctgcttcaacatcccccaagattggagcatgaggggatcagagctttcggcgctcgtcgcggagccgaagctggaggacttcctcggcggcatctccttctccgagcagcatcacaaggccaactgcaacatgatacccagcactagcagcacagtttgctacgcgagctcaggtgctagcaccggctaccatcaccagctgtaccaccagcccaccagctcagcgctccacttcgcggactccgtaatggtggcttcctcggccggtgtccacgacggcggtgccatgctcagcgcggccgccgctaacggtgtcgctggcgctgccagtgccaacggcggcggcatcgggctgtccatgattaagaactggctgcggagccaaccggcgcccatgcagccgagggtggcggcggctgagggcgcgcaggggctctctttgtccatgaacatggcggggacgacccaaggcgctgctggcatgccacttctcgctggagagcgcgcacgggcgcccgagagtgtatcgacgtcagcacagggtggagccgtcgtcgtcacggcgccgaaggaggatagcggtggcagcggtgttgccggcgctctagtagccgtgagcacggacacgggtggcagcggcggcgcgtcggctgacaacacggcaaggaagacggtggacacgttcgggcagcgcacgtcgatttaccgtggcgtgacaaggcatagatggactgggagatatgaggcacatctttgggataacagttgcagaagggaagggcaaactcgtaagggtcgtcaagtctatttaggtggctatgataaagaggagaaagctgctagggcttatgatcttgctgctctgaagtactggggtgccacaacaacaacaaattttccagtgagtaactacgaaaaggagctcgaggacatgaagcacatgacaaggcaggagtttgtagcgtctctgagaaggaagagcagtggtttctccagaggtgcatccatttacaggggagtgactaggcatcaccaacatggaagatggcaagcacggattggacgagttgcagggaacaaggatctttacttgggcaccttcagcacccaggaggaggcagcggaggcgtacgacatcgcggcgatcaagttccgcggcctcaacgccgtcaccaacttcgacatgagccgctacgacgtgaagagcatcctggacagcagcgccctccccatcggcagcgccgccaagcgcctcaaggaggccgaggccgcagcgtccgcgcagcaccaccacgccggcgtggtgagctacgacgtcggccgcatcgcctcgcagctcggcgacggcggagccctggcggcggcgtacggcgcgcactaccacggcgccgcctggccgaccatcgcgttccagccgggcgccgccagcacaggcctgtaccacccgtacgcgcagcagccaatgcgcggcggcgggtggtgcaagcaggagcaggaccacgcggtgatcgcggccgcgcacagcctgcaggacctccaccacctgaacctgggcgcggccggcgcgcacgactttttctcggcagggcagcaggccgccgccgctgcgatgcacggcctgggtagcatcgacagtgcgtcgctcgagcacagcaccggctccaactccgtcgtctacaacggcggggtcggcgacagcaacggcgccagcgccgtcggcggcagtggcggtggctacatgatgccgatgagcgctgccggagcaaccactacatcggcaatggtgagccacgagcaggtgcatgcacgggcctacgacgaagccaagcaggctgctcagatggggtacgagagctacctggtgaacgcggagaacaatggtggcggaaggatgtctgcatgggggactgtcgtgtctgcagccgcggcggcagcagcaagcagcaacgacaacatggccgccgacgtcgggcatggcggcgcgcagctcttcagtgtctggaacgacacttaagcgtacctagtggtacctgacatcttatagtctgcaacctctcgtgtctgaattcctatctttatcaagtgttattgcttccacgactataggacagctttcgtcgaaagcttttgctcatgtgatctcgaaggattcatctagtctgatttttcgtgacttgtatcggttttattggattcatccaacatatatcaataaaaaatgagttgtgtttcctttcttcctagttcagttaaaattatttccctcctgcgcttgtgctgtaattgtctgtgtacctgttgtttgtgactgtgttagttcccttggatatgatttcgtatttgatatgtacatggagatagcttagcttcattattggagtatgaagttagtatgacatagtcactctcctggaaaattgacactgcaaaccatatttttattctgaaccacaaatcctagtcagtccgctggcatatgccgtccgtttgctgaatccagaacgtgggtttggagatgtacggctgagatgcctctatgcgaaggggatttcgtggtgaaacgagatgggagtagagcaacgcccgtggaagatgcttcaaacttccacacttttgagcaacgatcggcagtagtaaggtagacgatttcaagatcaaagcatatgaagataaacaacatcaacaacaaaatttgttggggttctatagagagaaacagagctacatacatacactgttttgtatctaccatctgagatgatgaaaagatgaaaaactaaagaatgccccggcgccaacgccaggacacgccgcgcgcgcgtcacccgagccatctcttgacccagccggcgctgtatatttacacacgttgcagcatcgatcaccacctgttcgatcgcgtcgccgtcaccggcgcgccgcgacttattgaactagtctagggcgcggctaacaacctagcttagattgccttgtctaaacccttaggctaacgcgccacggtaacccggtccgggcctagaaggccccagagctggtcaccccatacgattggaagcttcaagtttgtacaaaaaagcaggctccggccagagttacccggaccgaagcttgcatgcctgcagtgcagcgtgacccggtcgtgcccctctctagagataatgagcattgcatgtctaagttataaaaaattaccacatattttttttgtcacacttgtttgaagtgcagtttatctatctttatacatatatttaaactttactctacgaataatataatctatagtactacaataatatcagtgttttagagaatcatataaatgaacagttagacatggtctaaaggacaattgagtattttgacaacaggactctacagttttatctttttagtgtgcatgtgttctcctttttttttgcaaatagcttcacctatataatacttcatccattttattagtacatccatttagggtttagggttaatggtttttatagactaatttttttagtacatctattttattctattttagcctctaaattaagaaaactaaaactctattttagtttttttatttaataatttagatataaaatagaataaaataaagtgactaaaaattaaacaaataccctttaagaaattaaaaaaactaaggaaacatttttcttgtttcgagtagataatgccagcctgttaaacgccgtcgacgagtctaacggacaccaaccagcgaaccagcagcgtcgcgtcgggccaagcgaagcagacggcacggcatctctgtcgctgcctctggacccctctcgagagttccgctccaccgttggacttgctccgctgtcggcatccagaaattgcgtggcggagcggcagacgtgagccggcacggcaggcggcctcctcctcctctcacggcaccggcagctacgggggattcctttcccaccgctccttcgctttcccttcctcgcccgccgtaataaatagacaccccctccacaccctctttccccaacctcgtgttgttcggagcgcacacacacacaaccagatctcccccaaatccacccgtcggcacctccgcttcaaggtacgccgctcgtcctcccccccccccctctctaccttctctagatcggcgttccggtccatgcatggttagggcccggtagttctacttctgttcatgtttgtgttagatccgtgtttgtgttagatccgtgctgctagcgttcgtacacggatgcgacctgtacgtcagacacgttctgattgctaacttgccagtgtttctctttggggaatcctgggatggctctagccgttccgcagacgggatcgatttcatgattttttttgtttcgttgcatagggtttggtttgcccttttcctttatttcaatatatgccgtgcacttgtttgtcgggtcatcttttcatgcttttttttgtcttggttgtgatgatgtggtctggttgggcggtcgttctagatcggagtagaattctgtttcaaactacctggtggatttattaattttggatctgtatgtgtgtgccatacatattcatagttacgaattgaagatgatggatggaaatatcgatctaggataggtatacatgttgatgcgggttttactgatgcatatacagagatgctttttgttcgcttggttgtgatgatgtggtgtggttgggcggtcgttcattcgttctagatcggagtagaatactgtttcaaactacctggtgtatttattaattttggaactgtatgtgtgtgtcatacatcttcatagttacgagtttaagatggatggaaatatcgatctaggataggtatacatgttgatgtgggttttactgatgcatatacatgatggcatatgcagcatctattcatatgctctaaccttgagtacctatctattataataaacaagtatgttttataattattttgatcttgatatacttggatgatggcatatgcagcagctatatgtggatttttttagccctgccttcatacgctatttatttgcttggtactgtttcttttgtcgatgctcaccctgttgtttggtgttacttctgcaggtcgactttaacttagcctaggatccatggtgagcgccctgagcagggtgatcgagaacccgaccgacccgccggtgaagcaggagctggacaagagcgaccagcaccagccggaccaggaccagccgaggaggaggcactacaggggcgtgaggcagaggccgtggggcaagtgggccgccgagatcagggacccgaagaaggccgccagggtgtggctgggcaccttcgagaccgccgaggaggccgccctggcctacgacagggccgccctgaagttcaagggcaccaaggccaagctgaacttcccggagagggtgcagggcccgaccaccaccaccaccatcagccacgccccgaggggcgtgagcgagagcatgaacagcccgccgccgaggccgggcccgccgagcaccaccaccaccagctggccgatgacctacaaccaggacatcctgcagtacgcccagctgctgaccagcaacaacgaggtggacctgagctactacaccagcaccctgttcagccagccgttcagcaccccgagcagcagcagcagcagcagccagcagacccagcagcagcagctgcagcagcagcagcagcagagggaggaggaggagaagaactacggctacaactactacaactacccgagggagtagggtaccgttaacagatctactaactatctatactgtaataatgttgtatagccgccggatagctagctagtttagtcattcagcggcgatgggtaataataaagtgtcatccatccatcaccatgcgtggcaacgtgagcaatgacctgattgaacaaattgaaatgaaaagaagaaatatgttatatgtcaacgagatttcctcataatgccactgacgacgtgtgtccaagaaatgtatcagtgatacgtatattcacaatttttttatgacttatactcacaatttgtttttttactacttatactcacaatttgttgtgcgtaccataacaatttcgatcgaatatatatcagaaagttgacgaaagtaagctcactcaaaaagttaaatgggctgcggaagctgcgtcaggcccaagttttggctattctatccggtatccacgattttgatggctgagggacatatgttcgcttaagcttcggtccgggcctagaaggccgatctcccgggcacccagctttcttgtacaaagtggccgttaacggatcggccagaatggcccggaccgggttaccgaattcgagctcggtaccctggttcacaaactcaatacaacacacagtggagtagggtattacgctccggcggcccgaaccactctaaatccttgtgtcctcgtgtgctcttccaccattaatgactgtaattgcagggacacgaagagttgtagcgcttttgccaacaagatccgctatatgctagtagagtggaacctgcacagcaacaagcatccaataatctgagaataagaattatgtgtggtgatggttctcatctctgcaactcgccattttcgcgagagaaccaaatccaagttggtgaagatcatgatttgggctcatgggctggcatagtagctattacctttgcaattgtggttcgaatctatccgatattctccttttcagggagagctaatgcttatgcttattgggtattttggtttgacactgcttcacgcccaaaaaaaggcaactatgtctgagttggatatggcccaaaaaaaggcagctatgtctgagttggatatggaagtcttctttcgtttagggtgaagtaagaccaagctcatgagcttattatcttaggtcggaacaaattagttgataggcatggcacatttatcaaattataatgattttaacagaaaagcaacacctctttttcagcagcaccagctttgcaagctgcaattgacactccaagcatagtatttgctccaaactcagcctgcatttcgcacaatatcatatctatttccatttggataaaatatattttccagaaatatgggaacagaatcaagatacagaaaaaagttgtggtagtagtggtaagtggaaacacaagtacagtgaaaagatagcattatttctgaacagtcaaattaaccgaaataagtagtatcacatactgcccctaaattgactacacccaatgtaaagaattgcttgagcatattgagccatcagttgtttgtttgtgtaacggatttgacaatgcagagttcaggagcaaaaaaccgcaaaggagagaaagagggaaaggatctcctagtatcccaccttgtggcgcgccctgtcaagtgcatgatggcctggtcgatctgcgtctgctgctgcggttccatcccaacgagtgcctccgacaccttgtcgttgatcacccgcaccgcgtaggcgacccccctggcgaggaacttccgcctctcggaggccccggccgcgtcggcggcggcgccctcgagcgcgcccacgctagccgtagatgctcggtgcacggccttgttggtgtgcaactcgacctcaacggccggtgcgctacgcccgtcaaggatctggcgcgcccgcaccctcgtgatcacggtgggcgcctcccgcctcatgtggccgacgatgaaaagcgccgggttaggggccttggcgcgcaccgccgtattcagggcctcctcgctcttgcgcgagagcaggtgcttccccaggtactcctgcactgacaaggctgccacagcggtggaatttgtcctcacgacttcgccacgtcgtcctcacctccctggcttcccacgactccgccgtatcgaggtgctcggtgggtcgtcttaatccgaagtccgaactaggaagacgagacagagaggtctgaggaatgggcctcgtttgatgttgagctgaattatttttccagcataagcccaggtcttggtccatgaacaaaattactagaaacccagcccagtactacgatctaaaagagggactgccactggatagctctctctagcattctccacgctccaatacagcggcgtcgtgtctatccgggtctatccgcgaacacgtgagaactctccagaaactgctttctcctccacttcatctctctcgctttccctctataaaaagaccccttctaggaattgagggagacagcaagcaccaagcagcgatccgaagctcaatcaattcactcaaacctcttccccaaatcttcgattagatcttcgttgacaagaagactagaaccgaacctgacatgtccaacctgctcacggttcaccagaaccttccggctcttccagtggacgcgacgtccgatgaagtcaggaagaacctcatggacatgttccgcgacaggcaagcgttcagcgagcacacctggaagatgctgctctccgtctgccgctcctgggctgcatggtgcaagctgaacaacaggaagtggttccccgctgagcccgaggacgtgagggattaccttctgtacctgcaagcgcgaggtttgtttctgcttctacctttgatatatatataataattatcattaattagtagtaatataatatttcaaatatttttttcaaaataaaagaatgtagtatatagcaattgcttttctgtagtttataagtgtgtatattttaatttataacttttctaatatatgaccaaaacatggtgatgcctaggtctggcagtgaagaccatccagcaacaccttggacaactgaacatgcttcacaggcgctccggcctcccgcgccccagcgactcgaacgccgtgagcctcgtcatgcgccgcatcaggaaggaaaacgtcgatgccggcgaaagggcaaagcaggccctcgcgttcgagaggaccgatttcgaccaggtccgcagcctgatggagaacagcgacaggtgccaggacattaggaacctggcgttcctcggaattgcatacaacacgctcctcaggatcgcggaaattgcccgcattcgcgtgaaggacattagccgcaccgacggcggcaggatgcttatccacattggcaggaccaagacgctcgtttccaccgcaggcgtcgaaaaggccctcagcctcggagtgaccaagctcgtcgaacgctggatctccgtgtccggcgtcgcggacgacccaaacaactacctcttctgccgcgtccgcaagaacggggtggctgcccctagcgccaccagccaactcagcacgagggccttggaaggtattttcgaggccacccaccgcctgatctacggcgcgaaggatgacagcggtcaacgctacctcgcatggtccgggcactccgcccgcgttggagctgctagggacatggcccgcgccggtgtttccatccccgaaatcatgcaggcgggtggatggacgaacgtgaacattgtcatgaactacattcgcaaccttgacagcgagacgggcgcaatggttcgcctcctggaagatggtgactgaggtacccaacctagacttgtccatcttctggattggccaacttaattaatgtatgaaataaaaggatgcacacatagtgacatgctaatcactataatgtgggcatcaaagttgtgtgttatgtgtaattactagttatctgaataaaagagaaagagatcatccatatttcttatcctaaatgaatgtcacgtgtctttataattctttgatgaaccagatgcatttcattaaccaaatccatatacatataaatattaatcatatataattaatatcaattgggttagcaaaacaaatctagtctaggtgtgttttgcgatccgatatcgaattggccacggtaccagctgctgctgttctagggttcacaagtctgcctatttgtcttccccaatggagctatggttgtctggtctggtccttggtcgtgtcccgtttcattgtgtactatttacctgtaatgtgtatccttaagtctggtttgatggtgtctgaaacgttttgctgtggtagagcagcatggaagaactataatgaataagtgatccctaatcattgtgtccaaattttgcttctgctatacccttttgtgctgtttcttatgttttgcttaaaaatttgatctgacaaacaaatttgtctaaattatgctcttgttctgactgtgtactgtacacatttgtattgctaccggtttggcacatagttttctctttgattgcagatcaaacccttctgattgcagattgcttggctatggctgatgtgctcactgttcttctttagcttgtatattgctgatggtggcttggctacggctgaaaaagttgctgctgcgccgacttggcaactgttgctccagtaatgctttgtcctctcttcctagccgccgacttggcacttggcagctgttgctcctgtaatgcgttgttatctcttatctcttgagatgtactatgattttgaggctgtttgacttgtgccagattgccagtgctgatgctatattatctcaggtttttatgctagtatatgttttactgtgtgctgcctgtgtcgagttacgtaatctattgaaccgctatgcgtgttgatgccctgttgttgcttgccagattgatgcccctgttgcttgcagcttgcaagctgtagtgaaatcctaaaattccaaaccaaatctattctgaacttttgaagatctgtgatgtccggaagaaaagattcaaacagataaacgggactctccagaatctataaaataaatgatcgacaaacgctttgctttggtaggcttcaagcttggtcacccggtccgggcctagaaggccagcttcggccgccccgggcaactttattatacaaagttgatagataaatcagatatctggttcctaaggacccggcggaccgattaaactgattcggtccgacgcgttacctaataacttcgtatagcatacattatacgaagttattagctaactaactagtaagcttaagccatgggtcgacggatccgttaactagcgtggcatttggcaccgccgcacactatgcgagctaggagtgctagtttacagatgaaactatgaaaccaagaaaacacaattgtccgtagctagcgcgtggcgtcgtgtcaagcttcacacagtatcttcgttcttcactataaatcgcgcctgttgttcgtgagacccaccaccgtggataacagtcccctaataataagcgatcaacagcactgctgatggctgaacaccgaggcgccgccgcgcgtaaccatccgccggagcagcccgtcgtgccggcgaacgacgccttccccgaccgcgcccagcagctctgcctcgacgccgggcgcgcgctcgcgatgtgcggcgtgctcgtcgccgtccctcccgcattttacgcgtcgacgtcgcggacgacaccgcacttgccttcgtcggcttcgtcctctggatcatcggtgcgtggctgtgcctcctggcgctcacgcccttggctccacgggcggtgagggcgggcggggccgccgccagcaccttgctgatcaggtgcctgtccctttcatgaactactagcgcccgcgcccgcggccgccgggcacaagagaacacatcgatgttcgctgcgtacgtcagcaataaggcactctttgtcagtagtcgagtgcatatgttgggtgtttgccctgggagatttcaagtgttgtggccattatcccgcaggataaaaaatcggcggcttttggattgatacggaaaataacgatgtttcatgctcgtgttgtgtgtgtgacatcttgtcagccaagtttttaaccgttgctactccccctctgtgggctcagtgtgtggaccggaatacgtcgtacataggccgtagcctaagcccaatatgccgtttttcaggttggcctgtgtgacgacaagcgggtctcaaaagcccatcacgcaactggcctgcaattattggaggagagcgcgtcgagttggttccagaggctgcgtggtggggccggactctgcgacgacctctcgttcgcgtccgatttggttgccgtgagccgtgacgtaacgcctccttccgttcctccctatataagttccacccccgggtccggtttccccaagccccagtgacccccgatcccgatcgcgaaatctccgcacccgccggcaagggaccgaagcaagcctctctcccgaccgtcgcatcaaggtacgcgtccgctcgatctgtcctcttccttctcgatttgacttgctgtggtgcccgatcacgggatcagaatcgcaccagtgtagatttcgcatgttctaagatgtgttagtttccaggctaatccagttctcttgacgcccgatccgatcgagctccgtgtttatttcagcctaatcgtagtattcccctaaaatttcctcattagggggttcgcaagattgttggtcgacaggttcacttatgctcgatcgcttacttttagtcgattcatgctgcgtactattgttgccccccgtggttttatcttttctcgtgtgaaatccagtagatatagtagatatcgtagcattaggttttaattcaatcgattgattattgtatcatcaaaattgagaagttcgaatcatgcctatcatgctgcctcaaccgaaatcctgtatattgaagtttcaattcaattgattgatcattcattagattcaaccaaaatctagaaggttagatgacgcatgtcatgctgcctgcgtagtttacctttgatctgtttatgattaccttatcagtaggatatttgtgattttgggaagtagcactaactgattcatgctgacatgatgttccctttcagattatactgttgagtcctatctaattgatgctttgtatgctatatgaatacgtcatggtaaattagcagttaattagcatattagcaattgggcgtacctcatcaggattgctcttgtagatgtgtgtggtgatgtttcttgttcaattcatgttctgctttaaaagtatgtgttctctgtttgttaattaagattcatggttataatgatttggacctaattaatcagggttgcccttttagatgcgtggttacttgttgagttcatttttttcctgctatagttgtatgcgtttgttcattcatggttagatttgatttgtttcttctctattccatgccttccatatacttcaattgtagcttaacatgagatttctgtatatgcaggtcgaccgccggggatccacacgacaccatggcccagtccaagcacggcctgaccaaggagatgaccatgaagtaccgcatggagggctgcgtggacggccacaagttcgtgatcaccggcgagggcatcggctaccccttcaagggcaagcaggccatcaacctgtgcgtggtggagggcggccccttgcccttcgccgaggacatcttgtccgccgccttcatgtacggcaaccgcgtgttcaccgagtacccccaggacatcgtcgactacttcaagaactcctgccccgccggctacacctgggaccgctccttcctgttcgaggacggcgccgtgtgcatctgcaacgccgacatcaccgtgagcgtggaggagaactgcatgtaccacgagtccaagttctacggcgtgaacttccccgccgacggccccgtgatgaagaagatgaccgacaactgggagccctcctgcgagaagatcatccccgtgcccaagcagggcatcttgaagggcgacgtgagcatgtacctgctgctgaaggacggtggccgcttgcgctgccagttcgacaccgtgtacaaggccaagtccgtgccccgcaagatgcccgactggcacttcatccagcacaagctgacccgcgaggaccgcagcgacgccaagaaccagaagtggcacctgaccgagcacgccatcgcctccggctccgccttgccctccggactcagatctcgatagagtcaacctagacttgtccatcttctggattggccaacttaattaatgtatgaaataaaaggatgcacacatagtgacatgctaatcactataatgtgggcatcaaagttgtgtgttatgtgtaattactagttatctgaataaaagagaaagagatcatccatatttcttatcctaaatgaatgtcacgtgtctttataattctttgatgaaccagatgcatttcattaaccaaatccatatacatataaatattaatcatatataattaatatcaattgggttagcaaaacaaatctagtctaggtgtgttttgcgaattgcggcgcccttactttaacgcctctaaccaacacccctttatctttataaggaacaataaacagaatttgccccactgttctaaatcacctaataatatccccagctaaaaacaataaaggtttcctagaattaagacaagcatgactgttcctccaggagggtttggaacattgttgcagtcttgcagatacgggcgaagggtgagaaacagagcggagggctggaggtgacctcggtagtcgacgccggagttgagcttgacaacgacggggcggcccctgatggacttgaggaagtccgatggcgtcttcaccgtcccgccggcgcccgaggcgggcctgtcgctgccgccgccgccgctgctcatcttgcgcgctgtgcccccggcggtgtccctgtgttgcggatcgcgggtgggccaggtggatgcgagggcgacccgtttggactccggccggagccgccggatccctggtcggtgtcagtgccgtttactctgggccccacgtgtcagtaccgtctgtagatgacaacaacccgtcgtccacagtcatgtccaaaatatcctttcttcttttttttcgattcggatatctatcttccttttttttttccaaaaatcttcttgacgcaccagcgcgcacgtttgtggtaaacgccgacacgtcggtcccacgtcgatagaccccacccaccagtgagtagcgtgtacgtattcgggggtgacggacgtgtcgccgtcgtcttgctagtcccattcccatctgagccacacatctctgaacaaaaaaaaggagggaggcctccacgcacatccccctccgtgccacccgccccaaaccctcgcgccgcctccgagacagccgccgcaaccatggccaccgccgccgccgcgtctaccgcgctcactggcgccactaccgctgcgcccaaggcgaggcgccgggcgcacctcctggccacccgccgcgccctcgccgcgcccatcaggtgctcagcggcgtcacccgccatgccgatggctcccccggccaccccgctccggccgtggggccccaccgagccccgcaagggtgctgacatcctcgtcgagtccctcgagcgctgcggcgtccgcgacgtcttcgcctaccccggcggcgcgtccatggagatccaccaggcactcacccgctcccccgtcatcgccaaccacctcttccgccacgagcaaggggaggcctttgccgcctccggctacgcgcgctcctcgggccgcgtcggcgtctgcatcgccacctccggccccggcgccaccaacctagtctccgcgctcgccgacgcgctgctcgattccgtccccatggtcgccatcacgggacaggtggcgcgacgcatgattggcaccgacgccttccaggagacgcccatcgtcgaggtcacccgctccatcaccaagcacaactacctggtcctcgacgtcgacgacatcccccgcgtcgtgcaggaggctttcttcctcgcctcctctggtcgaccagggccggtgcttgtcgacatccccaaggacatccagcagcagatggcggtgcctgtctgggacaagcccatgagtctgcctgggtacattgcgcgccttcccaagccccctgcgactgagttgcttgagcaggtgctgcgtcttgttggtgaatcgcggcgccctgttctttatgtgggcggtggctgcgcagcatctggtgaggagttgcgacgctttgtggagctgactggaatcccggtcacaactactcttatgggcctcggcaacttccccagcgacgacccactgtctctgcgcatgctaggtatgcatgggacggtgtatgcaaattatgcagtggataaggccgatctgttgcttgcacttggtgtgcggtttgatgatcgcgtgacagggaagattgaggcttttgcaagcagggctaagattgtgcacgttgatattgatccggctgagattggcaagaacaagcagccacatgtgtccatctgtgcagatgttaagcttgctttgcagggcatgaatgctcttcttgaaggaagcacatcaaagaagagctttgactttggctcatggaacgatgagttggatcagcagaagagggaattcccccttgggtataaaacatctaatgaggagatccagccacaatatgctattcaggttcttgatgagctgacgaaaggcgaggccatcatcggcacaggtgttgggcagcaccagatgtgggcggcacagtactacacttacaagcggccaaggcagtggttgtcttcagctggtcttggggctatgggatttggtttgccggctgctgctggtgcttctgtggcaaacccaggtgtcactgttgttgacatcgatggagatggtagctttctcatgaacgttcaggagctagctatgatccgaattgagaacctcccagtgaaggtctttgtgctaaacaaccagcacctggggatggtggtgcagttggaggacaggttctataaggccaacagagcgcacacatacttgggaaacccagagaatgaaagtgagatatatccagatttcgtgacgatcgccaaagggttcaacattccagcggtccgtgtgacaaagaagaacgaagtccgcgcagcgataaagaagatgctcgagactccagggccgtacctcttggatataatcgtcccacaccaggagcatgtgttgcctatgatccctagtggtggggctttcaaggatatgatcctggatggtgatggcaggactgtgtactgactagctagtcagttaacagatctgccagatcctcggtgtacaaataacccgtcttatcctatgagacgggccggcgtcagtgtgttctggaggaatttttatgtcagagcctttttctttgtgtgcttgatgtagatgccaagggaagcttattggctgttgaagcttgatgcaaaataaattatggaactctgttttttgtttatctaataataactagcaaatatgcttccattgcattgaaactaacagccttttgtgtttccaagttttattttgtgacaatgtcatctatttcaattagttgtggaatcggaaacttgcaggactaacttggaaactccaatccctcagcatcctggactttttcctggtgtaatccatgtagatattattttaatcatcattttagttctggaggtttttccatctccggttttgctcccctttcttcaaaaaaaaaaaaaaaatgccgtaggcgccgcaacgcccacctgttgttcaaactcatgggcacgagtggctcgaagattttatacaacaattgctgtagtttcaccgttgctggtgaagaagcatttttttaaaaaaatatagtggtattcattttaattagtttagttgtgcagcgagcaaaatttggacatgctctgctcggaatctgatcgacctagacacagattagcagcagtagctttgtcatctgttccaagagttgcgatctgatagaagaaaaaaaaaccttcccttcaatgtaaaaccgaaactaacaagaaagaagcacagtgccgtttaggcaagtatggagtacgtattaagcatgtagaaggccatgcatgaaccactaacaagaaagaagcgcagtgccattcaggcaagcataagcatgtagattggcatgcatgaacaactaacagtagatcgtctctggtctgattagaagttttttgggaagccaagaaatcatgtacaactggttccatctcaaattccgtggcaaaaagaggcctaagcaacatacctcgagtagatcacattcaagcttggtcacccggtccgtcaatattctgattccgatgacttcgtaggttcctagctcaagccgctcgtgtccaagcgtcacttacgattagctaatgattacggcatctaggaccgactagtggcgcgccgactagctagctaaggtaccgagctcgaattcattccgattaatcgtggcctcttgctcttcaggatgaagagctatgtttaaacgtgcaagcgctactagacaattcagtacattaaaaacgtccgcaatgtgttattaagttgtctaagcgtcaatttgtttacaccacaatatatcctgcca

SEQ ID NO: 57 - DNA, 25493 bp, synthetic construct
  misc_feature 1..25493: note = PHP95893
  source 1..25493: mol_type = other DNA
gtttacccgccaatatatcctgtcaaacactgatagtttaaactgaaggcgggaaacgacaatctgatcatgagcggagaattaagggagtcacgttatgacccccgccgatgacgcgggacaagccgttttacgtttggaactgacagaaccgcaacgttgaaggagccactcagcaagctggtacgattgtaatacgactcactatagggcgaattgagcgctgtttaaacgctcttcaactggaagagcggttacgctgtttaaacgctcttcaactggaagagcggttactaccggttcactagctagctgctaatcgagctagttaccctatgaggtgacatgaagcgctcacggttactatgacggttagcttcacgactgttggtggcagtagcgtacgacttagctatagttccggacttacccttaagcgatttaaatctgcggttaccgaattcgagctcggtacctagtacccttgtacttttggtttcacctgcatagagaaaacccacaagaatatgacagtctgatttgtcagtctcattctcaagcaacatttctctatccgttactttcatggtgaataacacaatccatcatcaatactttgtgttactcagaaactgaaagttattccgagtcttgcatatctttggacctactcgtttttctaccattattgctgattgttaagctctcgctacttgaatcggcattgttggagtgggaaggttcaaaaaattggagttatgactagttgtctctttctatgtacgatggagaaaatgaataaacaactgagaaaatggctcttgtttagttgatgatgctcttaagctttccactggttgccatatatgatttgggcatttcactttgatcttaatgggccttgtaaagcccaagactcatgattatctttagttgatgctcttaattaggtgtgggcaaataattcaaactgtatgtacccgaccaaaaccaaagcaaaaataatcgaaccaaaccgaaaatttaaaaataaccgaatgaaaactaaatcctataactgaaagaactgaaaccgaatcaaaatatttaatgtaaccaaaaatatccgaaatataattatattgtcaaaaatattaataatttctagattaaataattaaaaatacttaaaaatttatataaaatagtaaaaatactcgaaaataaccacaaatattcaaaaacaaccgaaatatcccaaaatattcaaagcaaaataaccgaatggataccaaattttaaaaccgaaaaaactggaacaaaaccaaaatcgaaccaaaatttcaaaaatcgaataaatactaaactttagaacaaaaaaaaacgataaccgaatgtatacgaaccaaagccgaattagataaccgaacgtccaggactactcttaatctttccgccacttatgatttgggctattactttgtttataatgagccttttcaagctcaagttcatgattgtccgtgagatgagaaactgacttgttggattcgaaaccctagctagtattggttaatacttaatacataaatgacctgcattgacatcatcatccaagaaaataaaaattgtatgcttgagatatttagttttcctagctaggttttctttattttagtaccgaatctttaggtgtgccacgttaatttagacccattttttcatacttaccaactgagtctagtttaatcatgactataatcgtataaaatgattcagtcgacgtcattgcgaacgtatataaaatcatccaaattgacgtcattccaaagaggtaagcatgcttatctaagagtccgagcatactaaacaagacgacattttatttgcactccaaatcaaattttgtattgcctaaagaaaaacaatcaaactcaagtttcttaaaattaatttcattcaaactaatcactttcaatatctcacatattattcatgccatttctatttgtctaaacatgatttaaaaaaaaaagtaaaatacaaagattactatgcaaaaactctataaaaaaaaattcaaatttcttatttatttgtgacatcaaattttcaaaataatttttttaattatcggttgatccggtcagtcgataaaaacataaactttcagcgaccgttaaaactttcctactaccgatttagagaaaatcttagcttgaaacgtaattgtaacctgccttcatgcaagtcgcaagatatgtcatcctaagttgtatatgttttctcaaaagatgtatttacttgagaaaatacgtttcaacgttgatggacaaccaattaagaatcaagcacctttcgtaatcaatttaggcttatcgtctaaggtatactgatttacgacagttgactagacttataaggaacaaaataatagaatagtttctaaacacttcacctaatcatagagactaagatggtaattcgtaaacgacaaagcctagtgacactgtccattgtaaaattccacatcatattagtattaaacatatacatgtagtttcctgaacacatgtagtatcaaacacacttcgtggcttcttcctcgaaacctgcggccgcgctatagttccggacttacccttaagataacttcgtatagcatacattatacgaagttatgggcccacgcgtgaagagcggttaccagagctggtcacctttgtccaccaagatggaactgtcttcggccagaatggccatctggattcagcaggcctagaaggccatttatcgctatcaactttgtatagaaaagttgggccgagctcggtacggccagaatggcccggaccgggttaccaagcggccgcacactgatagtttaaactgaaggcgggaaacgacaatctgatcatgagcggagaattaagggagtcacgttatgacccccgccgatgacgcgggacaagccgttttacgtttggaactgacagaaccgcaacgattgaaggagccactcagccgcgggtttctggagtttaatgagctaagcacatacgtcagaaaccattattgcgcgttcaaaagtcgcctaaggtcactatcagctagcaaatatttcttgtcaaaaatgctccactgacgttccataaattcccctcggtatccaattagagtctcatattcactcccatggcggccaatgcgggcggcggtggagcgggaggaggcagcggcagcggcagcgtggctgcgccggcggtgtgccgccccagcggctcgcggtggacgccgacgccggagcagatcaggatgctgaaggagctctactacggctgcggcatccggtcgcccagctcggagcagatccagcgcatcaccgccatgctgcggcagcacggcaagatcgagggcaagaacgtcttctactggttccagaaccacaaggcccgcgagcgccagaagcgccgcctcaccagcctcgacgtcaacgtgcccgccgccggcgcggccgacgccaccaccagccaactcggcgtcctctcgctgtcgtcgccgccgccttcaggcgcggcgcctccctcgcccaccctcggcttctacgccgccggcaatggcggcggatcggctgtgctgctggacacgagttccgactggggcagcagcggcgctgctatggccaccgagacatgcttcctgcaggactacatgggcgtgacggacacgggcagctcgtcgcagtggccacgcttctcgtcgtcggacacgataatggcggcggccgcggcgcgggcggcgacgacgcgggcgcccgagacgctccctctcttcccgacctgcggcgacgacggcggcagcggtagcagcagctacttgccgttctggggtgccgcgtccacaactgccggcgccacttcttccgttgcgatccaacagcaacaccagctgcaggagcagtacagcttttacagcaacagcaacagcacccagctggccggcaccggcaaccaagacgtatcggcaacagcagcagcagccgccgccctggagctgagcctcagctcatggtgctccccttaccctgctgcagggagtatgtgagagcaacgcgagctgccactgctcttcactgatgtctctggaatggaaggaggaggaagtgagaacagatcattcgacaaagcagcattagtccgttgatcggtggaagaccactcgtcagtgttgagttgaatgtttgatcaataaaatacggcaatgctgtaagggttgttttttatgccattgataatacactgtactgttcagttgttgaactctatttcttagccatgccaagtgcttttcttattttgaataacattacagcaaaaagttgaaagacaaaaaaaaaaacccccgaacagagtgctttgggtcccaagcttctttagactgtgttcggcgttccccctaaatttctccccctatatctcactcacttgtcacatcagcgttctctttccccctatatctccacgctctacagcagttccacctatatcaaacctctataccccaccacaacaatattatatactttcatcttcaactaactcatgtaccttccaatttttttctactaataattatttacgtgcacagaaacttagcaaggagagagagagcgggaatttaaatgctcggcgttaggcttttagtccgctaggtggctagaccgaggttaggacgctagttcactaggggcctagtggtgttttaagacgtcacggtcaccacgcgtggaccgaagcttgcatgcctgcagtgcagcgtgacccggtcgtgcccctctctagagataatgagcattgcatgtctaagttataaaaaattaccacatattttttttgtcacacttgtttgaagtgcagtttatctatctttatacatatatttaaactttactctacgaataatataatctatagtactacaataatatcagtgttttagagaatcatataaatgaacagttagacatggtctaaaggacaattgagtattttgacaacaggactctacagttttatctttttagtgtgcatgtgttctcctttttttttgcaaatagcttcacctatataatacttcatccattttattagtacatccatttagggtttagggttaatggtttttatagactaatttttttagtacatctattttattctattttagcctctaaattaagaaaactaaaactctattttagtttttttatttaataatttagatataaaatagaataaaataaagtgactaaaaattaaacaaataccctttaagaaattaaaaaaactaaggaaacatttttcttgtttcgagtagataatgccagcctgttaaacgccgtcgacgagtctaacggacaccaaccagcgaaccagcagcgtcgcgtcgggccaagcgaagcagacggcacggcatctctgtcgctgcctctggacccctctcgagagttccgctccaccgttggacttgctccgctgtcggcatccagaaattgcgtggcggagcggcagacgtgagccggcacggcaggcggcctcctcctcctctcacggcaccggcagctacgggggattcctttcccaccgctccttcgctttcccttcctcgcccgccgtaataaatagacaccccctccacaccctctttccccaacctcgtgttgttcggagcgcacacacacacaaccagatctcccccaaatccacccgtcggcacctccgcttcaaggtacgccgctcgtcctcccccccccccctctctaccttctctagatcggcgttccggtccatgcatggttagggcccggtagttctacttctgttcatgtttgtgttagatccgtgtttgtgttagatccgtgctgctagcgttcgtacacggatgcgacctgtacgtcagacacgttctgattgctaacttgccagtgtttctctttggggaatcctgggatggctctagccgttccgcagacgggatcgatttcatgattttttttgtttcgttgcatagggtttggtttgcccttttcctttatttcaatatatgccgtgcacttgtttgtcgggtcatcttttcatgcttttttttgtcttggttgtgatgatgtggtctggttgggcggtcgttctagatcggagtagaattctgtttcaaactacctggtggatttattaattttggatctgtatgtgtgtgccatacatattcatagttacgaattgaagatgatggatggaaatatcgatctaggataggtatacatgttgatgcgggttttactgatgcatatacagagatgctttttgttcgcttggttgtgatgatgtggtgtggttgggcggtcgttcattcgttctagatcggagtagaatactgtttcaaactacctggtgtatttattaattttggaactgtatgtgtgtgtcatacatcttcatagttacgagtttaagatggatggaaatatcgatctaggataggtatacatgttgatgtgggttttactgatgcatatacatgatggcatatgcagcatctattcatatgctctaaccttgagtacctatctattataataaacaagtatgttttataattattttgatcttgatatacttggatgatggcatatgcagcagctatatgtggatttttttagcactgccttcatacgctatttatttgcttggtactgtttcttttgtcgatgctcaccctgttgtttggtgttacttctgcaggtcgactttaacttagcctaggatccatggccactgtgaacaactggctcgctttctccctctccccgcaggagctgccgccctcccagacgacggactccacactcatctcggccgccaccgccgaccatgtctccggcgatgtctgcttcaacatcccccaagattggagcatgaggggatcagagctttcggcgctcgtcgcggagccgaagctggaggacttcctcggcggcatctccttctccgagcagcatcacaaggccaactgcaacatgatacccagcactagcagcacagtttgctacgcgagctcaggtgctagcaccggctaccatcaccagctgtaccaccagcccaccagctcagcgctccacttcgcggactccgtaatggtggcttcctcggccggtgtccacgacggcggtgccatgctcagcgcggccgccgctaacggtgtcgctggcgctgccagtgccaacggcggcggcatcgggctgtccatgattaagaactggctgcggagccaaccggcgcccatgcagccgagggtggcggcggctgagggcgcgcaggggctctctttgtccatgaacatggcggggacgacccaaggcgctgctggcatgccacttctcgctggagagcgcgcacgggcgcccgagagtgtatcgacgtcagcacagggtggagccgtcgtcgtcacggcgccgaaggaggatagcggtggcagcggtgttgccggcgctctagtagccgtgagcacggacacgggtggcagcggcggcgcgtcggctgacaacacggcaaggaagacggtggacacgttcgggcagcgcacgtcgatttaccgtggcgtgacaaggcatagatggactgggagatatgaggcacatctttgggataacagttgcagaagggaagggcaaactcgtaagggtcgtcaagtctatttaggtggctatgataaagaggagaaagctgctagggcttatgatcttgctgctctgaagtactggggtgccacaacaacaacaaattttccagtgagtaactacgaaaaggagctcgaggacatgaagcacatgacaaggcaggagtttgtagcgtctctgagaaggaagagcagtggtttctccagaggtgcatccatttacaggggagtgactaggcatcaccaacatggaagatggcaagcacggattggacgagttgcagggaacaaggatctttacttgggcaccttcagcacccaggaggaggcagcggaggcgtacgacatcgcggcgatcaagttccgcggcctcaacgccgtcaccaacttcgacatgagccgctacgacgtgaagagcatcctggacagcagcgccctccccatcggcagcgccgccaagcgcctcaaggaggccgaggccgcagcgtccgcgcagcaccaccacgccggcgtggtgagctacgacgtcggccgcatcgcctcgcagctcggcgacggcggagccctggcggcggcgtacggcgcgcactaccacggcgccgcctggccgaccatcgcgttccagccgggcgccgccagcacaggcctgtaccacccgtacgcgcagcagccaatgcgcggcggcgggtggtgcaagcaggagcaggaccacgcggtgatcgcggccgcgcacagcctgcaggacctccaccacctgaacctgggcgcggccggcgcgcacgactttttctcggcagggcagcaggccgccgccgctgcgatgcacggcctgggtagcatcgacagtgcgtcgctcgagcacagcaccggctccaactccgtcgtctacaacggcggggtcggcgacagcaacggcgccagcgccgtcggcggcagtggcggtggctacatgatgccgatgagcgctgccggagcaaccactacatcggcaatggtgagccacgagcaggtgcatgcacgggcctacgacgaagccaagcaggctgctcagatggggtacgagagctacctggtgaacgcggagaacaatggtggcggaaggatgtctgcatgggggactgtcgtgtctgcagccgcggcggcagcagcaagcagcaacgacaacatggccgccgacgtcgggcatggcggcgcgcagctcttcagtgtctggaacgacacttaagcgtacctagtggtacctgacatcttatagtctgcaacctctcgtgtctgaattcctatctttatcaagtgttattgcttccacgactataggacagctttcgtcgaaagcttttgctcatgtgatctcgaaggattcatctagtctgatttttcgtgacttgtatcggttttattggattcatccaacatatatcaataaaaaatgagttgtgtttcctttcttcctagttcagttaaaattatttccctcctgcgcttgtgctgtaattgtctgtgtacctgttgtttgtgactgtgttagttcccttggatatgatttcgtatttgatatgtacatggagatagcttagcttcattattggagtatgaagttagtatgacatagtcactctcctggaaaattgacactgcaaaccatatttttattctgaaccacaaatcctagtcagtccgctggcatatgccgtccgtttgctgaatccagaacgtgggtttggagatgtacggctgagatgcctctatgcgaaggggatttcgtggtgaaacgagatgggagtagagcaacgcccgtggaagatgcttcaaacttccacacttttgagcaacgatcggcagtagtaaggtagacgatttcaagatcaaagcatatgaagataaacaacatcaacaacaaaatttgttggggttctatagagagaaacagagctacatacatacactgttttgtatctaccatctgagatgatgaaaagatgaaaaactaaagaatgccccggcgccaacgccaggacacgccgcgcgcgcgtcacccgagccatctcttgacccagccggcgctgtatatttacacacgttgcagcatcgatcaccacctgttcgatcgcgtcgccgtcaccggcgcgccgcgacttattgaactagtctagggcgcggctaacaacctagcttagattgccttgtctaaacccttaggctaacgcgccacggtaacccggtccgggcctagaaggccccagagctggtcaccccatacgattggaagcttcaagtttgtacaaaaaagcaggctccggccagagttacccggaccgaagcttgcatgcctgcagtgcagcgtgacccggtcgtgcccctctctagagataatgagcattgcatgtctaagttataaaaaattaccacatattttttttgtcacacttgtttgaagtgcagtttatctatctttatacatatatttaaactttactctacgaataatataatctatagtactacaataatatcagtgttttagagaatcatataaatgaacagttagacatggtctaaaggacaattgagtattttgacaacaggactctacagttttatctttttagtgtgcatgtgttctcctttttttttgcaaatagcttcacctatataatacttcatccattttattagtacatccatttagggtttagggttaatggtttttatagactaatttttttagtacatctattttattctattttagcctctaaattaagaaaactaaaactctattttagtttttttatttaataatttagatataaaatagaataaaataaagtgactaaaaattaaacaaataccctttaagaaattaaaaaaactaaggaaacatttttcttgtttcgagtagataatgccagcctgttaaacgccgtcgacgagtctaacggacaccaaccagcgaaccagcagcgtcgcgtcgggccaagcgaagcagacggcacggcatctctgtcgctgcctctggacccctctcgagagttccgctccaccgttggacttgctccgctgtcggcatccagaaattgcgtggcggagcggcagacgtgagccggcacggcaggcggcctcctcctcctctcacggcaccggcagctacgggggattcctttcccaccgctccttcgctttcccttcctcgcccgccgtaataaatagacaccccctccacaccctctttccccaacctcgtgttgttcggagcgcacacacacacaaccagatctcccccaaatccacccgtcggcacctccgcttcaaggtacgccgctcgtcctcccccccccccctctctaccttctctagatcggcgttccggtccatgcatggttagggcccggtagttctacttctgttcatgtttgtgttagatccgtgtttgtgttagatccgtgctgctagcgttcgtacacggatgcgacctgtacgtcagacacgttctgattgctaacttgccagtgtttctctttggggaatcctgggatggctctagccgttccgcagacgggatcgatttcatgattttttttgtttcgttgcatagggtttggtttgcccttttcctttatttcaatatatgccgtgcacttgtttgtcgggtcatcttttcatgcttttttttgtcttggttgtgatgatgtggtctggttgggcggtcgttctagatcggagtagaattctgtttcaaactacctggtggatttattaattttggatctgtatgtgtgtgccatacatattcatagttacgaattgaagatgatggatggaaatatcgatctaggataggtatacatgttgatgcgggttttactgatgcatatacagagatgctttttgttcgcttggttgtgatgatgtggtgtggttgggcggtcgttcattcgttctagatcggagtagaatactgtttcaaactacctggtgtatttattaattttggaactgtatgtgtgtgtcatacatcttcatagttacgagtttaagatggatggaaatatcgatctaggataggtatacatgttgatgtgggttttactgatgcatatacatgatggcatatgcagcatctattcatatgctctaaccttgagtacctatctattataataaacaagtatgttttataattattttgatcttgatatacttggatgatggcatatgcagcagctatatgtggatttttttagccctgccttcatacgctatttatttgcttggtactgtttcttttgtcgatgctcaccctgttgtttggtgttacttctgcaggtcgactttaacttagcctaggatccgatctgcctcatcaacagctgcagtatttgctagccacatatatatacacagttcgacacgtagttataacggaagagagaagcaaagagagaggcagagtgactgcaaccatcagtagttctatgattttattttttaccgttttgttgctgtttcatggtgtttatttgattgtagggtggaggagaggtgaaagctgacagaagagagtgagcacacatggtgcctttcttgcatgatgtatgatcgagagagttcatgctcgaagctatgcgtgctcacttctctctctgtcagccattagaactcctctatctctcaatctcgatctccctctttctttgttgatctctcccatggtgatatttatttgcttcctacgtgttgtgttctctttcttcagcacacacacaacctgttcatgttaccttagggttaaagtttttgcactttgcgtgaagatggaaagacaaacagtagatgagttttttgaaggtttgacagaagagagtgagcacacacggtggtttcttaccatgagtgtcatgctaggagctgtgcgtgctcaccctctatctgtcagtcactcatcaagcccatctgtcttattagcttgtttccgctgctaataaatattctagaggtaccgttaacagatctactaactatctatactgtaataatgttgtatagccgccggatagctagctagtttagtcattcagcggcgatgggtaataataaagtgtcatccatccatcaccatgcgtggcaacgtgagcaatgacctgattgaacaaattgaaatgaaaagaagaaatatgttatatgtcaacgagatttcctcataatgccactgacgacgtgtgtccaagaaatgtatcagtgatacgtatattcacaatttttttatgacttatactcacaatttgtttttttactacttatactcacaatttgttgtgcgtaccataacaatttcgatcgaatatatatcagaaagttgacgaaagtaagctcactcaaaaagttaaatgggctgcggaagctgcgtcaggcccaagttttggctattctatccggtatccacgattttgatggctgagggacatatgttcgcttaagcttcggtccgggcctagaaggccgatctcccgggcacccagctttcttgtacaaagtggccgttaacggatcggccagaatggcccggaccgggttaccgaattcgagctcggtaccctggttcacaaactcaatacaacacacagtggagtagggtattacgctccggcggcccgaaccactctaaatccttgtgtcctcgtgtgctcttccaccattaatgactgtaattgcagggacacgaagagttgtagcgcttttgccaacaagatccgctatatgctagtagagtggaacctgcacagcaacaagcatccaataatctgagaataagaattatgtgtggtgatggttctcatctctgcaactcgccattttcgcgagagaaccaaatccaagttggtgaagatcatgatttgggctcatgggctggcatagtagctattacctttgcaattgtggttcgaatctatccgatattctccttttcagggagagctaatgcttatgcttattgggtattttggtttgacactgcttcacgcccaaaaaaaggcaactatgtctgagttggatatggcccaaaaaaaggcagctatgtctgagttggatatggaagtcttctttcgtttagggtgaagtaagaccaagctcatgagcttattatcttaggtcggaacaaattagttgataggcatggcacatttatcaaattataatgattttaacagaaaagcaacacctctttttcagcagcaccagctttgcaagctgcaattgacactccaagcatagtatttgctccaaactcagcctgcatttcgcacaatatcatatctatttccatttggataaaatatattttccagaaatatgggaacagaatcaagatacagaaaaaagttgtggtagtagtggtaagtggaaacacaagtacagtgaaaagatagcattatttctgaacagtcaaattaaccgaaataagtagtatcacatactgcccctaaattgactacacccaatgtaaagaattgcttgagcatattgagccatcagttgtttgtttgtgtaacggatttgacaatgcagagttcaggagcaaaaaaccgcaaaggagagaaagagggaaaggatctcctagtatcccaccttgtggcgcgccctgtcaagtgcatgatggcctggtcgatctgcgtctgctgctgcggttccatcccaacgagtgcctccgacaccttgtcgttgatcacccgcaccgcgtaggcgacccccctggcgaggaacttccgcctctcggaggccccggccgcgtcggcggcggcgccctcgagcgcgcccacgctagccgtagatgctcggtgcacggccttgttggtgtgcaactcgacctcaacggccggtgcgctacgcccgtcaaggatctggcgcgcccgcaccctcgtgatcacggtgggcgcctcccgcctcatgtggccgacgatgaaaagcgccgggttaggggccttggcgcgcaccgccgtattcagggcctcctcgctcttgcgcgagagcaggtgcttccccaggtactcctgcactgacaaggctgccacagcggtggaatttgtcctcacgacttcgccacgtcgtcctcacctccctggcttcccacgactccgccgtatcgaggtgctcggtgggtcgtcttaatccgaagtccgaactaggaagacgagacagagaggtctgaggaatgggcctcgtttgatgttgagctgaattatttttccagcataagcccaggtcttggtccatgaacaaaattactagaaacccagcccagtactacgatctaaaagagggactgccactggatagctctctctagcattctccacgctccaatacagcggcgtcgtgtctatccgggtctatccgcgaacacgtgagaactctccagaaactgctttctcctccacttcatctctctcgctttccctctataaaaagaccccttctaggaattgagggagacagcaagcaccaagcagcgatccgaagctcaatcaattcactcaaacctcttccccaaatcttcgattagatcttcgttgacaagaagactagaaccgaacctgacatgtccaacctgctcacggttcaccagaaccttccggctcttccagtggacgcgacgtccgatgaagtcaggaagaacctcatggacatgttccgcgacaggcaagcgttcagcgagcacacctggaagatgctgctctccgtctgccgctcctgggctgcatggtgcaagctgaacaacaggaagtggttccccgctgagcccgaggacgtgagggattaccttctgtacctgcaagcgcgaggtttgtttctgcttctacctttgatatatatataataattatcattaattagtagtaatataatatttcaaatatttttttcaaaataaaagaatgtagtatatagcaattgcttttctgtagtttataagtgtgtatattttaatttataacttttctaatatatgaccaaaacatggtgatgcctaggtctggcagtgaagaccatccagcaacaccttggacaactgaacatgcttcacaggcgctccggcctcccgcgccccagcgactcgaacgccgtgagcctcgtcatgcgccgcatcaggaaggaaaacgtcgatgccggcgaaagggcaaagcaggccctcgcgttcgagaggaccgatttcgaccaggtccgcagcctgatggagaacagcgacaggtgccaggacattaggaacctggcgttcctcggaattgcatacaacacgctcctcaggatcgcggaaattgcccgcattcgcgtgaaggacattagccgcaccgacggcggcaggatgcttatccacattggcaggaccaagacgctcgtttccaccgcaggcgtcgaaaaggccctcagcctcggagtgaccaagctcgtcgaacgctggatctccgtgtccggcgtcgcggacgacccaaacaactacctcttctgccgcgtccgcaagaacggggtggctgcccctagcgccaccagccaactcagcacgagggccttggaaggtattttcgaggccacccaccgcctgatctacggcgcgaaggatgacagcggtcaacgctacctcgcatggtccgggcactccgcccgcgttggagctgctagggacatggcccgcgccggtgtttccatccccgaaatcatgcaggcgggtggatggacgaacgtgaacattgtcatgaactacattcgcaaccttgacagcgagacgggcgcaatggttcgcctcctggaagatggtgactgaggtacccaacctagacttgtccatcttctggattggccaacttaattaatgtatgaaataaaaggatgcacacatagtgacatgctaatcactataatgtgggcatcaaagttgtgtgttatgtgtaattactagttatctgaataaaagagaaagagatcatccatatttcttatcctaaatgaatgtcacgtgtctttataattctttgatgaaccagatgcatttcattaaccaaatccatatacatataaatattaatcatatataattaatatcaattgggttagcaaaacaaatctagtctaggtgtgttttgcgatccgatatcgaattggccacggtaccagctgctgctgttctagggttcacaagtctgcctatttgtcttccccaatggagctatggttgtctggtctggtccttggtcgtgtcccgtttcattgtgtactatttacctgtaatgtgtatccttaagtctggtttgatggtgtctgaaacgttttgctgtggtagagcagcatggaagaactataatgaataagtgatccctaatcattgtgtccaaattttgcttctgctatacccttttgtgctgtttcttatgttttgcttaaaaatttgatctgacaaacaaatttgtctaaattatgctcttgttctgactgtgtactgtacacatttgtattgctaccggtttggcacatagttttctctttgattgcagatcaaacccttctgattgcagattgcttggctatggctgatgtgctcactgttcttctttagcttgtatattgctgatggtggcttggctacggctgaaaaagttgctgctgcgccgacttggcaactgttgctccagtaatgctttgtcctctcttcctagccgccgacttggcacttggcagctgttgctcctgtaatgcgttgttatctcttatctcttgagatgtactatgattttgaggctgtttgacttgtgccagattgccagtgctgatgctatattatctcaggtttttatgctagtatatgttttactgtgtgctgcctgtgtcgagttacgtaatctattgaaccgctatgcgtgttgatgccctgttgttgcttgccagattgatgcccctgttgcttgcagcttgcaagctgtagtgaaatcctaaaattccaaaccaaatctattctgaacttttgaagatctgtgatgtccggaagaaaagattcaaacagataaacgggactctccagaatctataaaataaatgatcgacaaacgctttgctttggtaggcttcaagcttggtcacccggtccgggcctagaaggccagcttcggccgccccgggcaactttattatacaaagttgatagataaatcagatatctggttcctaaggacccggcggaccgattaaactgattcggtccgacgcgttacctaataacttcgtatagcatacattatacgaagttattagctaactaactagtaagcttaagccatgggtcgacggatccgttaactagcgtggcatttggcaccgccgcacactatgcgagctaggagtgctagtttacagatgaaactatgaaaccaagaaaacacaattgtccgtagctagcgcgtggcgtcgtgtcaagcttcacacagtatcttcgttcttcactataaatcgcgcctgttgttcgtgagacccaccaccgtggataacagtcccctaataataagcgatcaacagcactgctgatggctgaacaccgaggcgccgccgcgcgtaaccatccgccggagcagcccgtcgtgccggcgaacgacgccttccccgaccgcgcccagcagctctgcctcgacgccgggcgcgcgctcgcgatgtgcggcgtgctcgtcgccgtccctcccgcattttacgcgtcgacgtcgcggacgacaccgcacttgccttcgtcggcttcgtcctctggatcatcggtgcgtggctgtgcctcctggcgctcacgcccttggctccacgggcggtgagggcgggcggggccgccgccagcaccttgctgatcaggtgcctgtccctttcatgaactactagcgcccgcgcccgcggccgccgggcacaagagaacacatcgatgttcgctgcgtacgtcagcaataaggcactctttgtcagtagtcgagtgcatatgttgggtgtttgccctgggagatttcaagtgttgtggccattatcccgcaggataaaaaatcggcggcttttggattgatacggaaaataacgatgtttcatgctcgtgttgtgtgtgtgacatcttgtcagccaagtttttaaccgttgctactccccctctgtgggctcagtgtgtggaccggaatacgtcgtacataggccgtagcctaagcccaatatgccgtttttcaggttggcctgtgtgacgacaagcgggtctcaaaagcccatcacgcaactggcctgcaattattggaggagagcgcgtcgagttggttccagaggctgcgtggtggggccggactctgcgacgacctctcgttcgcgtccgatttggttgccgtgagccgtgacgtaacgcctccttccgttcctccctatataagttccacccccgggtccggtttccccaagccccagtgacccccgatcccgatcgcgaaatctccgcacccgccggcaagggaccgaagcaagcctctctcccgaccgtcgcatcaaggtacgcgtccgctcgatctgtcctcttccttctcgatttgacttgctgtggtgcccgatcacgggatcagaatcgcaccagtgtagatttcgcatgttctaagatgtgttagtttccaggctaatccagttctcttgacgcccgatccgatcgagctccgtgtttatttcagcctaatcgtagtattcccctaaaatttcctcattagggggttcgcaagattgttggtcgacaggttcacttatgctcgatcgcttacttttagtcgattcatgctgcgtactattgttgccccccgtggttttatcttttctcgtgtgaaatccagtagatatagtagatatcgtagcattaggttttaattcaatcgattgattattgtatcatcaaaattgagaagttcgaatcatgcctatcatgctgcctcaaccgaaatcctgtatattgaagtttcaattcaattgattgatcattcattagattcaaccaaaatctagaaggttagatgacgcatgtcatgctgcctgcgtagtttacctttgatctgtttatgattaccttatcagtaggatatttgtgattttgggaagtagcactaactgattcatgctgacatgatgttccctttcagattatactgttgagtcctatctaattgatgctttgtatgctatatgaatacgtcatggtaaattagcagttaattagcatattagcaattgggcgtacctcatcaggattgctcttgtagatgtgtgtggtgatgtttcttgttcaattcatgttctgctttaaaagtatgtgttctctgtttgttaattaagattcatggttataatgatttggacctaattaatcagggttgcccttttagatgcgtggttacttgttgagttcatttttttcctgctatagttgtatgcgtttgttcattcatggttagatttgatttgtttcttctctattccatgccttccatatacttcaattgtagcttaacatgagatttctgtatatgcaggtcgaccgccggggatccacacgacaccatggcccagtccaagcacggcctgaccaaggagatgaccatgaagtaccgcatggagggctgcgtggacggccacaagttcgtgatcaccggcgagggcatcggctaccccttcaagggcaagcaggccatcaacctgtgcgtggtggagggcggccccttgcccttcgccgaggacatcttgtccgccgccttcatgtacggcaaccgcgtgttcaccgagtacccccaggacatcgtcgactacttcaagaactcctgccccgccggctacacctgggaccgctccttcctgttcgaggacggcgccgtgtgcatctgcaacgccgacatcaccgtgagcgtggaggagaactgcatgtaccacgagtccaagttctacggcgtgaacttccccgccgacggccccgtgatgaagaagatgaccgacaactgggagccctcctgcgagaagatcatccccgtgcccaagcagggcatcttgaagggcgacgtgagcatgtacctgctgctgaaggacggtggccgcttgcgctgccagttcgacaccgtgtacaaggccaagtccgtgccccgcaagatgcccgactggcacttcatccagcacaagctgacccgcgaggaccgcagcgacgccaagaaccagaagtggcacctgaccgagcacgccatcgcctccggctccgccttgccctccggactcagatctcgatagagtcaacctagacttgtccatcttctggattggccaacttaattaatgtatgaaataaaaggatgcacacatagtgacatgctaatcactataatgtgggcatcaaagttgtgtgttatgtgtaattactagttatctgaataaaagagaaagagatcatccatatttcttatcctaaatgaatgtcacgtgtctttataattctttgatgaaccagatgcatttcattaaccaaatccatatacatataaatattaatcatatataattaatatcaattgggttagcaaaacaaatctagtctaggtgtgttttgcgaattgcggcgcccttactttaacgcctctaaccaacacccctttatctttataaggaacaataaacagaatttgccccactgttctaaatcacctaataatatccccagctaaaaacaataaaggtttcctagaattaagacaagcatgactgttcctccaggagggtttggaacattgttgcagtcttgcagatacgggcgaagggtgagaaacagagcggagggctggaggtgacctcggtagtcgacgccggagttgagcttgacaacgacggggcggcccctgatggacttgaggaagtccgatggcgtcttcaccgtcccgccggcgcccgaggcgggcctgtcgctgccgccgccgccgctgctcatcttgcgcgctgtgcccccggcggtgtccctgtgttgcggatcgcgggtgggccaggtggatgcgagggcgacccgtttggactccggccggagccgccggatccctggtcggtgtcagtgccgtttactctgggccccacgtgtcagtaccgtctgtagatgacaacaacccgtcgtccacagtcatgtccaaaatatcctttcttcttttttttcgattcggatatctatcttccttttttttttccaaaaatcttcttgacgcaccagcgcgcacgtttgtggtaaacgccgacacgtcggtcccacgtcgatagaccccacccaccagtgagtagcgtgtacgtattcgggggtgacggacgtgtcgccgtcgtcttgctagtcccattcccatctgagccacacatctctgaacaaaaaaaaggagggaggcctccacgcacatccccctccgtgccacccgccccaaaccctcgcgccgcctccgagacagccgccgcaaccatggccaccgccgccgccgcgtctaccgcgctcactggcgccactaccgctgcgcccaaggcgaggcgccgggcgcacctcctggccacccgccgcgccctcgccgcgcccatcaggtgctcagcggcgtcacccgccatgccgatggctcccccggccaccccgctccggccgtggggccccaccgagccccgcaagggtgctgacatcctcgtcgagtccctcgagcgctgcggcgtccgcgacgtcttcgcctaccccggcggcgcgtccatggagatccaccaggcactcacccgctcccccgtcatcgccaaccacctcttccgccacgagcaaggggaggcctttgccgcctccggctacgcgcgctcctcgggccgcgtcggcgtctgcatcgccacctccggccccggcgccaccaacctagtctccgcgctcgccgacgcgctgctcgattccgtccccatggtcgccatcacgggacaggtggcgcgacgcatgattggcaccgacgccttccaggagacgcccatcgtcgaggtcacccgctccatcaccaagcacaactacctggtcctcgacgtcgacgacatcccccgcgtcgtgcaggaggctttcttcctcgcctcctctggtcgaccagggccggtgcttgtcgacatccccaaggacatccagcagcagatggcggtgcctgtctgggacaagcccatgagtctgcctgggtacattgcgcgccttcccaagccccctgcgactgagttgcttgagcaggtgctgcgtcttgttggtgaatcgcggcgccctgttctttatgtgggcggtggctgcgcagcatctggtgaggagttgcgacgctttgtggagctgactggaatcccggtcacaactactcttatgggcctcggcaacttccccagcgacgacccactgtctctgcgcatgctaggtatgcatgggacggtgtatgcaaattatgcagtggataaggccgatctgttgcttgcacttggtgtgcggtttgatgatcgcgtgacagggaagattgaggcttttgcaagcagggctaagattgtgcacgttgatattgatccggctgagattggcaagaacaagcagccacatgtgtccatctgtgcagatgttaagcttgctttgcagggcatgaatgctcttcttgaaggaagcacatcaaagaagagctttgactttggctcatggaacgatgagttggatcagcagaagagggaattcccccttgggtataaaacatctaatgaggagatccagccacaatatgctattcaggttcttgatgagctgacgaaaggcgaggccatcatcggcacaggtgttgggcagcaccagatgtgggcggcacagtactacacttacaagcggccaaggcagtggttgtcttcagctggtcttggggctatgggatttggtttgccggctgctgctggtgcttctgtggcaaacccaggtgtcactgttgttgacatcgatggagatggtagctttctcatgaacgttcaggagctagctatgatccgaattgagaacctcccagtgaaggtctttgtgctaaacaaccagcacctggggatggtggtgcagttggaggacaggttctataaggccaacagagcgcacacatacttgggaaacccagagaatgaaagtgagatatatccagatttcgtgacgatcgccaaagggttcaacattccagcggtccgtgtgacaaagaagaacgaagtccgcgcagcgataaagaagatgctcgagactccagggccgtacctcttggatataatcgtcccacaccaggagcatgtgttgcctatgatccctagtggtggggctttcaaggatatgatcctggatggtgatggcaggactgtgtactgactagctagtcagttaacagatctgccagatcctcggtgtacaaataacccgtcttatcctatgagacgggccggcgtcagtgtgttctggaggaatttttatgtcagagcctttttctttgtgtgcttgatgtagatgccaagggaagcttattggctgttgaagcttgatgcaaaataaattatggaactctgttttttgtttatctaataataactagcaaatatgcttccattgcattgaaactaacagccttttgtgtttccaagttttattttgtgacaatgtcatctatttcaattagttgtggaatcggaaacttgcaggactaacttggaaactccaatccctcagcatcctggactttttcctggtgtaatccatgtagatattattttaatcatcattttagttctggaggtttttccatctccggttttgctcccctttcttcaaaaaaaaaaaaaaaatgccgtaggcgccgcaacgcccacctgttgttcaaactcatgggcacgagtggctcgaagattttatacaacaattgctgtagtttcaccgttgctggtgaagaagcatttttttaaaaaaatatagtggtattcattttaattagtttagttgtgcagcgagcaaaatttggacatgctctgctcggaatctgatcgacctagacacagattagcagcagtagctttgtcatctgttccaagagttgcgatctgatagaagaaaaaaaaaccttcccttcaatgtaaaaccgaaactaacaagaaagaagcacagtgccgtttaggcaagtatggagtacgtattaagcatgtagaaggccatgcatgaaccactaacaagaaagaagcgcagtgccattcaggcaagcataagcatgtagattggcatgcatgaacaactaacagtagatcgtctctggtctgattagaagttttttgggaagccaagaaatcatgtacaactggttccatctcaaattccgtggcaaaaagaggcctaagcaacatacctcgagtagatcacattcaagcttggtcacccggtccgtcaatattctgattccgatgacttcgtaggttcctagctcaagccgctcgtgtccaagcgtcacttacgattagctaatgattacggcatctaggaccgactagtggcgcgccgactagctagctaaggtaccgagctcgaattcattccgattaatcgtggcctcttgctcttcaggatgaagagctatgtttaaacgtgcaagcgctactagacaattcagtacattaaaaacgtccgcaatgtgttattaagttgtctaagcgtcaatttgtttacaccacaatatatcctgcca

SEQ ID NO: 58 - DNA, 26388 bp, synthetic construct
  misc_feature 1..26388: note = PHP95904
  source 1..26388: mol_type = other DNA
gtttacccgccaatatatcctgtcaaacactgatagtttaaactgaaggcgggaaacgacaatctgatcatgagcggagaattaagggagtcacgttatgacccccgccgatgacgcgggacaagccgttttacgtttggaactgacagaaccgcaacgttgaaggagccactcagcaagctggtacgattgtaatacgactcactatagggcgaattgagcgctgtttaaacgctcttcaactggaagagcggttacgctgtttaaacgctcttcaactggaagagcggttactaccggttcactagctagctgctaatcgagctagttaccctatgaggtgacatgaagcgctcacggttactatgacggttagcttcacgactgttggtggcagtagcgtacgacttagctatagttccggacttacccttaagcgatttaaatctgcggttaccgaattcgagctcggtacctagtacccttgtacttttggtttcacctgcatagagaaaacccacaagaatatgacagtctgatttgtcagtctcattctcaagcaacatttctctatccgttactttcatggtgaataacacaatccatcatcaatactttgtgttactcagaaactgaaagttattccgagtcttgcatatctttggacctactcgtttttctaccattattgctgattgttaagctctcgctacttgaatcggcattgttggagtgggaaggttcaaaaaattggagttatgactagttgtctctttctatgtacgatggagaaaatgaataaacaactgagaaaatggctcttgtttagttgatgatgctcttaagctttccactggttgccatatatgatttgggcatttcactttgatcttaatgggccttgtaaagcccaagactcatgattatctttagttgatgctcttaattaggtgtgggcaaataattcaaactgtatgtacccgaccaaaaccaaagcaaaaataatcgaaccaaaccgaaaatttaaaaataaccgaatgaaaactaaatcctataactgaaagaactgaaaccgaatcaaaatatttaatgtaaccaaaaatatccgaaatataattatattgtcaaaaatattaataatttctagattaaataattaaaaatacttaaaaatttatataaaatagtaaaaatactcgaaaataaccacaaatattcaaaaacaaccgaaatatcccaaaatattcaaagcaaaataaccgaatggataccaaattttaaaaccgaaaaaactggaacaaaaccaaaatcgaaccaaaatttcaaaaatcgaataaatactaaactttagaacaaaaaaaaacgataaccgaatgtatacgaaccaaagccgaattagataaccgaacgtccaggactactcttaatctttccgccacttatgatttgggctattactttgtttataatgagccttttcaagctcaagttcatgattgtccgtgagatgagaaactgacttgttggattcgaaaccctagctagtattggttaatacttaatacataaatgacctgcattgacatcatcatccaagaaaataaaaattgtatgcttgagatatttagttttcctagctaggttttctttattttagtaccgaatctttaggtgtgccacgttaatttagacccattttttcatacttaccaactgagtctagtttaatcatgactataatcgtataaaatgattcagtcgacgtcattgcgaacgtatataaaatcatccaaattgacgtcattccaaagaggtaagcatgcttatctaagagtccgagcatactaaacaagacgacattttatttgcactccaaatcaaattttgtattgcctaaagaaaaacaatcaaactcaagtttcttaaaattaatttcattcaaactaatcactttcaatatctcacatattattcatgccatttctatttgtctaaacatgatttaaaaaaaaaagtaaaatacaaagattactatgcaaaaactctataaaaaaaaattcaaatttcttatttatttgtgacatcaaattttcaaaataatttttttaattatcggttgatccggtcagtcgataaaaacataaactttcagcgaccgttaaaactttcctactaccgatttagagaaaatcttagcttgaaacgtaattgtaacctgccttcatgcaagtcgcaagatatgtcatcctaagttgtatatgttttctcaaaagatgtatttacttgagaaaatacgtttcaacgttgatggacaaccaattaagaatcaagcacctttcgtaatcaatttaggcttatcgtctaaggtatactgatttacgacagttgactagacttataaggaacaaaataatagaatagtttctaaacacttcacctaatcatagagactaagatggtaattcgtaaacgacaaagcctagtgacactgtccattgtaaaattccacatcatattagtattaaacatatacatgtagtttcctgaacacatgtagtatcaaacacacttcgtggcttcttcctcgaaacctgcggccgcgctatagttccggacttacccttaagataacttcgtatagcatacattatacgaagttatgggcccacgcgtgaagagcggttaccagagctggtcacctttgtccaccaagatggaactgtcttcggccagaatggccatctggattcagcaggcctagaaggccatttatcgctatcaactttgtatagaaaagttgggccgagctcggtacggccagaatggcccggaccgggttaccaagcggccgcacactgatagtttaaactgaaggcgggaaacgacaatctgatcatgagcggagaattaagggagtcacgttatgacccccgccgatgacgcgggacaagccgttttacgtttggaactgacagaaccgcaacgattgaaggagccactcagccgcgggtttctggagtttaatgagctaagcacatacgtcagaaaccattattgcgcgttcaaaagtcgcctaaggtcactatcagctagcaaatatttcttgtcaaaaatgctccactgacgttccataaattcccctcggtatccaattagagtctcatattcactcccatggcggccaatgcgggcggcggtggagcgggaggaggcagcggcagcggcagcgtggctgcgccggcggtgtgccgccccagcggctcgcggtggacgccgacgccggagcagatcaggatgctgaaggagctctactacggctgcggcatccggtcgcccagctcggagcagatccagcgcatcaccgccatgctgcggcagcacggcaagatcgagggcaagaacgtcttctactggttccagaaccacaaggcccgcgagcgccagaagcgccgcctcaccagcctcgacgtcaacgtgcccgccgccggcgcggccgacgccaccaccagccaactcggcgtcctctcgctgtcgtcgccgccgccttcaggcgcggcgcctccctcgcccaccctcggcttctacgccgccggcaatggcggcggatcggctgtgctgctggacacgagttccgactggggcagcagcggcgctgctatggccaccgagacatgcttcctgcaggactacatgggcgtgacggacacgggcagctcgtcgcagtggccacgcttctcgtcgtcggacacgataatggcggcggccgcggcgcgggcggcgacgacgcgggcgcccgagacgctccctctcttcccgacctgcggcgacgacggcggcagcggtagcagcagctacttgccgttctggggtgccgcgtccacaactgccggcgccacttcttccgttgcgatccaacagcaacaccagctgcaggagcagtacagcttttacagcaacagcaacagcacccagctggccggcaccggcaaccaagacgtatcggcaacagcagcagcagccgccgccctggagctgagcctcagctcatggtgctccccttaccctgctgcagggagtatgtgagagcaacgcgagctgccactgctcttcactgatgtctctggaatggaaggaggaggaagtgagaacagatcattcgacaaagcagcattagtccgttgatcggtggaagaccactcgtcagtgttgagttgaatgtttgatcaataaaatacggcaatgctgtaagggttgttttttatgccattgataatacactgtactgttcagttgttgaactctatttcttagccatgccaagtgcttttcttattttgaataacattacagcaaaaagttgaaagacaaaaaaaaaaacccccgaacagagtgctttgggtcccaagcttctttagactgtgttcggcgttccccctaaatttctccccctatatctcactcacttgtcacatcagcgttctctttccccctatatctccacgctctacagcagttccacctatatcaaacctctataccccaccacaacaatattatatactttcatcttcaactaactcatgtaccttccaatttttttctactaataattatttacgtgcacagaaacttagcaaggagagagagagcgggaatttaaatgctcggcgttaggcttttagtccgctaggtggctagaccgaggttaggacgctagttcactaggggcctagtggtgttttaagacgtcacggtcaccacgcgtggaccgaagcttgcatgcctgcagtgcagcgtgacccggtcgtgcccctctctagagataatgagcattgcatgtctaagttataaaaaattaccacatattttttttgtcacacttgtttgaagtgcagtttatctatctttatacatatatttaaactttactctacgaataatataatctatagtactacaataatatcagtgttttagagaatcatataaatgaacagttagacatggtctaaaggacaattgagtattttgacaacaggactctacagttttatctttttagtgtgcatgtgttctcctttttttttgcaaatagcttcacctatataatacttcatccattttattagtacatccatttagggtttagggttaatggtttttatagactaatttttttagtacatctattttattctattttagcctctaaattaagaaaactaaaactctattttagtttttttatttaataatttagatataaaatagaataaaataaagtgactaaaaattaaacaaataccctttaagaaattaaaaaaactaaggaaacatttttcttgtttcgagtagataatgccagcctgttaaacgccgtcgacgagtctaacggacaccaaccagcgaaccagcagcgtcgcgtcgggccaagcgaagcagacggcacggcatctctgtcgctgcctctggacccctctcgagagttccgctccaccgttggacttgctccgctgtcggcatccagaaattgcgtggcggagcggcagacgtgagccggcacggcaggcggcctcctcctcctctcacggcaccggcagctacgggggattcctttcccaccgctccttcgctttcccttcctcgcccgccgtaataaatagacaccccctccacaccctctttccccaacctcgtgttgttcggagcgcacacacacacaaccagatctcccccaaatccacccgtcggcacctccgcttcaaggtacgccgctcgtcctcccccccccccctctctaccttctctagatcggcgttccggtccatgcatggttagggcccggtagttctacttctgttcatgtttgtgttagatccgtgtttgtgttagatccgtgctgctagcgttcgtacacggatgcgacctgtacgtcagacacgttctgattgctaacttgccagtgtttctctttggggaatcctgggatggctctagccgttccgcagacgggatcgatttcatgattttttttgtttcgttgcatagggtttggtttgcccttttcctttatttcaatatatgccgtgcacttgtttgtcgggtcatcttttcatgcttttttttgtcttggttgtgatgatgtggtctggttgggcggtcgttctagatcggagtagaattctgtttcaaactacctggtggatttattaattttggatctgtatgtgtgtgccatacatattcatagttacgaattgaagatgatggatggaaatatcgatctaggataggtatacatgttgatgcgggttttactgatgcatatacagagatgctttttgttcgcttggttgtgatgatgtggtgtggttgggcggtcgttcattcgttctagatcggagtagaatactgtttcaaactacctggtgtatttattaattttggaactgtatgtgtgtgtcatacatcttcatagttacgagtttaagatggatggaaatatcgatctaggataggtatacatgttgatgtgggttttactgatgcatatacatgatggcatatgcagcatctattcatatgctctaaccttgagtacctatctattataataaacaagtatgttttataattattttgatcttgatatacttggatgatggcatatgcagcagctatatgtggatttttttagcactgccttcatacgctatttatttgcttggtactgtttcttttgtcgatgctcaccctgttgtttggtgttacttctgcaggtcgactttaacttagcctaggatccatggccactgtgaacaactggctcgctttctccctctccccgcaggagctgccgccctcccagacgacggactccacactcatctcggccgccaccgccgaccatgtctccggcgatgtctgcttcaacatcccccaagattggagcatgaggggatcagagctttcggcgctcgtcgcggagccgaagctggaggacttcctcggcggcatctccttctccgagcagcatcacaaggccaactgcaacatgatacccagcactagcagcacagtttgctacgcgagctcaggtgctagcaccggctaccatcaccagctgtaccaccagcccaccagctcagcgctccacttcgcggactccgtaatggtggcttcctcggccggtgtccacgacggcggtgccatgctcagcgcggccgccgctaacggtgtcgctggcgctgccagtgccaacggcggcggcatcgggctgtccatgattaagaactggctgcggagccaaccggcgcccatgcagccgagggtggcggcggctgagggcgcgcaggggctctctttgtccatgaacatggcggggacgacccaaggcgctgctggcatgccacttctcgctggagagcgcgcacgggcgcccgagagtgtatcgacgtcagcacagggtggagccgtcgtcgtcacggcgccgaaggaggatagcggtggcagcggtgttgccggcgctctagtagccgtgagcacggacacgggtggcagcggcggcgcgtcggctgacaacacggcaaggaagacggtggacacgttcgggcagcgcacgtcgatttaccgtggcgtgacaaggcatagatggactgggagatatgaggcacatctttgggataacagttgcagaagggaagggcaaactcgtaagggtcgtcaagtctatttaggtggctatgataaagaggagaaagctgctagggcttatgatcttgctgctctgaagtactggggtgccacaacaacaacaaattttccagtgagtaactacgaaaaggagctcgaggacatgaagcacatgacaaggcaggagtttgtagcgtctctgagaaggaagagcagtggtttctccagaggtgcatccatttacaggggagtgactaggcatcaccaacatggaagatggcaagcacggattggacgagttgcagggaacaaggatctttacttgggcaccttcagcacccaggaggaggcagcggaggcgtacgacatcgcggcgatcaagttccgcggcctcaacgccgtcaccaacttcgacatgagccgctacgacgtgaagagcatcctggacagcagcgccctccccatcggcagcgccgccaagcgcctcaaggaggccgaggccgcagcgtccgcgcagcaccaccacgccggcgtggtgagctacgacgtcggccgcatcgcctcgcagctcggcgacggcggagccctggcggcggcgtacggcgcgcactaccacggcgccgcctggccgaccatcgcgttccagccgggcgccgccagcacaggcctgtaccacccgtacgcgcagcagccaatgcgcggcggcgggtggtgcaagcaggagcaggaccacgcggtgatcgcggccgcgcacagcctgcaggacctccaccacctgaacctgggcgcggccggcgcgcacgactttttctcggcagggcagcaggccgccgccgctgcgatgcacggcctgggtagcatcgacagtgcgtcgctcgagcacagcaccggctccaactccgtcgtctacaacggcggggtcggcgacagcaacggcgccagcgccgtcggcggcagtggcggtggctacatgatgccgatgagcgctgccggagcaaccactacatcggcaatggtgagccacgagcaggtgcatgcacgggcctacgacgaagccaagcaggctgctcagatggggtacgagagctacctggtgaacgcggagaacaatggtggcggaaggatgtctgcatgggggactgtcgtgtctgcagccgcggcggcagcagcaagcagcaacgacaacatggccgccgacgtcgggcatggcggcgcgcagctcttcagtgtctggaacgacacttaagcgtacctagtggtacctgacatcttatagtctgcaacctctcgtgtctgaattcctatctttatcaagtgttattgcttccacgactataggacagctttcgtcgaaagcttttgctcatgtgatctcgaaggattcatctagtctgatttttcgtgacttgtatcggttttattggattcatccaacatatatcaataaaaaatgagttgtgtttcctttcttcctagttcagttaaaattatttccctcctgcgcttgtgctgtaattgtctgtgtacctgttgtttgtgactgtgttagttcccttggatatgatttcgtatttgatatgtacatggagatagcttagcttcattattggagtatgaagttagtatgacatagtcactctcctggaaaattgacactgcaaaccatatttttattctgaaccacaaatcctagtcagtccgctggcatatgccgtccgtttgctgaatccagaacgtgggtttggagatgtacggctgagatgcctctatgcgaaggggatttcgtggtgaaacgagatgggagtagagcaacgcccgtggaagatgcttcaaacttccacacttttgagcaacgatcggcagtagtaaggtagacgatttcaagatcaaagcatatgaagataaacaacatcaacaacaaaatttgttggggttctatagagagaaacagagctacatacatacactgttttgtatctaccatctgagatgatgaaaagatgaaaaactaaagaatgccccggcgccaacgccaggacacgccgcgcgcgcgtcacccgagccatctcttgacccagccggcgctgtatatttacacacgttgcagcatcgatcaccacctgttcgatcgcgtcgccgtcaccggcgcgccgcgacttattgaactagtctagggcgcggctaacaacctagcttagattgccttgtctaaacccttaggctaacgcgccacggtaacccggtccgggcctagaaggccccagagctggtcaccccatacgattggaagcttcaagtttgtacaaaaaagcaggctccggccagagttacccggaccgaagcttgcatgcctgcagtgcagcgtgacccggtcgtgcccctctctagagataatgagcattgcatgtctaagttataaaaaattaccacatattttttttgtcacacttgtttgaagtgcagtttatctatctttatacatatatttaaactttactctacgaataatataatctatagtactacaataatatcagtgttttagagaatcatataaatgaacagttagacatggtctaaaggacaattgagtattttgacaacaggactctacagttttatctttttagtgtgcatgtgttctcctttttttttgcaaatagcttcacctatataatacttcatccattttattagtacatccatttagggtttagggttaatggtttttatagactaatttttttagtacatctattttattctattttagcctctaaattaagaaaactaaaactctattttagtttttttatttaataatttagatataaaatagaataaaataaagtgactaaaaattaaacaaataccctttaagaaattaaaaaaactaaggaaacatttttcttgtttcgagtagataatgccagcctgttaaacgccgtcgacgagtctaacggacaccaaccagcgaaccagcagcgtcgcgtcgggccaagcgaagcagacggcacggcatctctgtcgctgcctctggacccctctcgagagttccgctccaccgttggacttgctccgctgtcggcatccagaaattgcgtggcggagcggcagacgtgagccggcacggcaggcggcctcctcctcctctcacggcaccggcagctacgggggattcctttcccaccgctccttcgctttcccttcctcgcccgccgtaataaatagacaccccctccacaccctctttccccaacctcgtgttgttcggagcgcacacacacacaaccagatctcccccaaatccacccgtcggcacctccgcttcaaggtacgccgctcgtcctcccccccccccctctctaccttctctagatcggcgttccggtccatgcatggttagggcccggtagttctacttctgttcatgtttgtgttagatccgtgtttgtgttagatccgtgctgctagcgttcgtacacggatgcgacctgtacgtcagacacgttctgattgctaacttgccagtgtttctctttggggaatcctgggatggctctagccgttccgcagacgggatcgatttcatgattttttttgtttcgttgcatagggtttggtttgcccttttcctttatttcaatatatgccgtgcacttgtttgtcgggtcatcttttcatgcttttttttgtcttggttgtgatgatgtggtctggttgggcggtcgttctagatcggagtagaattctgtttcaaactacctggtggatttattaattttggatctgtatgtgtgtgccatacatattcatagttacgaattgaagatgatggatggaaatatcgatctaggataggtatacatgttgatgcgggttttactgatgcatatacagagatgctttttgttcgcttggttgtgatgatgtggtgtggttgggcggtcgttcattcgttctagatcggagtagaatactgtttcaaactacctggtgtatttattaattttggaactgtatgtgtgtgtcatacatcttcatagttacgagtttaagatggatggaaatatcgatctaggataggtatacatgttgatgtgggttttactgatgcatatacatgatggcatatgcagcatctattcatatgctctaaccttgagtacctatctattataataaacaagtatgttttataattattttgatcttgatatacttggatgatggcatatgcagcagctatatgtggatttttttagccctgccttcatacgctatttatttgcttggtactgtttcttttgtcgatgctcaccctgttgtttggtgttacttctgcaggtcgactttaacttagcctaggatgattcacattgtggatcatgttgatttagatgcttggagtgtgcctgaggtccttagaccactttatgaatccccgaagattcttgcacagaaaacaactattgctgcactgcgtcacattaggcaaattgcgcatgaatctagtggggaaatgccctatggagggggccgacagccagcagttttgagaacatttagccagaggcttagcaggggtttcaatgatgctgtcaatgggtttccagatgacggttggtcactgatgagcagtgacggtgctgaggatgttactattgctatcaactcttctccaaacaaacttattggtcctcatgtcaactcttcccagctgtttactgcgatcggaggtggcatcctgtgtgctaaggcatcaatgctgcttcagaatgtgccacctgccctactagtacgatttctgagggagcatcgctccgaatgggctgatcctggtgttgatgcttattctgccgctgctcttagggctagtccatatgcagttcctggcttgcgtgctagtgggtttatgggcagccaggttattctgccgcttgcacataccttagagcacgaagagttcttggaggttattaggcttgagggacacagcctctgccatgacgaagttgttctgtcacgagatatgtatcttctgcagttgtgcagtggtgtggatgaaaatgcagctggtgcatgtgcacagcttgtgtttgcacccatcgatgaatcttttgccgacgatgcgccactgctaccctcaggcttccgtgtcattccactggatgcaaagacggatccaccatcaggcacacgcacacttgacctcgcatctaccctcgaggttggatctggtgggacaacgcgtgcttcgagtgacgcctccagcacctgcaacacaagatcagtgctgaccattgctttccagttctcatatgagaatcacctacgagagagcgtcgcagccatggccaggcaatacgtcaggactgtggtggcgtcggtgcagagggtagccatggcaatagctccttcgcgcattggtggacagcttgaaatgaagcaaactccaggatctcctgaggcacacacgctggcaaggtggatcggcaggagctacaggttccacactggagccgaactcctccgcacggacacccaatgcacggatgcttccttgaaagcgctgtggcaacactcggactcgatcatgtgctgttccctgaaggctgctcccgtgttcacctttgccaaccaagccggcctggacatgctggagacgacgctgattgcgctccaggacatctcccttgagaagatccttgatgacgatggcaggaaggcgctctgcaccgagtaccctaagattatgcaacagggcttcgcgtacctccccggtggcgtgtgtgtgtcgagcatggggcggccggtgtcgtacgagcaggcggtggcgtggaaggtcctgagcgacgacgacaccccgcactgccttgccttcatgttcgtgaactggtccttcgtgtgaggtaccgttaacagatctactaactatctatactgtaataatgttgtatagccgccggatagctagctagtttagtcattcagcggcgatgggtaataataaagtgtcatccatccatcaccatgcgtggcaacgtgagcaatgacctgattgaacaaattgaaatgaaaagaagaaatatgttatatgtcaacgagatttcctcataatgccactgacgacgtgtgtccaagaaatgtatcagtgatacgtatattcacaatttttttatgacttatactcacaatttgtttttttactacttatactcacaatttgttgtgcgtaccataacaatttcgatcgaatatatatcagaaagttgacgaaagtaagctcactcaaaaagttaaatgggctgcggaagctgcgtcaggcccaagttttggctattctatccggtatccacgattttgatggctgagggacatatgttcgcttaagcttcggtccgggcctagaaggccgatctcccgggcacccagctttcttgtacaaagtggccgttaacggatcggccagaatggcccggaccgggttaccgaattcgagctcggtaccctggttcacaaactcaatacaacacacagtggagtagggtattacgctccggcggcccgaaccactctaaatccttgtgtcctcgtgtgctcttccaccattaatgactgtaattgcagggacacgaagagttgtagcgcttttgccaacaagatccgctatatgctagtagagtggaacctgcacagcaacaagcatccaataatctgagaataagaattatgtgtggtgatggttctcatctctgcaactcgccattttcgcgagagaaccaaatccaagttggtgaagatcatgatttgggctcatgggctggcatagtagctattacctttgcaattgtggttcgaatctatccgatattctccttttcagggagagctaatgcttatgcttattgggtattttggtttgacactgcttcacgcccaaaaaaaggcaactatgtctgagttggatatggcccaaaaaaaggcagctatgtctgagttggatatggaagtcttctttcgtttagggtgaagtaagaccaagctcatgagcttattatcttaggtcggaacaaattagttgataggcatggcacatttatcaaattataatgattttaacagaaaagcaacacctctttttcagcagcaccagctttgcaagctgcaattgacactccaagcatagtatttgctccaaactcagcctgcatttcgcacaatatcatatctatttccatttggataaaatatattttccagaaatatgggaacagaatcaagatacagaaaaaagttgtggtagtagtggtaagtggaaacacaagtacagtgaaaagatagcattatttctgaacagtcaaattaaccgaaataagtagtatcacatactgcccctaaattgactacacccaatgtaaagaattgcttgagcatattgagccatcagttgtttgtttgtgtaacggatttgacaatgcagagttcaggagcaaaaaaccgcaaaggagagaaagagggaaaggatctcctagtatcccaccttgtggcgcgccctgtcaagtgcatgatggcctggtcgatctgcgtctgctgctgcggttccatcccaacgagtgcctccgacaccttgtcgttgatcacccgcaccgcgtaggcgacccccctggcgaggaacttccgcctctcggaggccccggccgcgtcggcggcggcgccctcgagcgcgcccacgctagccgtagatgctcggtgcacggccttgttggtgtgcaactcgacctcaacggccggtgcgctacgcccgtcaaggatctggcgcgcccgcaccctcgtgatcacggtgggcgcctcccgcctcatgtggccgacgatgaaaagcgccgggttaggggccttggcgcgcaccgccgtattcagggcctcctcgctcttgcgcgagagcaggtgcttccccaggtactcctgcactgacaaggctgccacagcggtggaatttgtcctcacgacttcgccacgtcgtcctcacctccctggcttcccacgactccgccgtatcgaggtgctcggtgggtcgtcttaatccgaagtccgaactaggaagacgagacagagaggtctgaggaatgggcctcgtttgatgttgagctgaattatttttccagcataagcccaggtcttggtccatgaacaaaattactagaaacccagcccagtactacgatctaaaagagggactgccactggatagctctctctagcattctccacgctccaatacagcggcgtcgtgtctatccgggtctatccgcgaacacgtgagaactctccagaaactgctttctcctccacttcatctctctcgctttccctctataaaaagaccccttctaggaattgagggagacagcaagcaccaagcagcgatccgaagctcaatcaattcactcaaacctcttccccaaatcttcgattagatcttcgttgacaagaagactagaaccgaacctgacatgtccaacctgctcacggttcaccagaaccttccggctcttccagtggacgcgacgtccgatgaagtcaggaagaacctcatggacatgttccgcgacaggcaagcgttcagcgagcacacctggaagatgctgctctccgtctgccgctcctgggctgcatggtgcaagctgaacaacaggaagtggttccccgctgagcccgaggacgtgagggattaccttctgtacctgcaagcgcgaggtttgtttctgcttctacctttgatatatatataataattatcattaattagtagtaatataatatttcaaatatttttttcaaaataaaagaatgtagtatatagcaattgcttttctgtagtttataagtgtgtatattttaatttataacttttctaatatatgaccaaaacatggtgatgcctaggtctggcagtgaagaccatccagcaacaccttggacaactgaacatgcttcacaggcgctccggcctcccgcgccccagcgactcgaacgccgtgagcctcgtcatgcgccgcatcaggaaggaaaacgtcgatgccggcgaaagggcaaagcaggccctcgcgttcgagaggaccgatttcgaccaggtccgcagcctgatggagaacagcgacaggtgccaggacattaggaacctggcgttcctcggaattgcatacaacacgctcctcaggatcgcggaaattgcccgcattcgcgtgaaggacattagccgcaccgacggcggcaggatgcttatccacattggcaggaccaagacgctcgtttccaccgcaggcgtcgaaaaggccctcagcctcggagtgaccaagctcgtcgaacgctggatctccgtgtccggcgtcgcggacgacccaaacaactacctcttctgccgcgtccgcaagaacggggtggctgcccctagcgccaccagccaactcagcacgagggccttggaaggtattttcgaggccacccaccgcctgatctacggcgcgaaggatgacagcggtcaacgctacctcgcatggtccgggcactccgcccgcgttggagctgctagggacatggcccgcgccggtgtttccatccccgaaatcatgcaggcgggtggatggacgaacgtgaacattgtcatgaactacattcgcaaccttgacagcgagacgggcgcaatggttcgcctcctggaagatggtgactgaggtacccaacctagacttgtccatcttctggattggccaacttaattaatgtatgaaataaaaggatgcacacatagtgacatgctaatcactataatgtgggcatcaaagttgtgtgttatgtgtaattactagttatctgaataaaagagaaagagatcatccatatttcttatcctaaatgaatgtcacgtgtctttataattctttgatgaaccagatgcatttcattaaccaaatccatatacatataaatattaatcatatataattaatatcaattgggttagcaaaacaaatctagtctaggtgtgttttgcgatccgatatcgaattggccacggtaccagctgctgctgttctagggttcacaagtctgcctatttgtcttccccaatggagctatggttgtctggtctggtccttggtcgtgtcccgtttcattgtgtactatttacctgtaatgtgtatccttaagtctggtttgatggtgtctgaaacgttttgctgtggtagagcagcatggaagaactataatgaataagtgatccctaatcattgtgtccaaattttgcttctgctatacccttttgtgctgtttcttatgttttgcttaaaaatttgatctgacaaacaaatttgtctaaattatgctcttgttctgactgtgtactgtacacatttgtattgctaccggtttggcacatagttttctctttgattgcagatcaaacccttctgattgcagattgcttggctatggctgatgtgctcactgttcttctttagcttgtatattgctgatggtggcttggctacggctgaaaaagttgctgctgcgccgacttggcaactgttgctccagtaatgctttgtcctctcttcctagccgccgacttggcacttggcagctgttgctcctgtaatgcgttgttatctcttatctcttgagatgtactatgattttgaggctgtttgacttgtgccagattgccagtgctgatgctatattatctcaggtttttatgctagtatatgttttactgtgtgctgcctgtgtcgagttacgtaatctattgaaccgctatgcgtgttgatgccctgttgttgcttgccagattgatgcccctgttgcttgcagcttgcaagctgtagtgaaatcctaaaattccaaaccaaatctattctgaacttttgaagatctgtgatgtccggaagaaaagattcaaacagataaacgggactctccagaatctataaaataaatgatcgacaaacgctttgctttggtaggcttcaagcttggtcacccggtccgggcctagaaggccagcttcggccgccccgggcaactttattatacaaagttgatagataaatcagatatctggttcctaaggacccggcggaccgattaaactgattcggtccgacgcgttacctaataacttcgtatagcatacattatacgaagttattagctaactaactagtaagcttaagccatgggtcgacggatccgttaactagcgtggcatttggcaccgccgcacactatgcgagctaggagtgctagtttacagatgaaactatgaaaccaagaaaacacaattgtccgtagctagcgcgtggcgtcgtgtcaagcttcacacagtatcttcgttcttcactataaatcgcgcctgttgttcgtgagacccaccaccgtggataacagtcccctaataataagcgatcaacagcactgctgatggctgaacaccgaggcgccgccgcgcgtaaccatccgccggagcagcccgtcgtgccggcgaacgacgccttccccgaccgcgcccagcagctctgcctcgacgccgggcgcgcgctcgcgatgtgcggcgtgctcgtcgccgtccctcccgcattttacgcgtcgacgtcgcggacgacaccgcacttgccttcgtcggcttcgtcctctggatcatcggtgcgtggctgtgcctcctggcgctcacgcccttggctccacgggcggtgagggcgggcggggccgccgccagcaccttgctgatcaggtgcctgtccctttcatgaactactagcgcccgcgcccgcggccgccgggcacaagagaacacatcgatgttcgctgcgtacgtcagcaataaggcactctttgtcagtagtcgagtgcatatgttgggtgtttgccctgggagatttcaagtgttgtggccattatcccgcaggataaaaaatcggcggcttttggattgatacggaaaataacgatgtttcatgctcgtgttgtgtgtgtgacatcttgtcagccaagtttttaaccgttgctactccccctctgtgggctcagtgtgtggaccggaatacgtcgtacataggccgtagcctaagcccaatatgccgtttttcaggttggcctgtgtgacgacaagcgggtctcaaaagcccatcacgcaactggcctgcaattattggaggagagcgcgtcgagttggttccagaggctgcgtggtggggccggactctgcgacgacctctcgttcgcgtccgatttggttgccgtgagccgtgacgtaacgcctccttccgttcctccctatataagttccacccccgggtccggtttccccaagccccagtgacccccgatcccgatcgcgaaatctccgcacccgccggcaagggaccgaagcaagcctctctcccgaccgtcgcatcaaggtacgcgtccgctcgatctgtcctcttccttctcgatttgacttgctgtggtgcccgatcacgggatcagaatcgcaccagtgtagatttcgcatgttctaagatgtgttagtttccaggctaatccagttctcttgacgcccgatccgatcgagctccgtgtttatttcagcctaatcgtagtattcccctaaaatttcctcattagggggttcgcaagattgttggtcgacaggttcacttatgctcgatcgcttacttttagtcgattcatgctgcgtactattgttgccccccgtggttttatcttttctcgtgtgaaatccagtagatatagtagatatcgtagcattaggttttaattcaatcgattgattattgtatcatcaaaattgagaagttcgaatcatgcctatcatgctgcctcaaccgaaatcctgtatattgaagtttcaattcaattgattgatcattcattagattcaaccaaaatctagaaggttagatgacgcatgtcatgctgcctgcgtagtttacctttgatctgtttatgattaccttatcagtaggatatttgtgattttgggaagtagcactaactgattcatgctgacatgatgttccctttcagattatactgttgagtcctatctaattgatgctttgtatgctatatgaatacgtcatggtaaattagcagttaattagcatattagcaattgggcgtacctcatcaggattgctcttgtagatgtgtgtggtgatgtttcttgttcaattcatgttctgctttaaaagtatgtgttctctgtttgttaattaagattcatggttataatgatttggacctaattaatcagggttgcccttttagatgcgtggttacttgttgagttcatttttttcctgctatagttgtatgcgtttgttcattcatggttagatttgatttgtttcttctctattccatgccttccatatacttcaattgtagcttaacatgagatttctgtatatgcaggtcgaccgccggggatccacacgacaccatggcccagtccaagcacggcctgaccaaggagatgaccatgaagtaccgcatggagggctgcgtggacggccacaagttcgtgatcaccggcgagggcatcggctaccccttcaagggcaagcaggccatcaacctgtgcgtggtggagggcggccccttgcccttcgccgaggacatcttgtccgccgccttcatgtacggcaaccgcgtgttcaccgagtacccccaggacatcgtcgactacttcaagaactcctgccccgccggctacacctgggaccgctccttcctgttcgaggacggcgccgtgtgcatctgcaacgccgacatcaccgtgagcgtggaggagaactgcatgtaccacgagtccaagttctacggcgtgaacttccccgccgacggccccgtgatgaagaagatgaccgacaactgggagccctcctgcgagaagatcatccccgtgcccaagcagggcatcttgaagggcgacgtgagcatgtacctgctgctgaaggacggtggccgcttgcgctgccagttcgacaccgtgtacaaggccaagtccgtgccccgcaagatgcccgactggcacttcatccagcacaagctgacccgcgaggaccgcagcgacgccaagaaccagaagtggcacctgaccgagcacgccatcgcctccggctccgccttgccctccggactcagatctcgatagagtcaacctagacttgtccatcttctggattggccaacttaattaatgtatgaaataaaaggatgcacacatagtgacatgctaatcactataatgtgggcatcaaagttgtgtgttatgtgtaattactagttatctgaataaaagagaaagagatcatccatatttcttatcctaaatgaatgtcacgtgtctttataattctttgatgaaccagatgcatttcattaaccaaatccatatacatataaatattaatcatatataattaatatcaattgggttagcaaaacaaatctagtctaggtgtgttttgcgaattgcggcgcccttactttaacgcctctaaccaacacccctttatctttataaggaacaataaacagaatttgccccactgttctaaatcacctaataatatccccagctaaaaacaataaaggtttcctagaattaagacaagcatgactgttcctccaggagggtttggaacattgttgcagtcttgcagatacgggcgaagggtgagaaacagagcggagggctggaggtgacctcggtagtcgacgccggagttgagcttgacaacgacggggcggcccctgatggacttgaggaagtccgatggcgtcttcaccgtcccgccggcgcccgaggcgggcctgtcgctgccgccgccgccgctgctcatcttgcgcgctgtgcccccggcggtgtccctgtgttgcggatcgcgggtgggccaggtggatgcgagggcgacccgtttggactccggccggagccgccggatccctggtcggtgtcagtgccgtttactctgggccccacgtgtcagtaccgtctgtagatgacaacaacccgtcgtccacagtcatgtccaaaatatcctttcttcttttttttcgattcggatatctatcttccttttttttttccaaaaatcttcttgacgcaccagcgcgcacgtttgtggtaaacgccgacacgtcggtcccacgtcgatagaccccacccaccagtgagtagcgtgtacgtattcgggggtgacggacgtgtcgccgtcgtcttgctagtcccattcccatctgagccacacatctctgaacaaaaaaaaggagggaggcctccacgcacatccccctccgtgccacccgccccaaaccctcgcgccgcctccgagacagccgccgcaaccatggccaccgccgccgccgcgtctaccgcgctcactggcgccactaccgctgcgcccaaggcgaggcgccgggcgcacctcctggccacccgccgcgccctcgccgcgcccatcaggtgctcagcggcgtcacccgccatgccgatggctcccccggccaccccgctccggccgtggggccccaccgagccccgcaagggtgctgacatcctcgtcgagtccctcgagcgctgcggcgtccgcgacgtcttcgcctaccccggcggcgcgtccatggagatccaccaggcactcacccgctcccccgtcatcgccaaccacctcttccgccacgagcaaggggaggcctttgccgcctccggctacgcgcgctcctcgggccgcgtcggcgtctgcatcgccacctccggccccggcgccaccaacctagtctccgcgctcgccgacgcgctgctcgattccgtccccatggtcgccatcacgggacaggtggcgcgacgcatgattggcaccgacgccttccaggagacgcccatcgtcgaggtcacccgctccatcaccaagcacaactacctggtcctcgacgtcgacgacatcccccgcgtcgtgcaggaggctttcttcctcgcctcctctggtcgaccagggccggtgcttgtcgacatccccaaggacatccagcagcagatggcggtgcctgtctgggacaagcccatgagtctgcctgggtacattgcgcgccttcccaagccccctgcgactgagttgcttgagcaggtgctgcgtcttgttggtgaatcgcggcgccctgttctttatgtgggcggtggctgcgcagcatctggtgaggagttgcgacgctttgtggagctgactggaatcccggtcacaactactcttatgggcctcggcaacttccccagcgacgacccactgtctctgcgcatgctaggtatgcatgggacggtgtatgcaaattatgcagtggataaggccgatctgttgcttgcacttggtgtgcggtttgatgatcgcgtgacagggaagattgaggcttttgcaagcagggctaagattgtgcacgttgatattgatccggctgagattggcaagaacaagcagccacatgtgtccatctgtgcagatgttaagcttgctttgcagggcatgaatgctcttcttgaaggaagcacatcaaagaagagctttgactttggctcatggaacgatgagttggatcagcagaagagggaattcccccttgggtataaaacatctaatgaggagatccagccacaatatgctattcaggttcttgatgagctgacgaaaggcgaggccatcatcggcacaggtgttgggcagcaccagatgtgggcggcacagtactacacttacaagcggccaaggcagtggttgtcttcagctggtcttggggctatgggatttggtttgccggctgctgctggtgcttctgtggcaaacccaggtgtcactgttgttgacatcgatggagatggtagctttctcatgaacgttcaggagctagctatgatccgaattgagaacctcccagtgaaggtctttgtgctaaacaaccagcacctggggatggtggtgcagttggaggacaggttctataaggccaacagagcgcacacatacttgggaaacccagagaatgaaagtgagatatatccagatttcgtgacgatcgccaaagggttcaacattccagcggtccgtgtgacaaagaagaacgaagtccgcgcagcgataaagaagatgctcgagactccagggccgtacctcttggatataatcgtcccacaccaggagcatgtgttgcctatgatccctagtggtggggctttcaaggatatgatcctggatggtgatggcaggactgtgtactgactagctagtcagttaacagatctgccagatcctcggtgtacaaataacccgtcttatcctatgagacgggccggcgtcagtgtgttctggaggaatttttatgtcagagcctttttctttgtgtgcttgatgtagatgccaagggaagcttattggctgttgaagcttgatgcaaaataaattatggaactctgttttttgtttatctaataataactagcaaatatgcttccattgcattgaaactaacagccttttgtgtttccaagttttattttgtgacaatgtcatctatttcaattagttgtggaatcggaaacttgcaggactaacttggaaactccaatccctcagcatcctggactttttcctggtgtaatccatgtagatattattttaatcatcattttagttctggaggtttttccatctccggttttgctcccctttcttcaaaaaaaaaaaaaaaatgccgtaggcgccgcaacgcccacctgttgttcaaactcatgggcacgagtggctcgaagattttatacaacaattgctgtagtttcaccgttgctggtgaagaagcatttttttaaaaaaatatagtggtattcattttaattagtttagttgtgcagcgagcaaaatttggacatgctctgctcggaatctgatcgacctagacacagattagcagcagtagctttgtcatctgttccaagagttgcgatctgatagaagaaaaaaaaaccttcccttcaatgtaaaaccgaaactaacaagaaagaagcacagtgccgtttaggcaagtatggagtacgtattaagcatgtagaaggccatgcatgaaccactaacaagaaagaagcgcagtgccattcaggcaagcataagcatgtagattggcatgcatgaacaactaacagtagatcgtctctggtctgattagaagttttttgggaagccaagaaatcatgtacaactggttccatctcaaattccgtggcaaaaagaggcctaagcaacatacctcgagtagatcacattcaagcttggtcacccggtccgtcaatattctgattccgatgacttcgtaggttcctagctcaagccgctcgtgtccaagcgtcacttacgattagctaatgattacggcatctaggaccgactagtggcgcgccgactagctagctaaggtaccgagctcgaattcattccgattaatcgtggcctcttgctcttcaggatgaagagctatgtttaaacgtgcaagcgctactagacaattcagtacattaaaaacgtccgcaatgtgttattaagttgtctaagcgtcaatttgtttacaccacaatatatcctgcca

SEQ ID NO: 59 - DNA, 22746 bp, synthetic construct
  misc_feature 1..22746: note = PHP95987
  source 1..22746: mol_type = other DNA
gtttacccgccaatatatcctgtcaaacactgatagtttaaactgaaggcgggaaacgacaatctgatcatgagcggagaattaagggagtcacgttatgacccccgccgatgacgcgggacaagccgttttacgtttggaactgacagaaccgcaacgttgaaggagccactcagcaagctggtacgattgtaatacgactcactatagggcgaattgagcgctgtttaaacgctcttcaactggaagagcggttacgctgtttaaacgctcttcaactggaagagcggttactaccggttcactagctagctgctaatcgagctagttaccctatgaggtgacatgaagcgctcacggttactatgacggttagcttcacgactgttggtggcagtagcgtacgacttagctatagttccggacttacccttaagcgatttaaatctgcggttaccgaattcgagctcggtacctagtacccttgtacttttggtttcacctgcatagagaaaacccacaagaatatgacagtctgatttgtcagtctcattctcaagcaacatttctctatccgttactttcatggtgaataacacaatccatcatcaatactttgtgttactcagaaactgaaagttattccgagtcttgcatatctttggacctactcgtttttctaccattattgctgattgttaagctctcgctacttgaatcggcattgttggagtgggaaggttcaaaaaattggagttatgactagttgtctctttctatgtacgatggagaaaatgaataaacaactgagaaaatggctcttgtttagttgatgatgctcttaagctttccactggttgccatatatgatttgggcatttcactttgatcttaatgggccttgtaaagcccaagactcatgattatctttagttgatgctcttaattaggtgtgggcaaataattcaaactgtatgtacccgaccaaaaccaaagcaaaaataatcgaaccaaaccgaaaatttaaaaataaccgaatgaaaactaaatcctataactgaaagaactgaaaccgaatcaaaatatttaatgtaaccaaaaatatccgaaatataattatattgtcaaaaatattaataatttctagattaaataattaaaaatacttaaaaatttatataaaatagtaaaaatactcgaaaataaccacaaatattcaaaaacaaccgaaatatcccaaaatattcaaagcaaaataaccgaatggataccaaattttaaaaccgaaaaaactggaacaaaaccaaaatcgaaccaaaatttcaaaaatcgaataaatactaaactttagaacaaaaaaaaacgataaccgaatgtatacgaaccaaagccgaattagataaccgaacgtccaggactactcttaatctttccgccacttatgatttgggctattactttgtttataatgagccttttcaagctcaagttcatgattgtccgtgagatgagaaactgacttgttggattcgaaaccctagctagtattggttaatacttaatacataaatgacctgcattgacatcatcatccaagaaaataaaaattgtatgcttgagatatttagttttcctagctaggttttctttattttagtaccgaatctttaggtgtgccacgttaatttagacccattttttcatacttaccaactgagtctagtttaatcatgactataatcgtataaaatgattcagtcgacgtcattgcgaacgtatataaaatcatccaaattgacgtcattccaaagaggtaagcatgcttatctaagagtccgagcatactaaacaagacgacattttatttgcactccaaatcaaattttgtattgcctaaagaaaaacaatcaaactcaagtttcttaaaattaatttcattcaaactaatcactttcaatatctcacatattattcatgccatttctatttgtctaaacatgatttaaaaaaaaaagtaaaatacaaagattactatgcaaaaactctataaaaaaaaattcaaatttcttatttatttgtgacatcaaattttcaaaataatttttttaattatcggttgatccggtcagtcgataaaaacataaactttcagcgaccgttaaaactttcctactaccgatttagagaaaatcttagcttgaaacgtaattgtaacctgccttcatgcaagtcgcaagatatgtcatcctaagttgtatatgttttctcaaaagatgtatttacttgagaaaatacgtttcaacgttgatggacaaccaattaagaatcaagcacctttcgtaatcaatttaggcttatcgtctaaggtatactgatttacgacagttgactagacttataaggaacaaaataatagaatagtttctaaacacttcacctaatcatagagactaagatggtaattcgtaaacgacaaagcctagtgacactgtccattgtaaaattccacatcatattagtattaaacatatacatgtagtttcctgaacacatgtagtatcaaacacacttcgtggcttcttcctcgaaacctgcggccgcgctatagttccggacttacccttaagataacttcgtatagcatacattatacgaagttatgggcccacgcgtgaagagcggttaccagagctggtcacctttgtccaccaagatggaactgtcttcggccagaatggccatctggattcagcaggcctagaaggccatttatcgctatcaactttgtatagaaaagttgggccgaattcgagctcggtacggccagaatggcccggaccgaagcttcggccgcacactgatagtttaaacatcggaagttgaagacaaagaaggtcttaaatcctggctagcaacactgaactatgccagaaaccacatcaaagcatatcggcaagcttcttggcccattatatccaaagacctcagagaaaggtgagcgaaggctcaattcagaagattggaagctgatcaataggatcaagacaatggtgagaacgcttccaaatctcactattccaccagaagatgcatacattatcattgaaacagatgcatgtgcaactggatggggagcagtatgcaagtggaagaaaaacaaggcagacccaagaaatacagagcaaatctgtaggtatgccagtggaaaatttgataagccaaaaggaacctgtgatgcagaaatctatggggttatgaatggcttagaaaagatgagattgttctacttggacaaaagagagatcacagtcagaactgacagtagtgcaatcgaaaggttctacaacaagagtgctgaacacaagccttctgagatcagatggatcaggttcatggactacatcactggtgcaggaccagagatagtcattgaacacataaaagggaagaggaatggtttagctgacatcttgtccaggctcaaagccaaattagctcagaatgaaccaacggaagagatgatcctgcttacacaagccataagggaagtaattccttatccagatcatccatacactgagcaactcagagaatggggaaacaaaattctcgatccattccccacattcaagaaggacatgttcgaaagaacagagcaagcttttatgctaacagaggaaccagttctactctgtgcatgcaggaagcctgcaattcagttagtgtccagaacatctgccaacccaggaaggaaattcttcaagtgcgcaatgaacaaatgccattgctggtactgggcagatctcattgaagaacacattcaagacagaattgatgaatttctcaagaatcttgaagttctgaagaccggtggcgtgcaaacaatggaggaggaacttatgaaggaagtcaccaagctgaagatagaagaggaggagttcgaggaataccaggccacaccaagggctatgtcgccagtagccgcagaagatgtgctagatctccaagacgtaagcaatgacgattgaggaggcattgacgtcagggatgaccgcagcggagagtactgggcccattcagtggatgctccactgagttgtattattgtgtgcttttcggacaagtgtgctgtccactttcttttggcacctgtgccactttattccttgtctgccacgatgcctttgcttagcttgtaagcaaggatcgcagtgcgtgtgtgacaccaccccccttccgacgctctgcctatataaggcaccgtctgtaagctcttacgatcatcggtagttcaccaaggatcggtagttcaccacatgagtatttgagtcaagtttggcttgaataataagaattacacctttccgcacccgggggatctcgactctagaggatcgctcaggaaggccgctgagatagaggcatggcggccaatgcgggcggcggtggagcgggaggaggcagcggcagcggcagcgtggctgcgccggcggtgtgccgccccagcggctcgcggtggacgccgacgccggagcagatcaggatgctgaaggagctctactacggctgcggcatccggtcgcccagctcggagcagatccagcgcatcaccgccatgctgcggcagcacggcaagatcgagggcaagaacgtcttctactggttccagaaccacaaggcccgcgagcgccagaagcgccgcctcaccagcctcgacgtcaacgtgcccgccgccggcgcggccgacgccaccaccagccaactcggcgtcctctcgctgtcgtcgccgccgccttcaggcgcggcgcctccctcgcccaccctcggcttctacgccgccggcaatggcggcggatcggctgtgctgctggacacgagttccgactggggcagcagcggcgctgccatggccaccgagacatgcttcctgcaggactacatgggcgtgacggacacgggcagctcgtcgcagtggccacgcttctcgtcgtcggacacgataatggcggcggccgcggcgcgggcggcgacgacgcgggcgcccgagacgctccctctcttcccgacctgcggcgacgacggcggcagcggtagcagcagctacttgccgttctggggtgccgcgtccacaactgccggcgccacttcttccgttgcgatccagcagcaacaccagctgcaggagcagtacagcttttacagcaacagcaacagcacccagctggccggcaccggcaaccaagacgtatcggcaacagcagcagcagccgccgccctggagctgagcctcagctcatggtgctccccttaccctgctgcagggagtatgtgagagcaacgcgagctgccactgctcttcactgatgtctctggaatggaaggaggaggaagtgagcatagcgttggtgcgttgctgtcaagggcgaattcacatggttaacctagacttgtccatcttctggattggccaacttaattaatgtatgaaataaaaggatgcacacatagtgacatgctaatcactataatgtgggcatcaaagttgtgtgttatgtgtaattactagttatctgaataaaagagaaagagatcatccatatttcttatcctaaatgaatgtcacgtgtctttataattctttgatgaaccagatgcatttcattaaccaaatccatatacatataaatattaatcatatataattaatatcaattgggttagcaaaacaaatctagtctaggtgtgttttgcgaatgcggccgccaccgcggtggagctcgaattccggtccgggcctagaaggccagcttcaagtttgtacaaaaaagcaggctccggccagaatggcccggaccgggttaccgaattcgagctcggtaccatttaaattgcgcccgccacggccgtggaggtcgtattccggtcagcttgcatccctgcagtgcagcgtgacccggtcgtgcccctctctagagataatgagcattgcatgtctaagttataaaaaattaccacatattttttttgtcacacttgtttgaagtgcagtttatctatctttatacatatatttaaactttactctacgaataatataatctatagtactacaataatatcagtgttttagagaatcatataaatgaacagttagacatggtctaaaggacaattgagtattttgacaacaggactctacagttttatctttttagtgtgcatgtgttctcctttttttttgcaaatagcttcacctatataatacttcatccattttattagtacatccatttagggtttagggttaatggtttttatagactaatttttttagtacatctattttattctattttagcctctaaattaagaaaactaaaactctattttagtttttttatttaataatttagatataaaatagaataaaataaagtgactaaaaattaaacaaataccctttaagaaattaaaaaaactaaggaaacatttttcttgtttcgagtagataatgccagcctgttaaacgccgtcgacgagtctaacggacaccaaccagcgaaccagcagcgtcgcgtcgggccaagcgaagcagacggcacggcatctctgtcgctgcctctggacccctctcgagagttccgctccaccgttggacttgctccgctgtcggcatccagaaattgcgtggcggagcggcagacgtgagccggcacggcaggcggcctcctcctcctctcacggcaccggcagctacgggggattcctttcccaccgctccttcgctttcccttcctcgcccgccgtaataaatagacaccccctccacaccctctttccccaacctcgtgttgttcggagcgcacacacacacaaccagatctcccccaaatccacccgtcggcacctccgcttcaaggtacgccgctcgtcctcccccccccccctctctaccttctctagatcggcgttccggtccatgcatggttagggcccggtagttctacttctgttcatgtttgtgttagatccgtgtttgtgttagatccgtgctgctagcgttcgtacacggatgcgacctgtacgtcagacacgttctgattgctaacttgccagtgtttctctttggggaatcctgggatggctctagccgttccgcagacgggatcgatttcatgattttttttgtttcgttgcatagggtttggtttgcccttttcctttatttcaatatatgccgtgcacttgtttgtcgggtcatcttttcatgcttttttttgtcttggttgtgatgatgtggtctggttgggcggtcgttctagatcggagtagaattctgtttcaaactacctggtggatttattaattttggatctgtatgtgtgtgccatacatattcatagttacgaattgaagatgatggatggaaatatcgatctaggataggtatacatgttgatgcgggttttactgatgcatatacagagatgctttttgttcgcttggttgtgatgatgtggtgtggttgggcggtcgttcattcgttctagatcggagtagaatactgtttcaaactacctggtgtatttattaattttggaactgtatgtgtgtgtcatacatcttcatagttacgagtttaagatggatggaaatatcgatctaggataggtatacatgttgatgtgggttttactgatgcatatacatgatggcatatgcagcatctattcatatgctctaaccttgagtacctatctattataataaacaagtatgttttataattattttgatcttgatatacttggatgatggcatatgcagcagctatatgtggatttttttagccctgccttcatacgctatttatttgcttggtactgtttcttttgtcgatgctcaccctgttgtttggtgttacttctgcaggtcgactctagaggatccatggccactgtgaacaactggctcgctttctccctctccccgcaggagctgccgccctcccagacgacggactccacactcatctcggccgccaccgccgaccatgtctccggcgatgtctgcttcaacatcccccaagattggagcatgaggggatcagagctttcggcgctcgtcgcggagccgaagctggaggacttcctcggcggcatctccttctccgagcagcatcacaaggccaactgcaacatgatacccagcactagcagcacagtttgctacgcgagctcaggtgctagcaccggctaccatcaccagctgtaccaccagcccaccagctcagcgctccacttcgcggactccgtaatggtggcttcctcggccggtgtccacgacggcggtgccatgctcagcgcggccgccgctaacggtgtcgctggcgctgccagtgccaacggcggcggcatcgggctgtccatgattaagaactggctgcggagccaaccggcgcccatgcagccgagggtggcggcggctgagggcgcgcaggggctctctttgtccatgaacatggcggggacgacccaaggcgctgctggcatgccacttctcgctggagagcgcgcacgggcgcccgagagtgtatcgacgtcagcacagggtggagccgtcgtcgtcacggcgccgaaggaggatagcggtggcagcggtgttgccggcgctctagtagccgtgagcacggacacgggtggcagcggcggcgcgtcggctgacaacacggcaaggaagacggtggacacgttcgggcagcgcacgtcgatttaccgtggcgtgacaaggcatagatggactgggagatatgaggcacatctttgggataacagttgcagaagggaagggcaaactcgtaagggtcgtcaagtctatttaggtggctatgataaagaggagaaagctgctagggcttatgatcttgctgctctgaagtactggggtgccacaacaacaacaaattttccagtgagtaactacgaaaaggagctcgaggacatgaagcacatgacaaggcaggagtttgtagcgtctctgagaaggaagagcagtggtttctccagaggtgcatccatttacaggggagtgactaggcatcaccaacatggaagatggcaagcacggattggacgagttgcagggaacaaggatctttacttgggcaccttcagcacccaggaggaggcagcggaggcgtacgacatcgcggcgatcaagttccgcggcctcaacgccgtcaccaacttcgacatgagccgctacgacgtgaagagcatcctggacagcagcgccctccccatcggcagcgccgccaagcgcctcaaggaggccgaggccgcagcgtccgcgcagcaccaccacgccggcgtggtgagctacgacgtcggccgcatcgcctcgcagctcggcgacggcggagccctggcggcggcgtacggcgcgcactaccacggcgccgcctggccgaccatcgcgttccagccgggcgccgccagcacaggcctgtaccacccgtacgcgcagcagccaatgcgcggcggcgggtggtgcaagcaggagcaggaccacgcggtgatcgcggccgcgcacagcctgcaggacctccaccacctgaacctgggcgcggccggcgcgcacgactttttctcggcagggcagcaggccgccgccgctgcgatgcacggcctgggtagcatcgacagtgcgtcgctcgagcacagcaccggctccaactccgtcgtctacaacggcggggtcggcgacagcaacggcgccagcgccgtcggcggcagtggcggtggctacatgatgccgatgagcgctgccggagcaaccactacatcggcaatggtgagccacgagcaggtgcatgcacgggcctacgacgaagccaagcaggctgctcagatggggtacgagagctacctggtgaacgcggagaacaatggtggcggaaggatgtctgcatgggggactgtcgtgtctgcagccgcggcggcagcagcaagcagcaacgacaacatggccgccgacgtcgggcatggcggcgcgcagctcttcagtgtctggaacgacacttaagcgtacgtgccggcctggctctccgaaagggcgtattccagcacactggcggccgttactagacccaacctagacttgtccatcttctggattggccaacttaattaatgtatgaaataaaaggatgcacacatagtgacatgctaatcactataatgtgggcatcaaagttgtgtgttatgtgtaattactagttatctgaataaaagagaaagagatcatccatatttcttatcctaaatgaatgtcacgtgtctttataattctttgatgaaccagatgcatttcattaaccaaatccatatacatataaatattaatcatatataattaatatcaattgggttagcaaaacaaatctagtctaggtgtgttttgcgaatgcggcctccgggcacccagctttcttgtacaaagtggccgttaacggatcggccagaatggcccggaccgggttaccgaattcgagctcggtaccctggttcacaaactcaatacaacacacagtggagtagggtattacgctccggcggcccgaaccactctaaatccttgtgtcctcgtgtgctcttccaccattaatgactgtaattgcagggacacgaagagttgtagcgcttttgccaacaagatccgctatatgctagtagagtggaacctgcacagcaacaagcatccaataatctgagaataagaattatgtgtggtgatggttctcatctctgcaactcgccattttcgcgagagaaccaaatccaagttggtgaagatcatgatttgggctcatgggctggcatagtagctattacctttgcaattgtggttcgaatctatccgatattctccttttcagggagagctaatgcttatgcttattgggtattttggtttgacactgcttcacgcccaaaaaaaggcaactatgtctgagttggatatggcccaaaaaaaggcagctatgtctgagttggatatggaagtcttctttcgtttagggtgaagtaagaccaagctcatgagcttattatcttaggtcggaacaaattagttgataggcatggcacatttatcaaattataatgattttaacagaaaagcaacacctctttttcagcagcaccagctttgcaagctgcaattgacactccaagcatagtatttgctccaaactcagcctgcatttcgcacaatatcatatctatttccatttggataaaatatattttccagaaatatgggaacagaatcaagatacagaaaaaagttgtggtagtagtggtaagtggaaacacaagtacagtgaaaagatagcattatttctgaacagtcaaattaaccgaaataagtagtatcacatactgcccctaaattgactacacccaatgtaaagaattgcttgagcatattgagccatcagttgtttgtttgtgtaacggatttgacaatgcagagttcaggagcaaaaaaccgcaaaggagagaaagagggaaaggatctcctagtatcccaccttgtggcgcgccctgtcaagtgcatgatggcctggtcgatctgcgtctgctgctgcggttccatcccaacgagtgcctccgacaccttgtcgttgatcacccgcaccgcgtaggcgacccccctggcgaggaacttccgcctctcggaggccccggccgcgtcggcggcggcgccctcgagcgcgcccacgctagccgtagatgctcggtgcacggccttgttggtgtgcaactcgacctcaacggccggtgcgctacgcccgtcaaggatctggcgcgcccgcaccctcgtgatcacggtgggcgcctcccgcctcatgtggccgacgatgaaaagcgccgggttaggggccttggcgcgcaccgccgtattcagggcctcctcgctcttgcgcgagagcaggtgcttccccaggtactcctgcactgacaaggctgccacagcggtggaatttgtcctcacgacttcgccacgtcgtcctcacctccctggcttcccacgactccgccgtatcgaggtgctcggtgggtcgtcttaatccgaagtccgaactaggaagacgagacagagaggtctgaggaatgggcctcgtttgatgttgagctgaattatttttccagcataagcccaggtcttggtccatgaacaaaattactagaaacccagcccagtactacgatctaaaagagggactgccactggatagctctctctagcattctccacgctccaatacagcggcgtcgtgtctatccgggtctatccgcgaacacgtgagaactctccagaaactgctttctcctccacttcatctctctcgctttccctctataaaaagaccccttctaggaattgagggagacagcaagcaccaagcagcgatccgaagctcaatcaattcactcaaacctcttccccaaatcttcgattagatcttcgttgacaagaagactagaaccgaacctgacatgtccaacctgctcacggttcaccagaaccttccggctcttccagtggacgcgacgtccgatgaagtcaggaagaacctcatggacatgttccgcgacaggcaagcgttcagcgagcacacctggaagatgctgctctccgtctgccgctcctgggctgcatggtgcaagctgaacaacaggaagtggttccccgctgagcccgaggacgtgagggattaccttctgtacctgcaagcgcgaggtttgtttctgcttctacctttgatatatatataataattatcattaattagtagtaatataatatttcaaatatttttttcaaaataaaagaatgtagtatatagcaattgcttttctgtagtttataagtgtgtatattttaatttataacttttctaatatatgaccaaaacatggtgatgcctaggtctggcagtgaagaccatccagcaacaccttggacaactgaacatgcttcacaggcgctccggcctcccgcgccccagcgactcgaacgccgtgagcctcgtcatgcgccgcatcaggaaggaaaacgtcgatgccggcgaaagggcaaagcaggccctcgcgttcgagaggaccgatttcgaccaggtccgcagcctgatggagaacagcgacaggtgccaggacattaggaacctggcgttcctcggaattgcatacaacacgctcctcaggatcgcggaaattgcccgcattcgcgtgaaggacattagccgcaccgacggcggcaggatgcttatccacattggcaggaccaagacgctcgtttccaccgcaggcgtcgaaaaggccctcagcctcggagtgaccaagctcgtcgaacgctggatctccgtgtccggcgtcgcggacgacccaaacaactacctcttctgccgcgtccgcaagaacggggtggctgcccctagcgccaccagccaactcagcacgagggccttggaaggtattttcgaggccacccaccgcctgatctacggcgcgaaggatgacagcggtcaacgctacctcgcatggtccgggcactccgcccgcgttggagctgctagggacatggcccgcgccggtgtttccatccccgaaatcatgcaggcgggtggatggacgaacgtgaacattgtcatgaactacattcgcaaccttgacagcgagacgggcgcaatggttcgcctcctggaagatggtgactgaggtacccaacctagacttgtccatcttctggattggccaacttaattaatgtatgaaataaaaggatgcacacatagtgacatgctaatcactataatgtgggcatcaaagttgtgtgttatgtgtaattactagttatctgaataaaagagaaagagatcatccatatttcttatcctaaatgaatgtcacgtgtctttataattctttgatgaaccagatgcatttcattaaccaaatccatatacatataaatattaatcatatataattaatatcaattgggttagcaaaacaaatctagtctaggtgtgttttgcgatccgatatcgaattggccacggtaccagctgctgctgttctagggttcacaagtctgcctatttgtcttccccaatggagctatggttgtctggtctggtccttggtcgtgtcccgtttcattgtgtactatttacctgtaatgtgtatccttaagtctggtttgatggtgtctgaaacgttttgctgtggtagagcagcatggaagaactataatgaataagtgatccctaatcattgtgtccaaattttgcttctgctatacccttttgtgctgtttcttatgttttgcttaaaaatttgatctgacaaacaaatttgtctaaattatgctcttgttctgactgtgtactgtacacatttgtattgctaccggtttggcacatagttttctctttgattgcagatcaaacccttctgattgcagattgcttggctatggctgatgtgctcactgttcttctttagcttgtatattgctgatggtggcttggctacggctgaaaaagttgctgctgcgccgacttggcaactgttgctccagtaatgctttgtcctctcttcctagccgccgacttggcacttggcagctgttgctcctgtaatgcgttgttatctcttatctcttgagatgtactatgattttgaggctgtttgacttgtgccagattgccagtgctgatgctatattatctcaggtttttatgctagtatatgttttactgtgtgctgcctgtgtcgagttacgtaatctattgaaccgctatgcgtgttgatgccctgttgttgcttgccagattgatgcccctgttgcttgcagcttgcaagctgtagtgaaatcctaaaattccaaaccaaatctattctgaacttttgaagatctgtgatgtccggaagaaaagattcaaacagataaacgggactctccagaatctataaaataaatgatcgacaaacgctttgctttggtaggcttcaagcttggtcacccggtccgggcctagaaggccagcttcggccgccccgggcaactttattatacaaagttgatagataaatcagatatctggttcctaaggacccggcggaccgattaaactgattcggtccgacgcgttacctaataacttcgtatagcatacattatacgaagttattagctaactaactagtaagcttaagccatgggtcgacggatccgttaactagcgtggcatttggcaccgccgcacactatgcgagctaggagtgctagtttacagatgaaactatgaaaccaagaaaacacaattgtccgtagctagcgcgtggcgtcgtgtcaagcttcacacagtatcttcgttcttcactataaatcgcgcctgttgttcgtgagacccaccaccgtggataacagtcccctaataataagcgatcaacagcactgctgatggctgaacaccgaggcgccgccgcgcgtaaccatccgccggagcagcccgtcgtgccggcgaacgacgccttccccgaccgcgcccagcagctctgcctcgacgccgggcgcgcgctcgcgatgtgcggcgtgctcgtcgccgtccctcccgcattttacgcgtcgacgtcgcggacgacaccgcacttgccttcgtcggcttcgtcctctggatcatcggtgcgtggctgtgcctcctggcgctcacgcccttggctccacgggcggtgagggcgggcggggccgccgccagcaccttgctgatcaggtgcctgtccctttcatgaactactagcgcccgcgcccgcggccgccgggcacaagagaacacatcgatgttcgctgcgtacgtcagcaataaggcactctttgtcagtagtcgagtgcatatgttgggtgtttgccctgggagatttcaagtgttgtggccattatcccgcaggataaaaaatcggcggcttttggattgatacggaaaataacgatgtttcatgctcgtgttgtgtgtgtgacatcttgtcagccaagtttttaaccgttgctactccccctctgtgggctcagtgtgtggaccggaatacgtcgtacataggccgtagcctaagcccaatatgccgtttttcaggttggcctgtgtgacgacaagcgggtctcaaaagcccatcacgcaactggcctgcaattattggaggagagcgcgtcgagttggttccagaggctgcgtggtggggccggactctgcgacgacctctcgttcgcgtccgatttggttgccgtgagccgtgacgtaacgcctccttccgttcctccctatataagttccacccccgggtccggtttccccaagccccagtgacccccgatcccgatcgcgaaatctccgcacccgccggcaagggaccgaagcaagcctctctcccgaccgtcgcatcaaggtacgcgtccgctcgatctgtcctcttccttctcgatttgacttgctgtggtgcccgatcacgggatcagaatcgcaccagtgtagatttcgcatgttctaagatgtgttagtttccaggctaatccagttctcttgacgcccgatccgatcgagctccgtgtttatttcagcctaatcgtagtattcccctaaaatttcctcattagggggttcgcaagattgttggtcgacaggttcacttatgctcgatcgcttacttttagtcgattcatgctgcgtactattgttgccccccgtggttttatcttttctcgtgtgaaatccagtagatatagtagatatcgtagcattaggttttaattcaatcgattgattattgtatcatcaaaattgagaagttcgaatcatgcctatcatgctgcctcaaccgaaatcctgtatattgaagtttcaattcaattgattgatcattcattagattcaaccaaaatctagaaggttagatgacgcatgtcatgctgcctgcgtagtttacctttgatctgtttatgattaccttatcagtaggatatttgtgattttgggaagtagcactaactgattcatgctgacatgatgttccctttcagattatactgttgagtcctatctaattgatgctttgtatgctatatgaatacgtcatggtaaattagcagttaattagcatattagcaattgggcgtacctcatcaggattgctcttgtagatgtgtgtggtgatgtttcttgttcaattcatgttctgctttaaaagtatgtgttctctgtttgttaattaagattcatggttataatgatttggacctaattaatcagggttgcccttttagatgcgtggttacttgttgagttcatttttttcctgctatagttgtatgcgtttgttcattcatggttagatttgatttgtttcttctctattccatgccttccatatacttcaattgtagcttaacatgagatttctgtatatgcaggtcgaccgccggggatccacacgacaccatggcccagtccaagcacggcctgaccaaggagatgaccatgaagtaccgcatggagggctgcgtggacggccacaagttcgtgatcaccggcgagggcatcggctaccccttcaagggcaagcaggccatcaacctgtgcgtggtggagggcggccccttgcccttcgccgaggacatcttgtccgccgccttcatgtacggcaaccgcgtgttcaccgagtacccccaggacatcgtcgactacttcaagaactcctgccccgccggctacacctgggaccgctccttcctgttcgaggacggcgccgtgtgcatctgcaacgccgacatcaccgtgagcgtggaggagaactgcatgtaccacgagtccaagttctacggcgtgaacttccccgccgacggccccgtgatgaagaagatgaccgacaactgggagccctcctgcgagaagatcatccccgtgcccaagcagggcatcttgaagggcgacgtgagcatgtacctgctgctgaaggacggtggccgcttgcgctgccagttcgacaccgtgtacaaggccaagtccgtgccccgcaagatgcccgactggcacttcatccagcacaagctgacccgcgaggaccgcagcgacgccaagaaccagaagtggcacctgaccgagcacgccatcgcctccggctccgccttgccctccggactcagatctcgatagagtcaacctagacttgtccatcttctggattggccaacttaattaatgtatgaaataaaaggatgcacacatagtgacatgctaatcactataatgtgggcatcaaagttgtgtgttatgtgtaattactagttatctgaataaaagagaaagagatcatccatatttcttatcctaaatgaatgtcacgtgtctttataattctttgatgaaccagatgcatttcattaaccaaatccatatacatataaatattaatcatatataattaatatcaattgggttagcaaaacaaatctagtctaggtgtgttttgcgaattgcggcgcccttactttaacgcctctaaccaacacccctttatctttataaggaacaataaacagaatttgccccactgttctaaatcacctaataatatccccagctaaaaacaataaaggtttcctagaattaagacaagcatgactgttcctccaggagggtttggaacattgttgcagtcttgcagatacgggcgaagggtgagaaacagagcggagggctggaggtgacctcggtagtcgacgccggagttgagcttgacaacgacggggcggcccctgatggacttgaggaagtccgatggcgtcttcaccgtcccgccggcgcccgaggcgggcctgtcgctgccgccgccgccgctgctcatcttgcgcgctgtgcccccggcggtgtccctgtgttgcggatcgcgggtgggccaggtggatgcgagggcgacccgtttggactccggccggagccgccggatccctggtcggtgtcagtgccgtttactctgggccccacgtgtcagtaccgtctgtagatgacaacaacccgtcgtccacagtcatgtccaaaatatcctttcttcttttttttcgattcggatatctatcttccttttttttttccaaaaatcttcttgacgcaccagcgcgcacgtttgtggtaaacgccgacacgtcggtcccacgtcgatagaccccacccaccagtgagtagcgtgtacgtattcgggggtgacggacgtgtcgccgtcgtcttgctagtcccattcccatctgagccacacatctctgaacaaaaaaaaggagggaggcctccacgcacatccccctccgtgccacccgccccaaaccctcgcgccgcctccgagacagccgccgcaaccatggccaccgccgccgccgcgtctaccgcgctcactggcgccactaccgctgcgcccaaggcgaggcgccgggcgcacctcctggccacccgccgcgccctcgccgcgcccatcaggtgctcagcggcgtcacccgccatgccgatggctcccccggccaccccgctccggccgtggggccccaccgagccccgcaagggtgctgacatcctcgtcgagtccctcgagcgctgcggcgtccgcgacgtcttcgcctaccccggcggcgcgtccatggagatccaccaggcactcacccgctcccccgtcatcgccaaccacctcttccgccacgagcaaggggaggcctttgccgcctccggctacgcgcgctcctcgggccgcgtcggcgtctgcatcgccacctccggccccggcgccaccaacctagtctccgcgctcgccgacgcgctgctcgattccgtccccatggtcgccatcacgggacaggtggcgcgacgcatgattggcaccgacgccttccaggagacgcccatcgtcgaggtcacccgctccatcaccaagcacaactacctggtcctcgacgtcgacgacatcccccgcgtcgtgcaggaggctttcttcctcgcctcctctggtcgaccagggccggtgcttgtcgacatccccaaggacatccagcagcagatggcggtgcctgtctgggacaagcccatgagtctgcctgggtacattgcgcgccttcccaagccccctgcgactgagttgcttgagcaggtgctgcgtcttgttggtgaatcgcggcgccctgttctttatgtgggcggtggctgcgcagcatctggtgaggagttgcgacgctttgtggagctgactggaatcccggtcacaactactcttatgggcctcggcaacttccccagcgacgacccactgtctctgcgcatgctaggtatgcatgggacggtgtatgcaaattatgcagtggataaggccgatctgttgcttgcacttggtgtgcggtttgatgatcgcgtgacagggaagattgaggcttttgcaagcagggctaagattgtgcacgttgatattgatccggctgagattggcaagaacaagcagccacatgtgtccatctgtgcagatgttaagcttgctttgcagggcatgaatgctcttcttgaaggaagcacatcaaagaagagctttgactttggctcatggaacgatgagttggatcagcagaagagggaattcccccttgggtataaaacatctaatgaggagatccagccacaatatgctattcaggttcttgatgagctgacgaaaggcgaggccatcatcggcacaggtgttgggcagcaccagatgtgggcggcacagtactacacttacaagcggccaaggcagtggttgtcttcagctggtcttggggctatgggatttggtttgccggctgctgctggtgcttctgtggcaaacccaggtgtcactgttgttgacatcgatggagatggtagctttctcatgaacgttcaggagctagctatgatccgaattgagaacctcccagtgaaggtctttgtgctaaacaaccagcacctggggatggtggtgcagttggaggacaggttctataaggccaacagagcgcacacatacttgggaaacccagagaatgaaagtgagatatatccagatttcgtgacgatcgccaaagggttcaacattccagcggtccgtgtgacaaagaagaacgaagtccgcgcagcgataaagaagatgctcgagactccagggccgtacctcttggatataatcgtcccacaccaggagcatgtgttgcctatgatccctagtggtggggctttcaaggatatgatcctggatggtgatggcaggactgtgtactgactagctagtcagttaacagatctgccagatcctcggtgtacaaataacccgtcttatcctatgagacgggccggcgtcagtgtgttctggaggaatttttatgtcagagcctttttctttgtgtgcttgatgtagatgccaagggaagcttattggctgttgaagcttgatgcaaaataaattatggaactctgttttttgtttatctaataataactagcaaatatgcttccattgcattgaaactaacagccttttgtgtttccaagttttattttgtgacaatgtcatctatttcaattagttgtggaatcggaaacttgcaggactaacttggaaactccaatccctcagcatcctggactttttcctggtgtaatccatgtagatattattttaatcatcattttagttctggaggtttttccatctccggttttgctcccctttcttcaaaaaaaaaaaaaaaatgccgtaggcgccgcaacgcccacctgttgttcaaactcatgggcacgagtggctcgaagattttatacaacaattgctgtagtttcaccgttgctggtgaagaagcatttttttaaaaaaatatagtggtattcattttaattagtttagttgtgcagcgagcaaaatttggacatgctctgctcggaatctgatcgacctagacacagattagcagcagtagctttgtcatctgttccaagagttgcgatctgatagaagaaaaaaaaaccttcccttcaatgtaaaaccgaaactaacaagaaagaagcacagtgccgtttaggcaagtatggagtacgtattaagcatgtagaaggccatgcatgaaccactaacaagaaagaagcgcagtgccattcaggcaagcataagcatgtagattggcatgcatgaacaactaacagtagatcgtctctggtctgattagaagttttttgggaagccaagaaatcatgtacaactggttccatctcaaattccgtggcaaaaagaggcctaagcaacatacctcgagtagatcacattcaagcttggtcacccggtccgtcaatattctgattccgatgacttcgtaggttcctagctcaagccgctcgtgtccaagcgtcacttacgattagctaatgattacggcatctaggaccgactagtggcgcgccgactagctagctaaggtaccgagctcgaattcattccgattaatcgtggcctcttgctcttcaggatgaagagctatgtttaaacgtgcaagcgctactagacaattcagtacattaaaaacgtccgcaatgtgttattaagttgtctaagcgtcaatttgtttacaccacaatatatcctgcca

SEQ ID NO: 60 - DNA, 22118 bp, synthetic construct
  misc_feature 1..22118: note = PHP95989
  source 1..22118: mol_type = other DNA
gtttacccgccaatatatcctgtcaaacactgatagtttaaactgaaggcgggaaacgacaatctgatcatgagcggagaattaagggagtcacgttatgacccccgccgatgacgcgggacaagccgttttacgtttggaactgacagaaccgcaacgttgaaggagccactcagcaagctggtacgattgtaatacgactcactatagggcgaattgagcgctgtttaaacgctcttcaactggaagagcggttacgctgtttaaacgctcttcaactggaagagcggttactaccggttcactagctagctgctaatcgagctagttaccctatgaggtgacatgaagcgctcacggttactatgacggttagcttcacgactgttggtggcagtagcgtacgacttagctatagttccggacttacccttaagcgatttaaatctgcggttaccgaattcgagctcggtacctagtacccttgtacttttggtttcacctgcatagagaaaacccacaagaatatgacagtctgatttgtcagtctcattctcaagcaacatttctctatccgttactttcatggtgaataacacaatccatcatcaatactttgtgttactcagaaactgaaagttattccgagtcttgcatatctttggacctactcgtttttctaccattattgctgattgttaagctctcgctacttgaatcggcattgttggagtgggaaggttcaaaaaattggagttatgactagttgtctctttctatgtacgatggagaaaatgaataaacaactgagaaaatggctcttgtttagttgatgatgctcttaagctttccactggttgccatatatgatttgggcatttcactttgatcttaatgggccttgtaaagcccaagactcatgattatctttagttgatgctcttaattaggtgtgggcaaataattcaaactgtatgtacccgaccaaaaccaaagcaaaaataatcgaaccaaaccgaaaatttaaaaataaccgaatgaaaactaaatcctataactgaaagaactgaaaccgaatcaaaatatttaatgtaaccaaaaatatccgaaatataattatattgtcaaaaatattaataatttctagattaaataattaaaaatacttaaaaatttatataaaatagtaaaaatactcgaaaataaccacaaatattcaaaaacaaccgaaatatcccaaaatattcaaagcaaaataaccgaatggataccaaattttaaaaccgaaaaaactggaacaaaaccaaaatcgaaccaaaatttcaaaaatcgaataaatactaaactttagaacaaaaaaaaacgataaccgaatgtatacgaaccaaagccgaattagataaccgaacgtccaggactactcttaatctttccgccacttatgatttgggctattactttgtttataatgagccttttcaagctcaagttcatgattgtccgtgagatgagaaactgacttgttggattcgaaaccctagctagtattggttaatacttaatacataaatgacctgcattgacatcatcatccaagaaaataaaaattgtatgcttgagatatttagttttcctagctaggttttctttattttagtaccgaatctttaggtgtgccacgttaatttagacccattttttcatacttaccaactgagtctagtttaatcatgactataatcgtataaaatgattcagtcgacgtcattgcgaacgtatataaaatcatccaaattgacgtcattccaaagaggtaagcatgcttatctaagagtccgagcatactaaacaagacgacattttatttgcactccaaatcaaattttgtattgcctaaagaaaaacaatcaaactcaagtttcttaaaattaatttcattcaaactaatcactttcaatatctcacatattattcatgccatttctatttgtctaaacatgatttaaaaaaaaaagtaaaatacaaagattactatgcaaaaactctataaaaaaaaattcaaatttcttatttatttgtgacatcaaattttcaaaataatttttttaattatcggttgatccggtcagtcgataaaaacataaactttcagcgaccgttaaaactttcctactaccgatttagagaaaatcttagcttgaaacgtaattgtaacctgccttcatgcaagtcgcaagatatgtcatcctaagttgtatatgttttctcaaaagatgtatttacttgagaaaatacgtttcaacgttgatggacaaccaattaagaatcaagcacctttcgtaatcaatttaggcttatcgtctaaggtatactgatttacgacagttgactagacttataaggaacaaaataatagaatagtttctaaacacttcacctaatcatagagactaagatggtaattcgtaaacgacaaagcctagtgacactgtccattgtaaaattccacatcatattagtattaaacatatacatgtagtttcctgaacacatgtagtatcaaacacacttcgtggcttcttcctcgaaacctgcggccgcgctatagttccggacttacccttaagataacttcgtatagcatacattatacgaagttatgggcccacgcgtgaagagcggttaccagagctggtcacctttgtccaccaagatggaactgtcttcggccagaatggccatctggattcagcaggcctagaaggccatttatcgctatcaactttgtatagaaaagttgggccgaattcgagctcggtacggccagaatggcccggaccgaagcttagaacatgaaaaaaggactcaccaggacaggagtattgcatctatgtttttattcgaatatttctcgttacacaatagaaaaacaaaacaaatccacggaaaggataatgagcttatacgtggacaatattgagactatatttctatggttgaaatcatgtgaatttatgagagctgtacttactcactaaaacaaacaaaaaactaaaacaaacaaaaaactgaaacaaacaaaatcctccataaaaagatgaatcgaacattttctttttgtcatgatacatatatatatatatatatatatatatatatgtatatgtatatatatatatatatgtatatatatatatacacacacacacacacatatatatatatatatatatatatgtatgtatgtatatatgtatatatatatgtgtgtgtgtgtgtgaatatgttgcatatatattgagaaatggaaattaagtacaataatattctctacatagaggcgttaatgcgtcaattttgtgtgttaaagacataatctaatacaacattgaagattttctatgaatttggaaagtatgtaacactgatagtttaaactgaaggcgggaaacgacaatctgatcatgagcggagaattaagggagtcacgttatgacccccgccgatgacgcgggacaagccgttttacgtttggaactgacagaaccgcaacgttgaaggagccactcagccgcgggtttctggagtttaatgagctaagcacatacgtcagaaaccattattgcgcgttcaaaagtcgcctaaggtcactatcagctagcaaatatttcttgtcaaaaatgctccactgacgttccataaattcccctcggtatccaattagagtctcatattcactctcccgggggatctcgactctagaggatcgctcaggaaggccgctgagatagaggcatggcggccaatgcgggcggcggtggagcgggaggaggcagcggcagcggcagcgtggctgcgccggcggtgtgccgccccagcggctcgcggtggacgccgacgccggagcagatcaggatgctgaaggagctctactacggctgcggcatccggtcgcccagctcggagcagatccagcgcatcaccgccatgctgcggcagcacggcaagatcgagggcaagaacgtcttctactggttccagaaccacaaggcccgcgagcgccagaagcgccgcctcaccagcctcgacgtcaacgtgcccgccgccggcgcggccgacgccaccaccagccaactcggcgtcctctcgctgtcgtcgccgccgccttcaggcgcggcgcctccctcgcccaccctcggcttctacgccgccggcaatggcggcggatcggctgtgctgctggacacgagttccgactggggcagcagcggcgctgccatggccaccgagacatgcttcctgcaggactacatgggcgtgacggacacgggcagctcgtcgcagtggccacgcttctcgtcgtcggacacgataatggcggcggccgcggcgcgggcggcgacgacgcgggcgcccgagacgctccctctcttcccgacctgcggcgacgacggcggcagcggtagcagcagctacttgccgttctggggtgccgcgtccacaactgccggcgccacttcttccgttgcgatccagcagcaacaccagctgcaggagcagtacagcttttacagcaacagcaacagcacccagctggccggcaccggcaaccaagacgtatcggcaacagcagcagcagccgccgccctggagctgagcctcagctcatggtgctccccttaccctgctgcagggagtatgtgagagcaacgcgagctgccactgctcttcactgatgtctctggaatggaaggaggaggaagtgagcatagcgttggtgcgttgctgtcaagggcgaattcacatggttaacctagacttgtccatcttctggattggccaacttaattaatgtatgaaataaaaggatgcacacatagtgacatgctaatcactataatgtgggcatcaaagttgtgtgttatgtgtaattactagttatctgaataaaagagaaagagatcatccatatttcttatcctaaatgaatgtcacgtgtctttataattctttgatgaaccagatgcatttcattaaccaaatccatatacatataaatattaatcatatataattaatatcaattgggttagcaaaacaaatctagtctaggtgtgttttgcgaatgcggccgccaccgcggtggagctcgaattccggtccgggcctagaaggccagcttcaagtttgtacaaaaaagcaggctccggccagaatggcccggaccgggttaccgaattcgagctcggtaccatttaaattgcgcccgccacggccgtggaggtcgtattccggtcagcttgcatccctgcagtgcagcgtgacccggtcgtgcccctctctagagataatgagcattgcatgtctaagttataaaaaattaccacatattttttttgtcacacttgtttgaagtgcagtttatctatctttatacatatatttaaactttactctacgaataatataatctatagtactacaataatatcagtgttttagagaatcatataaatgaacagttagacatggtctaaaggacaattgagtattttgacaacaggactctacagttttatctttttagtgtgcatgtgttctcctttttttttgcaaatagcttcacctatataatacttcatccattttattagtacatccatttagggtttagggttaatggtttttatagactaatttttttagtacatctattttattctattttagcctctaaattaagaaaactaaaactctattttagtttttttatttaataatttagatataaaatagaataaaataaagtgactaaaaattaaacaaataccctttaagaaattaaaaaaactaaggaaacatttttcttgtttcgagtagataatgccagcctgttaaacgccgtcgacgagtctaacggacaccaaccagcgaaccagcagcgtcgcgtcgggccaagcgaagcagacggcacggcatctctgtcgctgcctctggacccctctcgagagttccgctccaccgttggacttgctccgctgtcggcatccagaaattgcgtggcggagcggcagacgtgagccggcacggcaggcggcctcctcctcctctcacggcaccggcagctacgggggattcctttcccaccgctccttcgctttcccttcctcgcccgccgtaataaatagacaccccctccacaccctctttccccaacctcgtgttgttcggagcgcacacacacacaaccagatctcccccaaatccacccgtcggcacctccgcttcaaggtacgccgctcgtcctcccccccccccctctctaccttctctagatcggcgttccggtccatgcatggttagggcccggtagttctacttctgttcatgtttgtgttagatccgtgtttgtgttagatccgtgctgctagcgttcgtacacggatgcgacctgtacgtcagacacgttctgattgctaacttgccagtgtttctctttggggaatcctgggatggctctagccgttccgcagacgggatcgatttcatgattttttttgtttcgttgcatagggtttggtttgcccttttcctttatttcaatatatgccgtgcacttgtttgtcgggtcatcttttcatgcttttttttgtcttggttgtgatgatgtggtctggttgggcggtcgttctagatcggagtagaattctgtttcaaactacctggtggatttattaattttggatctgtatgtgtgtgccatacatattcatagttacgaattgaagatgatggatggaaatatcgatctaggataggtatacatgttgatgcgggttttactgatgcatatacagagatgctttttgttcgcttggttgtgatgatgtggtgtggttgggcggtcgttcattcgttctagatcggagtagaatactgtttcaaactacctggtgtatttattaattttggaactgtatgtgtgtgtcatacatcttcatagttacgagtttaagatggatggaaatatcgatctaggataggtatacatgttgatgtgggttttactgatgcatatacatgatggcatatgcagcatctattcatatgctctaaccttgagtacctatctattataataaacaagtatgttttataattattttgatcttgatatacttggatgatggcatatgcagcagctatatgtggatttttttagccctgccttcatacgctatttatttgcttggtactgtttcttttgtcgatgctcaccctgttgtttggtgttacttctgcaggtcgactctagaggatccatggccactgtgaacaactggctcgctttctccctctccccgcaggagctgccgccctcccagacgacggactccacactcatctcggccgccaccgccgaccatgtctccggcgatgtctgcttcaacatcccccaagattggagcatgaggggatcagagctttcggcgctcgtcgcggagccgaagctggaggacttcctcggcggcatctccttctccgagcagcatcacaaggccaactgcaacatgatacccagcactagcagcacagtttgctacgcgagctcaggtgctagcaccggctaccatcaccagctgtaccaccagcccaccagctcagcgctccacttcgcggactccgtaatggtggcttcctcggccggtgtccacgacggcggtgccatgctcagcgcggccgccgctaacggtgtcgctggcgctgccagtgccaacggcggcggcatcgggctgtccatgattaagaactggctgcggagccaaccggcgcccatgcagccgagggtggcggcggctgagggcgcgcaggggctctctttgtccatgaacatggcggggacgacccaaggcgctgctggcatgccacttctcgctggagagcgcgcacgggcgcccgagagtgtatcgacgtcagcacagggtggagccgtcgtcgtcacggcgccgaaggaggatagcggtggcagcggtgttgccggcgctctagtagccgtgagcacggacacgggtggcagcggcggcgcgtcggctgacaacacggcaaggaagacggtggacacgttcgggcagcgcacgtcgatttaccgtggcgtgacaaggcatagatggactgggagatatgaggcacatctttgggataacagttgcagaagggaagggcaaactcgtaagggtcgtcaagtctatttaggtggctatgataaagaggagaaagctgctagggcttatgatcttgctgctctgaagtactggggtgccacaacaacaacaaattttccagtgagtaactacgaaaaggagctcgaggacatgaagcacatgacaaggcaggagtttgtagcgtctctgagaaggaagagcagtggtttctccagaggtgcatccatttacaggggagtgactaggcatcaccaacatggaagatggcaagcacggattggacgagttgcagggaacaaggatctttacttgggcaccttcagcacccaggaggaggcagcggaggcgtacgacatcgcggcgatcaagttccgcggcctcaacgccgtcaccaacttcgacatgagccgctacgacgtgaagagcatcctggacagcagcgccctccccatcggcagcgccgccaagcgcctcaaggaggccgaggccgcagcgtccgcgcagcaccaccacgccggcgtggtgagctacgacgtcggccgcatcgcctcgcagctcggcgacggcggagccctggcggcggcgtacggcgcgcactaccacggcgccgcctggccgaccatcgcgttccagccgggcgccgccagcacaggcctgtaccacccgtacgcgcagcagccaatgcgcggcggcgggtggtgcaagcaggagcaggaccacgcggtgatcgcggccgcgcacagcctgcaggacctccaccacctgaacctgggcgcggccggcgcgcacgactttttctcggcagggcagcaggccgccgccgctgcgatgcacggcctgggtagcatcgacagtgcgtcgctcgagcacagcaccggctccaactccgtcgtctacaacggcggggtcggcgacagcaacggcgccagcgccgtcggcggcagtggcggtggctacatgatgccgatgagcgctgccggagcaaccactacatcggcaatggtgagccacgagcaggtgcatgcacgggcctacgacgaagccaagcaggctgctcagatggggtacgagagctacctggtgaacgcggagaacaatggtggcggaaggatgtctgcatgggggactgtcgtgtctgcagccgcggcggcagcagcaagcagcaacgacaacatggccgccgacgtcgggcatggcggcgcgcagctcttcagtgtctggaacgacacttaagcgtacgtgccggcctggctctccgaaagggcgtattccagcacactggcggccgttactagacccaacctagacttgtccatcttctggattggccaacttaattaatgtatgaaataaaaggatgcacacatagtgacatgctaatcactataatgtgggcatcaaagttgtgtgttatgtgtaattactagttatctgaataaaagagaaagagatcatccatatttcttatcctaaatgaatgtcacgtgtctttataattctttgatgaaccagatgcatttcattaaccaaatccatatacatataaatattaatcatatataattaatatcaattgggttagcaaaacaaatctagtctaggtgtgttttgcgaatgcggcctccgggcacccagctttcttgtacaaagtggccgttaacggatcggccagaatggcccggaccgggttaccgaattcgagctcggtaccctggttcacaaactcaatacaacacacagtggagtagggtattacgctccggcggcccgaaccactctaaatccttgtgtcctcgtgtgctcttccaccattaatgactgtaattgcagggacacgaagagttgtagcgcttttgccaacaagatccgctatatgctagtagagtggaacctgcacagcaacaagcatccaataatctgagaataagaattatgtgtggtgatggttctcatctctgcaactcgccattttcgcgagagaaccaaatccaagttggtgaagatcatgatttgggctcatgggctggcatagtagctattacctttgcaattgtggttcgaatctatccgatattctccttttcagggagagctaatgcttatgcttattgggtattttggtttgacactgcttcacgcccaaaaaaaggcaactatgtctgagttggatatggcccaaaaaaaggcagctatgtctgagttggatatggaagtcttctttcgtttagggtgaagtaagaccaagctcatgagcttattatcttaggtcggaacaaattagttgataggcatggcacatttatcaaattataatgattttaacagaaaagcaacacctctttttcagcagcaccagctttgcaagctgcaattgacactccaagcatagtatttgctccaaactcagcctgcatttcgcacaatatcatatctatttccatttggataaaatatattttccagaaatatgggaacagaatcaagatacagaaaaaagttgtggtagtagtggtaagtggaaacacaagtacagtgaaaagatagcattatttctgaacagtcaaattaaccgaaataagtagtatcacatactgcccctaaattgactacacccaatgtaaagaattgcttgagcatattgagccatcagttgtttgtttgtgtaacggatttgacaatgcagagttcaggagcaaaaaaccgcaaaggagagaaagagggaaaggatctcctagtatcccaccttgtggcgcgccctgtcaagtgcatgatggcctggtcgatctgcgtctgctgctgcggttccatcccaacgagtgcctccgacaccttgtcgttgatcacccgcaccgcgtaggcgacccccctggcgaggaacttccgcctctcggaggccccggccgcgtcggcggcggcgccctcgagcgcgcccacgctagccgtagatgctcggtgcacggccttgttggtgtgcaactcgacctcaacggccggtgcgctacgcccgtcaaggatctggcgcgcccgcaccctcgtgatcacggtgggcgcctcccgcctcatgtggccgacgatgaaaagcgccgggttaggggccttggcgcgcaccgccgtattcagggcctcctcgctcttgcgcgagagcaggtgcttccccaggtactcctgcactgacaaggctgccacagcggtggaatttgtcctcacgacttcgccacgtcgtcctcacctccctggcttcccacgactccgccgtatcgaggtgctcggtgggtcgtcttaatccgaagtccgaactaggaagacgagacagagaggtctgaggaatgggcctcgtttgatgttgagctgaattatttttccagcataagcccaggtcttggtccatgaacaaaattactagaaacccagcccagtactacgatctaaaagagggactgccactggatagctctctctagcattctccacgctccaatacagcggcgtcgtgtctatccgggtctatccgcgaacacgtgagaactctccagaaactgctttctcctccacttcatctctctcgctttccctctataaaaagaccccttctaggaattgagggagacagcaagcaccaagcagcgatccgaagctcaatcaattcactcaaacctcttccccaaatcttcgattagatcttcgttgacaagaagactagaaccgaacctgacatgtccaacctgctcacggttcaccagaaccttccggctcttccagtggacgcgacgtccgatgaagtcaggaagaacctcatggacatgttccgcgacaggcaagcgttcagcgagcacacctggaagatgctgctctccgtctgccgctcctgggctgcatggtgcaagctgaacaacaggaagtggttccccgctgagcccgaggacgtgagggattaccttctgtacctgcaagcgcgaggtttgtttctgcttctacctttgatatatatataataattatcattaattagtagtaatataatatttcaaatatttttttcaaaataaaagaatgtagtatatagcaattgcttttctgtagtttataagtgtgtatattttaatttataacttttctaatatatgaccaaaacatggtgatgcctaggtctggcagtgaagaccatccagcaacaccttggacaactgaacatgcttcacaggcgctccggcctcccgcgccccagcgactcgaacgccgtgagcctcgtcatgcgccgcatcaggaaggaaaacgtcgatgccggcgaaagggcaaagcaggccctcgcgttcgagaggaccgatttcgaccaggtccgcagcctgatggagaacagcgacaggtgccaggacattaggaacctggcgttcctcggaattgcatacaacacgctcctcaggatcgcggaaattgcccgcattcgcgtgaaggacattagccgcaccgacggcggcaggatgcttatccacattggcaggaccaagacgctcgtttccaccgcaggcgtcgaaaaggccctcagcctcggagtgaccaagctcgtcgaacgctggatctccgtgtccggcgtcgcggacgacccaaacaactacctcttctgccgcgtccgcaagaacggggtggctgcccctagcgccaccagccaactcagcacgagggccttggaaggtattttcgaggccacccaccgcctgatctacggcgcgaaggatgacagcggtcaacgctacctcgcatggtccgggcactccgcccgcgttggagctgctagggacatggcccgcgccggtgtttccatccccgaaatcatgcaggcgggtggatggacgaacgtgaacattgtcatgaactacattcgcaaccttgacagcgagacgggcgcaatggttcgcctcctggaagatggtgactgaggtacccaacctagacttgtccatcttctggattggccaacttaattaatgtatgaaataaaaggatgcacacatagtgacatgctaatcactataatgtgggcatcaaagttgtgtgttatgtgtaattactagttatctgaataaaagagaaagagatcatccatatttcttatcctaaatgaatgtcacgtgtctttataattctttgatgaaccagatgcatttcattaaccaaatccatatacatataaatattaatcatatataattaatatcaattgggttagcaaaacaaatctagtctaggtgtgttttgcgatccgatatcgaattggccacggtaccagctgctgctgttctagggttcacaagtctgcctatttgtcttccccaatggagctatggttgtctggtctggtccttggtcgtgtcccgtttcattgtgtactatttacctgtaatgtgtatccttaagtctggtttgatggtgtctgaaacgttttgctgtggtagagcagcatggaagaactataatgaataagtgatccctaatcattgtgtccaaattttgcttctgctatacccttttgtgctgtttcttatgttttgcttaaaaatttgatctgacaaacaaatttgtctaaattatgctcttgttctgactgtgtactgtacacatttgtattgctaccggtttggcacatagttttctctttgattgcagatcaaacccttctgattgcagattgcttggctatggctgatgtgctcactgttcttctttagcttgtatattgctgatggtggcttggctacggctgaaaaagttgctgctgcgccgacttggcaactgttgctccagtaatgctttgtcctctcttcctagccgccgacttggcacttggcagctgttgctcctgtaatgcgttgttatctcttatctcttgagatgtactatgattttgaggctgtttgacttgtgccagattgccagtgctgatgctatattatctcaggtttttatgctagtatatgttttactgtgtgctgcctgtgtcgagttacgtaatctattgaaccgctatgcgtgttgatgccctgttgttgcttgccagattgatgcccctgttgcttgcagcttgcaagctgtagtgaaatcctaaaattccaaaccaaatctattctgaacttttgaagatctgtgatgtccggaagaaaagattcaaacagataaacgggactctccagaatctataaaataaatgatcgacaaacgctttgctttggtaggcttcaagcttggtcacccggtccgggcctagaaggccagcttcggccgccccgggcaactttattatacaaagttgatagataaatcagatatctggttcctaaggacccggcggaccgattaaactgattcggtccgacgcgttacctaataacttcgtatagcatacattatacgaagttattagctaactaactagtaagcttaagccatgggtcgacggatccgttaactagcgtggcatttggcaccgccgcacactatgcgagctaggagtgctagtttacagatgaaactatgaaaccaagaaaacacaattgtccgtagctagcgcgtggcgtcgtgtcaagcttcacacagtatcttcgttcttcactataaatcgcgcctgttgttcgtgagacccaccaccgtggataacagtcccctaataataagcgatcaacagcactgctgatggctgaacaccgaggcgccgccgcgcgtaaccatccgccggagcagcccgtcgtgccggcgaacgacgccttccccgaccgcgcccagcagctctgcctcgacgccgggcgcgcgctcgcgatgtgcggcgtgctcgtcgccgtccctcccgcattttacgcgtcgacgtcgcggacgacaccgcacttgccttcgtcggcttcgtcctctggatcatcggtgcgtggctgtgcctcctggcgctcacgcccttggctccacgggcggtgagggcgggcggggccgccgccagcaccttgctgatcaggtgcctgtccctttcatgaactactagcgcccgcgcccgcggccgccgggcacaagagaacacatcgatgttcgctgcgtacgtcagcaataaggcactctttgtcagtagtcgagtgcatatgttgggtgtttgccctgggagatttcaagtgttgtggccattatcccgcaggataaaaaatcggcggcttttggattgatacggaaaataacgatgtttcatgctcgtgttgtgtgtgtgacatcttgtcagccaagtttttaaccgttgctactccccctctgtgggctcagtgtgtggaccggaatacgtcgtacataggccgtagcctaagcccaatatgccgtttttcaggttggcctgtgtgacgacaagcgggtctcaaaagcccatcacgcaactggcctgcaattattggaggagagcgcgtcgagttggttccagaggctgcgtggtggggccggactctgcgacgacctctcgttcgcgtccgatttggttgccgtgagccgtgacgtaacgcctccttccgttcctccctatataagttccacccccgggtccggtttccccaagccccagtgacccccgatcccgatcgcgaaatctccgcacccgccggcaagggaccgaagcaagcctctctcccgaccgtcgcatcaaggtacgcgtccgctcgatctgtcctcttccttctcgatttgacttgctgtggtgcccgatcacgggatcagaatcgcaccagtgtagatttcgcatgttctaagatgtgttagtttccaggctaatccagttctcttgacgcccgatccgatcgagctccgtgtttatttcagcctaatcgtagtattcccctaaaatttcctcattagggggttcgcaagattgttggtcgacaggttcacttatgctcgatcgcttacttttagtcgattcatgctgcgtactattgttgccccccgtggttttatcttttctcgtgtgaaatccagtagatatagtagatatcgtagcattaggttttaattcaatcgattgattattgtatcatcaaaattgagaagttcgaatcatgcctatcatgctgcctcaaccgaaatcctgtatattgaagtttcaattcaattgattgatcattcattagattcaaccaaaatctagaaggttagatgacgcatgtcatgctgcctgcgtagtttacctttgatctgtttatgattaccttatcagtaggatatttgtgattttgggaagtagcactaactgattcatgctgacatgatgttccctttcagattatactgttgagtcctatctaattgatgctttgtatgctatatgaatacgtcatggtaaattagcagttaattagcatattagcaattgggcgtacctcatcaggattgctcttgtagatgtgtgtggtgatgtttcttgttcaattcatgttctgctttaaaagtatgtgttctctgtttgttaattaagattcatggttataatgatttggacctaattaatcagggttgcccttttagatgcgtggttacttgttgagttcatttttttcctgctatagttgtatgcgtttgttcattcatggttagatttgatttgtttcttctctattccatgccttccatatacttcaattgtagcttaacatgagatttctgtatatgcaggtcgaccgccggggatccacacgacaccatggcccagtccaagcacggcctgaccaaggagatgaccatgaagtaccgcatggagggctgcgtggacggccacaagttcgtgatcaccggcgagggcatcggctaccccttcaagggcaagcaggccatcaacctgtgcgtggtggagggcggccccttgcccttcgccgaggacatcttgtccgccgccttcatgtacggcaaccgcgtgttcaccgagtacccccaggacatcgtcgactacttcaagaactcctgccccgccggctacacctgggaccgctccttcctgttcgaggacggcgccgtgtgcatctgcaacgccgacatcaccgtgagcgtggaggagaactgcatgtaccacgagtccaagttctacggcgtgaacttccccgccgacggccccgtgatgaagaagatgaccgacaactgggagccctcctgcgagaagatcatccccgtgcccaagcagggcatcttgaagggcgacgtgagcatgtacctgctgctgaaggacggtggccgcttgcgctgccagttcgacaccgtgtacaaggccaagtccgtgccccgcaagatgcccgactggcacttcatccagcacaagctgacccgcgaggaccgcagcgacgccaagaaccagaagtggcacctgaccgagcacgccatcgcctccggctccgccttgccctccggactcagatctcgatagagtcaacctagacttgtccatcttctggattggccaacttaattaatgtatgaaataaaaggatgcacacatagtgacatgctaatcactataatgtgggcatcaaagttgtgtgttatgtgtaattactagttatctgaataaaagagaaagagatcatccatatttcttatcctaaatgaatgtcacgtgtctttataattctttgatgaaccagatgcatttcattaaccaaatccatatacatataaatattaatcatatataattaatatcaattgggttagcaaaacaaatctagtctaggtgtgttttgcgaattgcggcgcccttactttaacgcctctaaccaacacccctttatctttataaggaacaataaacagaatttgccccactgttctaaatcacctaataatatccccagctaaaaacaataaaggtttcctagaattaagacaagcatgactgttcctccaggagggtttggaacattgttgcagtcttgcagatacgggcgaagggtgagaaacagagcggagggctggaggtgacctcggtagtcgacgccggagttgagcttgacaacgacggggcggcccctgatggacttgaggaagtccgatggcgtcttcaccgtcccgccggcgcccgaggcgggcctgtcgctgccgccgccgccgctgctcatcttgcgcgctgtgcccccggcggtgtccctgtgttgcggatcgcgggtgggccaggtggatgcgagggcgacccgtttggactccggccggagccgccggatccctggtcggtgtcagtgccgtttactctgggccccacgtgtcagtaccgtctgtagatgacaacaacccgtcgtccacagtcatgtccaaaatatcctttcttcttttttttcgattcggatatctatcttccttttttttttccaaaaatcttcttgacgcaccagcgcgcacgtttgtggtaaacgccgacacgtcggtcccacgtcgatagaccccacccaccagtgagtagcgtgtacgtattcgggggtgacggacgtgtcgccgtcgtcttgctagtcccattcccatctgagccacacatctctgaacaaaaaaaaggagggaggcctccacgcacatccccctccgtgccacccgccccaaaccctcgcgccgcctccgagacagccgccgcaaccatggccaccgccgccgccgcgtctaccgcgctcactggcgccactaccgctgcgcccaaggcgaggcgccgggcgcacctcctggccacccgccgcgccctcgccgcgcccatcaggtgctcagcggcgtcacccgccatgccgatggctcccccggccaccccgctccggccgtggggccccaccgagccccgcaagggtgctgacatcctcgtcgagtccctcgagcgctgcggcgtccgcgacgtcttcgcctaccccggcggcgcgtccatggagatccaccaggcactcacccgctcccccgtcatcgccaaccacctcttccgccacgagcaaggggaggcctttgccgcctccggctacgcgcgctcctcgggccgcgtcggcgtctgcatcgccacctccggccccggcgccaccaacctagtctccgcgctcgccgacgcgctgctcgattccgtccccatggtcgccatcacgggacaggtggcgcgacgcatgattggcaccgacgccttccaggagacgcccatcgtcgaggtcacccgctccatcaccaagcacaactacctggtcctcgacgtcgacgacatcccccgcgtcgtgcaggaggctttcttcctcgcctcctctggtcgaccagggccggtgcttgtcgacatccccaaggacatccagcagcagatggcggtgcctgtctgggacaagcccatgagtctgcctgggtacattgcgcgccttcccaagccccctgcgactgagttgcttgagcaggtgctgcgtcttgttggtgaatcgcggcgccctgttctttatgtgggcggtggctgcgcagcatctggtgaggagttgcgacgctttgtggagctgactggaatcccggtcacaactactcttatgggcctcggcaacttccccagcgacgacccactgtctctgcgcatgctaggtatgcatgggacggtgtatgcaaattatgcagtggataaggccgatctgttgcttgcacttggtgtgcggtttgatgatcgcgtgacagggaagattgaggcttttgcaagcagggctaagattgtgcacgttgatattgatccggctgagattggcaagaacaagcagccacatgtgtccatctgtgcagatgttaagcttgctttgcagggcatgaatgctcttcttgaaggaagcacatcaaagaagagctttgactttggctcatggaacgatgagttggatcagcagaagagggaattcccccttgggtataaaacatctaatgaggagatccagccacaatatgctattcaggttcttgatgagctgacgaaaggcgaggccatcatcggcacaggtgttgggcagcaccagatgtgggcggcacagtactacacttacaagcggccaaggcagtggttgtcttcagctggtcttggggctatgggatttggtttgccggctgctgctggtgcttctgtggcaaacccaggtgtcactgttgttgacatcgatggagatggtagctttctcatgaacgttcaggagctagctatgatccgaattgagaacctcccagtgaaggtctttgtgctaaacaaccagcacctggggatggtggtgcagttggaggacaggttctataaggccaacagagcgcacacatacttgggaaacccagagaatgaaagtgagatatatccagatttcgtgacgatcgccaaagggttcaacattccagcggtccgtgtgacaaagaagaacgaagtccgcgcagcgataaagaagatgctcgagactccagggccgtacctcttggatataatcgtcccacaccaggagcatgtgttgcctatgatccctagtggtggggctttcaaggatatgatcctggatggtgatggcaggactgtgtactgactagctagtcagttaacagatctgccagatcctcggtgtacaaataacccgtcttatcctatgagacgggccggcgtcagtgtgttctggaggaatttttatgtcagagcctttttctttgtgtgcttgatgtagatgccaagggaagcttattggctgttgaagcttgatgcaaaataaattatggaactctgttttttgtttatctaataataactagcaaatatgcttccattgcattgaaactaacagccttttgtgtttccaagttttattttgtgacaatgtcatctatttcaattagttgtggaatcggaaacttgcaggactaacttggaaactccaatccctcagcatcctggactttttcctggtgtaatccatgtagatattattttaatcatcattttagttctggaggtttttccatctccggttttgctcccctttcttcaaaaaaaaaaaaaaaatgccgtaggcgccgcaacgcccacctgttgttcaaactcatgggcacgagtggctcgaagattttatacaacaattgctgtagtttcaccgttgctggtgaagaagcatttttttaaaaaaatatagtggtattcattttaattagtttagttgtgcagcgagcaaaatttggacatgctctgctcggaatctgatcgacctagacacagattagcagcagtagctttgtcatctgttccaagagttgcgatctgatagaagaaaaaaaaaccttcccttcaatgtaaaaccgaaactaacaagaaagaagcacagtgccgtttaggcaagtatggagtacgtattaagcatgtagaaggccatgcatgaaccactaacaagaaagaagcgcagtgccattcaggcaagcataagcatgtagattggcatgcatgaacaactaacagtagatcgtctctggtctgattagaagttttttgggaagccaagaaatcatgtacaactggttccatctcaaattccgtggcaaaaagaggcctaagcaacatacctcgagtagatcacattcaagcttggtcacccggtccgtcaatattctgattccgatgacttcgtaggttcctagctcaagccgctcgtgtccaagcgtcacttacgattagctaatgattacggcatctaggaccgactagtggcgcgccgactagctagctaaggtaccgagctcgaattcattccgattaatcgtggcctcttgctcttcaggatgaagagctatgtttaaacgtgcaagcgctactagacaattcagtacattaaaaacgtccgcaatgtgttattaagttgtctaagcgtcaatttgtttacaccacaatatatcctgcca

SEQ ID NO: 61 - DNA, 20120 bp, synthetic construct
  misc_feature 1..20120: note = PHP95990
  source 1..20120: mol_type = other DNA
gtttacccgccaatatatcctgtcaaacactgatagtttaaactgaaggcgggaaacgacaatctgatcatgagcggagaattaagggagtcacgttatgacccccgccgatgacgcgggacaagccgttttacgtttggaactgacagaaccgcaacgttgaaggagccactcagcaagctggtacgattgtaatacgactcactatagggcgaattgagcgctgtttaaacgctcttcaactggaagagcggttacgctgtttaaacgctcttcaactggaagagcggttactaccggttcactagctagctgctaatcgagctagttaccctatgaggtgacatgaagcgctcacggttactatgacggttagcttcacgactgttggtggcagtagcgtacgacttagctatagttccggacttacccttaagcgatttaaatctgcggttaccgaattcgagctcggtacctagtacccttgtacttttggtttcacctgcatagagaaaacccacaagaatatgacagtctgatttgtcagtctcattctcaagcaacatttctctatccgttactttcatggtgaataacacaatccatcatcaatactttgtgttactcagaaactgaaagttattccgagtcttgcatatctttggacctactcgtttttctaccattattgctgattgttaagctctcgctacttgaatcggcattgttggagtgggaaggttcaaaaaattggagttatgactagttgtctctttctatgtacgatggagaaaatgaataaacaactgagaaaatggctcttgtttagttgatgatgctcttaagctttccactggttgccatatatgatttgggcatttcactttgatcttaatgggccttgtaaagcccaagactcatgattatctttagttgatgctcttaattaggtgtgggcaaataattcaaactgtatgtacccgaccaaaaccaaagcaaaaataatcgaaccaaaccgaaaatttaaaaataaccgaatgaaaactaaatcctataactgaaagaactgaaaccgaatcaaaatatttaatgtaaccaaaaatatccgaaatataattatattgtcaaaaatattaataatttctagattaaataattaaaaatacttaaaaatttatataaaatagtaaaaatactcgaaaataaccacaaatattcaaaaacaaccgaaatatcccaaaatattcaaagcaaaataaccgaatggataccaaattttaaaaccgaaaaaactggaacaaaaccaaaatcgaaccaaaatttcaaaaatcgaataaatactaaactttagaacaaaaaaaaacgataaccgaatgtatacgaaccaaagccgaattagataaccgaacgtccaggactactcttaatctttccgccacttatgatttgggctattactttgtttataatgagccttttcaagctcaagttcatgattgtccgtgagatgagaaactgacttgttggattcgaaaccctagctagtattggttaatacttaatacataaatgacctgcattgacatcatcatccaagaaaataaaaattgtatgcttgagatatttagttttcctagctaggttttctttattttagtaccgaatctttaggtgtgccacgttaatttagacccattttttcatacttaccaactgagtctagtttaatcatgactataatcgtataaaatgattcagtcgacgtcattgcgaacgtatataaaatcatccaaattgacgtcattccaaagaggtaagcatgcttatctaagagtccgagcatactaaacaagacgacattttatttgcactccaaatcaaattttgtattgcctaaagaaaaacaatcaaactcaagtttcttaaaattaatttcattcaaactaatcactttcaatatctcacatattattcatgccatttctatttgtctaaacatgatttaaaaaaaaaagtaaaatacaaagattactatgcaaaaactctataaaaaaaaattcaaatttcttatttatttgtgacatcaaattttcaaaataatttttttaattatcggttgatccggtcagtcgataaaaacataaactttcagcgaccgttaaaactttcctactaccgatttagagaaaatcttagcttgaaacgtaattgtaacctgccttcatgcaagtcgcaagatatgtcatcctaagttgtatatgttttctcaaaagatgtatttacttgagaaaatacgtttcaacgttgatggacaaccaattaagaatcaagcacctttcgtaatcaatttaggcttatcgtctaaggtatactgatttacgacagttgactagacttataaggaacaaaataatagaatagtttctaaacacttcacctaatcatagagactaagatggtaattcgtaaacgacaaagcctagtgacactgtccattgtaaaattccacatcatattagtattaaacatatacatgtagtttcctgaacacatgtagtatcaaacacacttcgtggcttcttcctcgaaacctgcggccgcgctatagttccggacttacccttaagataacttcgtatagcatacattatacgaagttatgggcccacgcgtgaagagcggttaccagagctggtcacctttgtccaccaagatggaactgtcttcggccagaatggccatctggattcagcaggcctagaaggccatttatcgctatcaactttgtatagaaaagttgggccgaattcgagctcggtacggccagaatggcccggaccgaagcttgcggccgcacactgatagtttaaactgaaggcgggaaacgacaatctgatcatgagcggagaattaagggagtcacgttatgacccccgccgatgacgcgggacaagccgttttacgtttggaactgacagaaccgcaacgttgaaggagccactcagccgcgggtttctggagtttaatgagctaagcacatacgtcagaaaccattattgcgcgttcaaaagtcgcctaaggtcactatcagctagcaaatatttcttgtcaaaaatgctccactgacgttccataaattcccctcggtatccaattagagtctcatattcactctcccgggggatctcgactctagaggatcgctcaggaaggccgctgagatagaggcatggcggccaatgcgggcggcggtggagcgggaggaggcagcggcagcggcagcgtggctgcgccggcggtgtgccgccccagcggctcgcggtggacgccgacgccggagcagatcaggatgctgaaggagctctactacggctgcggcatccggtcgcccagctcggagcagatccagcgcatcaccgccatgctgcggcagcacggcaagatcgagggcaagaacgtcttctactggttccagaaccacaaggcccgcgagcgccagaagcgccgcctcaccagcctcgacgtcaacgtgcccgccgccggcgcggccgacgccaccaccagccaactcggcgtcctctcgctgtcgtcgccgccgccttcaggcgcggcgcctccctcgcccaccctcggcttctacgccgccggcaatggcggcggatcggctgtgctgctggacacgagttccgactggggcagcagcggcgctgccatggccaccgagacatgcttcctgcaggactacatgggcgtgacggacacgggcagctcgtcgcagtggccacgcttctcgtcgtcggacacgataatggcggcggccgcggcgcgggcggcgacgacgcgggcgcccgagacgctccctctcttcccgacctgcggcgacgacggcggcagcggtagcagcagctacttgccgttctggggtgccgcgtccacaactgccggcgccacttcttccgttgcgatccagcagcaacaccagctgcaggagcagtacagcttttacagcaacagcaacagcacccagctggccggcaccggcaaccaagacgtatcggcaacagcagcagcagccgccgccctggagctgagcctcagctcatggtgctccccttaccctgctgcagggagtatgtgagagcaacgcgagctgccactgctcttcactgatgtctctggaatggaaggaggaggaagtgagcatagcgttggtgcgttgctgtcaagggcgaattcacatggttaacctagacttgtccatcttctggattggccaacttaattaatgtatgaaataaaaggatgcacacatagtgacatgctaatcactataatgtgggcatcaaagttgtgtgttatgtgtaattactagttatctgaataaaagagaaagagatcatccatatttcttatcctaaatgaatgtcacgtgtctttataattctttgatgaaccagatgcatttcattaaccaaatccatatacatataaatattaatcatatataattaatatcaattgggttagcaaaacaaatctagtctaggtgtgttttgcgaatgcggccgccaccgcggtggagctcgaattccggtccgggcctagaaggccagcttcaagtttgtacaaaaaagcaggctccggccagagttacccggaccgaagcttgcatgcctgcagtgcagcgtgacccggtcgtgcccctctctagagataatgagcattgcatgtctaagttataaaaaattaccacatattttttttgtcacacttgtttgaagtgcagtttatctatctttatacatatatttaaactttactctacgaataatataatctatagtactacaataatatcagtgttttagagaatcatataaatgaacagttagacatggtctaaaggacaattgagtattttgacaacaggactctacagttttatctttttagtgtgcatgtgttctcctttttttttgcaaatagcttcacctatataatacttcatccattttattagtacatccatttagggtttagggttaatggtttttatagactaatttttttagtacatctattttattctattttagcctctaaattaagaaaactaaaactctattttagtttttttatttaataatttagatataaaatagaataaaataaagtgactaaaaattaaacaaataccctttaagaaattaaaaaaactaaggaaacatttttcttgtttcgagtagataatgccagcctgttaaacgccgtcgacgagtctaacggacaccaaccagcgaaccagcagcgtcgcgtcgggccaagcgaagcagacggcacggcatctctgtcgctgcctctggacccctctcgagagttccgctccaccgttggacttgctccgctgtcggcatccagaaattgcgtggcggagcggcagacgtgagccggcacggcaggcggcctcctcctcctctcacggcaccggcagctacgggggattcctttcccaccgctccttcgctttcccttcctcgcccgccgtaataaatagacaccccctccacaccctctttccccaacctcgtgttgttcggagcgcacacacacacaaccagatctcccccaaatccacccgtcggcacctccgcttcaaggtacgccgctcgtcctcccccccccccctctctaccttctctagatcggcgttccggtccatgcatggttagggcccggtagttctacttctgttcatgtttgtgttagatccgtgtttgtgttagatccgtgctgctagcgttcgtacacggatgcgacctgtacgtcagacacgttctgattgctaacttgccagtgtttctctttggggaatcctgggatggctctagccgttccgcagacgggatcgatttcatgattttttttgtttcgttgcatagggtttggtttgcccttttcctttatttcaatatatgccgtgcacttgtttgtcgggtcatcttttcatgcttttttttgtcttggttgtgatgatgtggtctggttgggcggtcgttctagatcggagtagaattctgtttcaaactacctggtggatttattaattttggatctgtatgtgtgtgccatacatattcatagttacgaattgaagatgatggatggaaatatcgatctaggataggtatacatgttgatgcgggttttactgatgcatatacagagatgctttttgttcgcttggttgtgatgatgtggtgtggttgggcggtcgttcattcgttctagatcggagtagaatactgtttcaaactacctggtgtatttattaattttggaactgtatgtgtgtgtcatacatcttcatagttacgagtttaagatggatggaaatatcgatctaggataggtatacatgttgatgtgggttttactgatgcatatacatgatggcatatgcagcatctattcatatgctctaaccttgagtacctatctattataataaacaagtatgttttataattattttgatcttgatatacttggatgatggcatatgcagcagctatatgtggatttttttagccctgccttcatacgctatttatttgcttggtactgtttcttttgtcgatgctcaccctgttgtttggtgttacttctgcaggtcgactttaacttagcctaggatccatggtgagcgccctgagcagggtgatcgagaacccgaccgacccgccggtgaagcaggagctggacaagagcgaccagcaccagccggaccaggaccagccgaggaggaggcactacaggggcgtgaggcagaggccgtggggcaagtgggccgccgagatcagggacccgaagaaggccgccagggtgtggctgggcaccttcgagaccgccgaggaggccgccctggcctacgacagggccgccctgaagttcaagggcaccaaggccaagctgaacttcccggagagggtgcagggcccgaccaccaccaccaccatcagccacgccccgaggggcgtgagcgagagcatgaacagcccgccgccgaggccgggcccgccgagcaccaccaccaccagctggccgatgacctacaaccaggacatcctgcagtacgcccagctgctgaccagcaacaacgaggtggacctgagctactacaccagcaccctgttcagccagccgttcagcaccccgagcagcagcagcagcagcagccagcagacccagcagcagcagctgcagcagcagcagcagcagagggaggaggaggagaagaactacggctacaactactacaactacccgagggagtagggtaccgttaacagatctactaactatctatactgtaataatgttgtatagccgccggatagctagctagtttagtcattcagcggcgatgggtaataataaagtgtcatccatccatcaccatgcgtggcaacgtgagcaatgacctgattgaacaaattgaaatgaaaagaagaaatatgttatatgtcaacgagatttcctcataatgccactgacgacgtgtgtccaagaaatgtatcagtgatacgtatattcacaatttttttatgacttatactcacaatttgtttttttactacttatactcacaatttgttgtgcgtaccataacaatttcgatcgaatatatatcagaaagttgacgaaagtaagctcactcaaaaagttaaatgggctgcggaagctgcgtcaggcccaagttttggctattctatccggtatccacgattttgatggctgagggacatatgttcgcttaagcttcggtccgggcctagaaggccgatctcccgggcacccagctttcttgtacaaagtggccgttaacggatcggccagaatggcccggaccgggttaccgaattcgagctcggtaccctggttcacaaactcaatacaacacacagtggagtagggtattacgctccggcggcccgaaccactctaaatccttgtgtcctcgtgtgctcttccaccattaatgactgtaattgcagggacacgaagagttgtagcgcttttgccaacaagatccgctatatgctagtagagtggaacctgcacagcaacaagcatccaataatctgagaataagaattatgtgtggtgatggttctcatctctgcaactcgccattttcgcgagagaaccaaatccaagttggtgaagatcatgatttgggctcatgggctggcatagtagctattacctttgcaattgtggttcgaatctatccgatattctccttttcagggagagctaatgcttatgcttattgggtattttggtttgacactgcttcacgcccaaaaaaaggcaactatgtctgagttggatatggcccaaaaaaaggcagctatgtctgagttggatatggaagtcttctttcgtttagggtgaagtaagaccaagctcatgagcttattatcttaggtcggaacaaattagttgataggcatggcacatttatcaaattataatgattttaacagaaaagcaacacctctttttcagcagcaccagctttgcaagctgcaattgacactccaagcatagtatttgctccaaactcagcctgcatttcgcacaatatcatatctatttccatttggataaaatatattttccagaaatatgggaacagaatcaagatacagaaaaaagttgtggtagtagtggtaagtggaaacacaagtacagtgaaaagatagcattatttctgaacagtcaaattaaccgaaataagtagtatcacatactgcccctaaattgactacacccaatgtaaagaattgcttgagcatattgagccatcagttgtttgtttgtgtaacggatttgacaatgcagagttcaggagcaaaaaaccgcaaaggagagaaagagggaaaggatctcctagtatcccaccttgtggcgcgccctgtcaagtgcatgatggcctggtcgatctgcgtctgctgctgcggttccatcccaacgagtgcctccgacaccttgtcgttgatcacccgcaccgcgtaggcgacccccctggcgaggaacttccgcctctcggaggccccggccgcgtcggcggcggcgccctcgagcgcgcccacgctagccgtagatgctcggtgcacggccttgttggtgtgcaactcgacctcaacggccggtgcgctacgcccgtcaaggatctggcgcgcccgcaccctcgtgatcacggtgggcgcctcccgcctcatgtggccgacgatgaaaagcgccgggttaggggccttggcgcgcaccgccgtattcagggcctcctcgctcttgcgcgagagcaggtgcttccccaggtactcctgcactgacaaggctgccacagcggtggaatttgtcctcacgacttcgccacgtcgtcctcacctccctggcttcccacgactccgccgtatcgaggtgctcggtgggtcgtcttaatccgaagtccgaactaggaagacgagacagagaggtctgaggaatgggcctcgtttgatgttgagctgaattatttttccagcataagcccaggtcttggtccatgaacaaaattactagaaacccagcccagtactacgatctaaaagagggactgccactggatagctctctctagcattctccacgctccaatacagcggcgtcgtgtctatccgggtctatccgcgaacacgtgagaactctccagaaactgctttctcctccacttcatctctctcgctttccctctataaaaagaccccttctaggaattgagggagacagcaagcaccaagcagcgatccgaagctcaatcaattcactcaaacctcttccccaaatcttcgattagatcttcgttgacaagaagactagaaccgaacctgacatgtccaacctgctcacggttcaccagaaccttccggctcttccagtggacgcgacgtccgatgaagtcaggaagaacctcatggacatgttccgcgacaggcaagcgttcagcgagcacacctggaagatgctgctctccgtctgccgctcctgggctgcatggtgcaagctgaacaacaggaagtggttccccgctgagcccgaggacgtgagggattaccttctgtacctgcaagcgcgaggtttgtttctgcttctacctttgatatatatataataattatcattaattagtagtaatataatatttcaaatatttttttcaaaataaaagaatgtagtatatagcaattgcttttctgtagtttataagtgtgtatattttaatttataacttttctaatatatgaccaaaacatggtgatgcctaggtctggcagtgaagaccatccagcaacaccttggacaactgaacatgcttcacaggcgctccggcctcccgcgccccagcgactcgaacgccgtgagcctcgtcatgcgccgcatcaggaaggaaaacgtcgatgccggcgaaagggcaaagcaggccctcgcgttcgagaggaccgatttcgaccaggtccgcagcctgatggagaacagcgacaggtgccaggacattaggaacctggcgttcctcggaattgcatacaacacgctcctcaggatcgcggaaattgcccgcattcgcgtgaaggacattagccgcaccgacggcggcaggatgcttatccacattggcaggaccaagacgctcgtttccaccgcaggcgtcgaaaaggccctcagcctcggagtgaccaagctcgtcgaacgctggatctccgtgtccggcgtcgcggacgacccaaacaactacctcttctgccgcgtccgcaagaacggggtggctgcccctagcgccaccagccaactcagcacgagggccttggaaggtattttcgaggccacccaccgcctgatctacggcgcgaaggatgacagcggtcaacgctacctcgcatggtccgggcactccgcccgcgttggagctgctagggacatggcccgcgccggtgtttccatccccgaaatcatgcaggcgggtggatggacgaacgtgaacattgtcatgaactacattcgcaaccttgacagcgagacgggcgcaatggttcgcctcctggaagatggtgactgaggtacccaacctagacttgtccatcttctggattggccaacttaattaatgtatgaaataaaaggatgcacacatagtgacatgctaatcactataatgtgggcatcaaagttgtgtgttatgtgtaattactagttatctgaataaaagagaaagagatcatccatatttcttatcctaaatgaatgtcacgtgtctttataattctttgatgaaccagatgcatttcattaaccaaatccatatacatataaatattaatcatatataattaatatcaattgggttagcaaaacaaatctagtctaggtgtgttttgcgatccgatatcgaattggccacggtaccagctgctgctgttctagggttcacaagtctgcctatttgtcttccccaatggagctatggttgtctggtctggtccttggtcgtgtcccgtttcattgtgtactatttacctgtaatgtgtatccttaagtctggtttgatggtgtctgaaacgttttgctgtggtagagcagcatggaagaactataatgaataagtgatccctaatcattgtgtccaaattttgcttctgctatacccttttgtgctgtttcttatgttttgcttaaaaatttgatctgacaaacaaatttgtctaaattatgctcttgttctgactgtgtactgtacacatttgtattgctaccggtttggcacatagttttctctttgattgcagatcaaacccttctgattgcagattgcttggctatggctgatgtgctcactgttcttctttagcttgtatattgctgatggtggcttggctacggctgaaaaagttgctgctgcgccgacttggcaactgttgctccagtaatgctttgtcctctcttcctagccgccgacttggcacttggcagctgttgctcctgtaatgcgttgttatctcttatctcttgagatgtactatgattttgaggctgtttgacttgtgccagattgccagtgctgatgctatattatctcaggtttttatgctagtatatgttttactgtgtgctgcctgtgtcgagttacgtaatctattgaaccgctatgcgtgttgatgccctgttgttgcttgccagattgatgcccctgttgcttgcagcttgcaagctgtagtgaaatcctaaaattccaaaccaaatctattctgaacttttgaagatctgtgatgtccggaagaaaagattcaaacagataaacgggactctccagaatctataaaataaatgatcgacaaacgctttgctttggtaggcttcaagcttggtcacccggtccgggcctagaaggccagcttcggccgccccgggcaactttattatacaaagttgatagataaatcagatatctggttcctaaggacccggcggaccgattaaactgattcggtccgacgcgttacctaataacttcgtatagcatacattatacgaagttattagctaactaactagtaagcttaagccatgggtcgacggatccgttaactagcgtggcatttggcaccgccgcacactatgcgagctaggagtgctagtttacagatgaaactatgaaaccaagaaaacacaattgtccgtagctagcgcgtggcgtcgtgtcaagcttcacacagtatcttcgttcttcactataaatcgcgcctgttgttcgtgagacccaccaccgtggataacagtcccctaataataagcgatcaacagcactgctgatggctgaacaccgaggcgccgccgcgcgtaaccatccgccggagcagcccgtcgtgccggcgaacgacgccttccccgaccgcgcccagcagctctgcctcgacgccgggcgcgcgctcgcgatgtgcggcgtgctcgtcgccgtccctcccgcattttacgcgtcgacgtcgcggacgacaccgcacttgccttcgtcggcttcgtcctctggatcatcggtgcgtggctgtgcctcctggcgctcacgcccttggctccacgggcggtgagggcgggcggggccgccgccagcaccttgctgatcaggtgcctgtccctttcatgaactactagcgcccgcgcccgcggccgccgggcacaagagaacacatcgatgttcgctgcgtacgtcagcaataaggcactctttgtcagtagtcgagtgcatatgttgggtgtttgccctgggagatttcaagtgttgtggccattatcccgcaggataaaaaatcggcggcttttggattgatacggaaaataacgatgtttcatgctcgtgttgtgtgtgtgacatcttgtcagccaagtttttaaccgttgctactccccctctgtgggctcagtgtgtggaccggaatacgtcgtacataggccgtagcctaagcccaatatgccgtttttcaggttggcctgtgtgacgacaagcgggtctcaaaagcccatcacgcaactggcctgcaattattggaggagagcgcgtcgagttggttccagaggctgcgtggtggggccggactctgcgacgacctctcgttcgcgtccgatttggttgccgtgagccgtgacgtaacgcctccttccgttcctccctatataagttccacccccgggtccggtttccccaagccccagtgacccccgatcccgatcgcgaaatctccgcacccgccggcaagggaccgaagcaagcctctctcccgaccgtcgcatcaaggtacgcgtccgctcgatctgtcctcttccttctcgatttgacttgctgtggtgcccgatcacgggatcagaatcgcaccagtgtagatttcgcatgttctaagatgtgttagtttccaggctaatccagttctcttgacgcccgatccgatcgagctccgtgtttatttcagcctaatcgtagtattcccctaaaatttcctcattagggggttcgcaagattgttggtcgacaggttcacttatgctcgatcgcttacttttagtcgattcatgctgcgtactattgttgccccccgtggttttatcttttctcgtgtgaaatccagtagatatagtagatatcgtagcattaggttttaattcaatcgattgattattgtatcatcaaaattgagaagttcgaatcatgcctatcatgctgcctcaaccgaaatcctgtatattgaagtttcaattcaattgattgatcattcattagattcaaccaaaatctagaaggttagatgacgcatgtcatgctgcctgcgtagtttacctttgatctgtttatgattaccttatcagtaggatatttgtgattttgggaagtagcactaactgattcatgctgacatgatgttccctttcagattatactgttgagtcctatctaattgatgctttgtatgctatatgaatacgtcatggtaaattagcagttaattagcatattagcaattgggcgtacctcatcaggattgctcttgtagatgtgtgtggtgatgtttcttgttcaattcatgttctgctttaaaagtatgtgttctctgtttgttaattaagattcatggttataatgatttggacctaattaatcagggttgcccttttagatgcgtggttacttgttgagttcatttttttcctgctatagttgtatgcgtttgttcattcatggttagatttgatttgtttcttctctattccatgccttccatatacttcaattgtagcttaacatgagatttctgtatatgcaggtcgaccgccggggatccacacgacaccatggcccagtccaagcacggcctgaccaaggagatgaccatgaagtaccgcatggagggctgcgtggacggccacaagttcgtgatcaccggcgagggcatcggctaccccttcaagggcaagcaggccatcaacctgtgcgtggtggagggcggccccttgcccttcgccgaggacatcttgtccgccgccttcatgtacggcaaccgcgtgttcaccgagtacccccaggacatcgtcgactacttcaagaactcctgccccgccggctacacctgggaccgctccttcctgttcgaggacggcgccgtgtgcatctgcaacgccgacatcaccgtgagcgtggaggagaactgcatgtaccacgagtccaagttctacggcgtgaacttccccgccgacggccccgtgatgaagaagatgaccgacaactgggagccctcctgcgagaagatcatccccgtgcccaagcagggcatcttgaagggcgacgtgagcatgtacctgctgctgaaggacggtggccgcttgcgctgccagttcgacaccgtgtacaaggccaagtccgtgccccgcaagatgcccgactggcacttcatccagcacaagctgacccgcgaggaccgcagcgacgccaagaaccagaagtggcacctgaccgagcacgccatcgcctccggctccgccttgccctccggactcagatctcgatagagtcaacctagacttgtccatcttctggattggccaacttaattaatgtatgaaataaaaggatgcacacatagtgacatgctaatcactataatgtgggcatcaaagttgtgtgttatgtgtaattactagttatctgaataaaagagaaagagatcatccatatttcttatcctaaatgaatgtcacgtgtctttataattctttgatgaaccagatgcatttcattaaccaaatccatatacatataaatattaatcatatataattaatatcaattgggttagcaaaacaaatctagtctaggtgtgttttgcgaattgcggcgcccttactttaacgcctctaaccaacacccctttatctttataaggaacaataaacagaatttgccccactgttctaaatcacctaataatatccccagctaaaaacaataaaggtttcctagaattaagacaagcatgactgttcctccaggagggtttggaacattgttgcagtcttgcagatacgggcgaagggtgagaaacagagcggagggctggaggtgacctcggtagtcgacgccggagttgagcttgacaacgacggggcggcccctgatggacttgaggaagtccgatggcgtcttcaccgtcccgccggcgcccgaggcgggcctgtcgctgccgccgccgccgctgctcatcttgcgcgctgtgcccccggcggtgtccctgtgttgcggatcgcgggtgggccaggtggatgcgagggcgacccgtttggactccggccggagccgccggatccctggtcggtgtcagtgccgtttactctgggccccacgtgtcagtaccgtctgtagatgacaacaacccgtcgtccacagtcatgtccaaaatatcctttcttcttttttttcgattcggatatctatcttccttttttttttccaaaaatcttcttgacgcaccagcgcgcacgtttgtggtaaacgccgacacgtcggtcccacgtcgatagaccccacccaccagtgagtagcgtgtacgtattcgggggtgacggacgtgtcgccgtcgtcttgctagtcccattcccatctgagccacacatctctgaacaaaaaaaaggagggaggcctccacgcacatccccctccgtgccacccgccccaaaccctcgcgccgcctccgagacagccgccgcaaccatggccaccgccgccgccgcgtctaccgcgctcactggcgccactaccgctgcgcccaaggcgaggcgccgggcgcacctcctggccacccgccgcgccctcgccgcgcccatcaggtgctcagcggcgtcacccgccatgccgatggctcccccggccaccccgctccggccgtggggccccaccgagccccgcaagggtgctgacatcctcgtcgagtccctcgagcgctgcggcgtccgcgacgtcttcgcctaccccggcggcgcgtccatggagatccaccaggcactcacccgctcccccgtcatcgccaaccacctcttccgccacgagcaaggggaggcctttgccgcctccggctacgcgcgctcctcgggccgcgtcggcgtctgcatcgccacctccggccccggcgccaccaacctagtctccgcgctcgccgacgcgctgctcgattccgtccccatggtcgccatcacgggacaggtggcgcgacgcatgattggcaccgacgccttccaggagacgcccatcgtcgaggtcacccgctccatcaccaagcacaactacctggtcctcgacgtcgacgacatcccccgcgtcgtgcaggaggctttcttcctcgcctcctctggtcgaccagggccggtgcttgtcgacatccccaaggacatccagcagcagatggcggtgcctgtctgggacaagcccatgagtctgcctgggtacattgcgcgccttcccaagccccctgcgactgagttgcttgagcaggtgctgcgtcttgttggtgaatcgcggcgccctgttctttatgtgggcggtggctgcgcagcatctggtgaggagttgcgacgctttgtggagctgactggaatcccggtcacaactactcttatgggcctcggcaacttccccagcgacgacccactgtctctgcgcatgctaggtatgcatgggacggtgtatgcaaattatgcagtggataaggccgatctgttgcttgcacttggtgtgcggtttgatgatcgcgtgacagggaagattgaggcttttgcaagcagggctaagattgtgcacgttgatattgatccggctgagattggcaagaacaagcagccacatgtgtccatctgtgcagatgttaagcttgctttgcagggcatgaatgctcttcttgaaggaagcacatcaaagaagagctttgactttggctcatggaacgatgagttggatcagcagaagagggaattcccccttgggtataaaacatctaatgaggagatccagccacaatatgctattcaggttcttgatgagctgacgaaaggcgaggccatcatcggcacaggtgttgggcagcaccagatgtgggcggcacagtactacacttacaagcggccaaggcagtggttgtcttcagctggtcttggggctatgggatttggtttgccggctgctgctggtgcttctgtggcaaacccaggtgtcactgttgttgacatcgatggagatggtagctttctcatgaacgttcaggagctagctatgatccgaattgagaacctcccagtgaaggtctttgtgctaaacaaccagcacctggggatggtggtgcagttggaggacaggttctataaggccaacagagcgcacacatacttgggaaacccagagaatgaaagtgagatatatccagatttcgtgacgatcgccaaagggttcaacattccagcggtccgtgtgacaaagaagaacgaagtccgcgcagcgataaagaagatgctcgagactccagggccgtacctcttggatataatcgtcccacaccaggagcatgtgttgcctatgatccctagtggtggggctttcaaggatatgatcctggatggtgatggcaggactgtgtactgactagctagtcagttaacagatctgccagatcctcggtgtacaaataacccgtcttatcctatgagacgggccggcgtcagtgtgttctggaggaatttttatgtcagagcctttttctttgtgtgcttgatgtagatgccaagggaagcttattggctgttgaagcttgatgcaaaataaattatggaactctgttttttgtttatctaataataactagcaaatatgcttccattgcattgaaactaacagccttttgtgtttccaagttttattttgtgacaatgtcatctatttcaattagttgtggaatcggaaacttgcaggactaacttggaaactccaatccctcagcatcctggactttttcctggtgtaatccatgtagatattattttaatcatcattttagttctggaggtttttccatctccggttttgctcccctttcttcaaaaaaaaaaaaaaaatgccgtaggcgccgcaacgcccacctgttgttcaaactcatgggcacgagtggctcgaagattttatacaacaattgctgtagtttcaccgttgctggtgaagaagcatttttttaaaaaaatatagtggtattcattttaattagtttagttgtgcagcgagcaaaatttggacatgctctgctcggaatctgatcgacctagacacagattagcagcagtagctttgtcatctgttccaagagttgcgatctgatagaagaaaaaaaaaccttcccttcaatgtaaaaccgaaactaacaagaaagaagcacagtgccgtttaggcaagtatggagtacgtattaagcatgtagaaggccatgcatgaaccactaacaagaaagaagcgcagtgccattcaggcaagcataagcatgtagattggcatgcatgaacaactaacagtagatcgtctctggtctgattagaagttttttgggaagccaagaaatcatgtacaactggttccatctcaaattccgtggcaaaaagaggcctaagcaacatacctcgagtagatcacattcaagcttggtcacccggtccgtcaatattctgattccgatgacttcgtaggttcctagctcaagccgctcgtgtccaagcgtcacttacgattagctaatgattacggcatctaggaccgactagtggcgcgccgactagctagctaaggtaccgagctcgaattcattccgattaatcgtggcctcttgctcttcaggatgaagagctatgtttaaacgtgcaagcgctactagacaattcagtacattaaaaacgtccgcaatgtgttattaagttgtctaagcgtcaatttgtttacaccacaatatatcctgcca

SEQ ID NO: 62 - DNA, 21019 bp, synthetic construct
  misc_feature 1..21019: note = PHP96030
  source 1..21019: mol_type = other DNA
gtttacccgccaatatatcctgtcaaacactgatagtttaaactgaaggcgggaaacgacaatctgatcatgagcggagaattaagggagtcacgttatgacccccgccgatgacgcgggacaagccgttttacgtttggaactgacagaaccgcaacgttgaaggagccactcagcaagctggtacgattgtaatacgactcactatagggcgaattgagcgctgtttaaacgctcttcaactggaagagcggttacgctgtttaaacgctcttcaactggaagagcggttactaccggttcactagctagctgctaatcgagctagttaccctatgaggtgacatgaagcgctcacggttactatgacggttagcttcacgactgttggtggcagtagcgtacgacttagctatagttccggacttacccttaagcgatttaaatctgcggttaccgaattcgagctcggtacctagtacccttgtacttttggtttcacctgcatagagaaaacccacaagaatatgacagtctgatttgtcagtctcattctcaagcaacatttctctatccgttactttcatggtgaataacacaatccatcatcaatactttgtgttactcagaaactgaaagttattccgagtcttgcatatctttggacctactcgtttttctaccattattgctgattgttaagctctcgctacttgaatcggcattgttggagtgggaaggttcaaaaaattggagttatgactagttgtctctttctatgtacgatggagaaaatgaataaacaactgagaaaatggctcttgtttagttgatgatgctcttaagctttccactggttgccatatatgatttgggcatttcactttgatcttaatgggccttgtaaagcccaagactcatgattatctttagttgatgctcttaattaggtgtgggcaaataattcaaactgtatgtacccgaccaaaaccaaagcaaaaataatcgaaccaaaccgaaaatttaaaaataaccgaatgaaaactaaatcctataactgaaagaactgaaaccgaatcaaaatatttaatgtaaccaaaaatatccgaaatataattatattgtcaaaaatattaataatttctagattaaataattaaaaatacttaaaaatttatataaaatagtaaaaatactcgaaaataaccacaaatattcaaaaacaaccgaaatatcccaaaatattcaaagcaaaataaccgaatggataccaaattttaaaaccgaaaaaactggaacaaaaccaaaatcgaaccaaaatttcaaaaatcgaataaatactaaactttagaacaaaaaaaaacgataaccgaatgtatacgaaccaaagccgaattagataaccgaacgtccaggactactcttaatctttccgccacttatgatttgggctattactttgtttataatgagccttttcaagctcaagttcatgattgtccgtgagatgagaaactgacttgttggattcgaaaccctagctagtattggttaatacttaatacataaatgacctgcattgacatcatcatccaagaaaataaaaattgtatgcttgagatatttagttttcctagctaggttttctttattttagtaccgaatctttaggtgtgccacgttaatttagacccattttttcatacttaccaactgagtctagtttaatcatgactataatcgtataaaatgattcagtcgacgtcattgcgaacgtatataaaatcatccaaattgacgtcattccaaagaggtaagcatgcttatctaagagtccgagcatactaaacaagacgacattttatttgcactccaaatcaaattttgtattgcctaaagaaaaacaatcaaactcaagtttcttaaaattaatttcattcaaactaatcactttcaatatctcacatattattcatgccatttctatttgtctaaacatgatttaaaaaaaaaagtaaaatacaaagattactatgcaaaaactctataaaaaaaaattcaaatttcttatttatttgtgacatcaaattttcaaaataatttttttaattatcggttgatccggtcagtcgataaaaacataaactttcagcgaccgttaaaactttcctactaccgatttagagaaaatcttagcttgaaacgtaattgtaacctgccttcatgcaagtcgcaagatatgtcatcctaagttgtatatgttttctcaaaagatgtatttacttgagaaaatacgtttcaacgttgatggacaaccaattaagaatcaagcacctttcgtaatcaatttaggcttatcgtctaaggtatactgatttacgacagttgactagacttataaggaacaaaataatagaatagtttctaaacacttcacctaatcatagagactaagatggtaattcgtaaacgacaaagcctagtgacactgtccattgtaaaattccacatcatattagtattaaacatatacatgtagtttcctgaacacatgtagtatcaaacacacttcgtggcttcttcctcgaaacctgcggccgcgctatagttccggacttacccttaagataacttcgtatagcatacattatacgaagttatgggcccacgcgtgaagagcggttaccagagctggtcacctttgtccaccaagatggaactgtcttcggccagaatggccatctggattcagcaggcctagaaggccatttatcgctatcaactttgtatagaaaagttgggccgaattcgagctcggtacggccagaatggcccggaccgaagcttgcggccgcacactgatagtttaaactgaaggcgggaaacgacaatctgatcatgagcggagaattaagggagtcacgttatgacccccgccgatgacgcgggacaagccgttttacgtttggaactgacagaaccgcaacgttgaaggagccactcagccgcgggtttctggagtttaatgagctaagcacatacgtcagaaaccattattgcgcgttcaaaagtcgcctaaggtcactatcagctagcaaatatttcttgtcaaaaatgctccactgacgttccataaattcccctcggtatccaattagagtctcatattcactctcccgggggatctcgactctagaggatcgctcaggaaggccgctgagatagaggcatggcggccaatgcgggcggcggtggagcgggaggaggcagcggcagcggcagcgtggctgcgccggcggtgtgccgccccagcggctcgcggtggacgccgacgccggagcagatcaggatgctgaaggagctctactacggctgcggcatccggtcgcccagctcggagcagatccagcgcatcaccgccatgctgcggcagcacggcaagatcgagggcaagaacgtcttctactggttccagaaccacaaggcccgcgagcgccagaagcgccgcctcaccagcctcgacgtcaacgtgcccgccgccggcgcggccgacgccaccaccagccaactcggcgtcctctcgctgtcgtcgccgccgccttcaggcgcggcgcctccctcgcccaccctcggcttctacgccgccggcaatggcggcggatcggctgtgctgctggacacgagttccgactggggcagcagcggcgctgccatggccaccgagacatgcttcctgcaggactacatgggcgtgacggacacgggcagctcgtcgcagtggccacgcttctcgtcgtcggacacgataatggcggcggccgcggcgcgggcggcgacgacgcgggcgcccgagacgctccctctcttcccgacctgcggcgacgacggcggcagcggtagcagcagctacttgccgttctggggtgccgcgtccacaactgccggcgccacttcttccgttgcgatccagcagcaacaccagctgcaggagcagtacagcttttacagcaacagcaacagcacccagctggccggcaccggcaaccaagacgtatcggcaacagcagcagcagccgccgccctggagctgagcctcagctcatggtgctccccttaccctgctgcagggagtatgtgagagcaacgcgagctgccactgctcttcactgatgtctctggaatggaaggaggaggaagtgagcatagcgttggtgcgttgctgtcaagggcgaattcacatggttaacctagacttgtccatcttctggattggccaacttaattaatgtatgaaataaaaggatgcacacatagtgacatgctaatcactataatgtgggcatcaaagttgtgtgttatgtgtaattactagttatctgaataaaagagaaagagatcatccatatttcttatcctaaatgaatgtcacgtgtctttataattctttgatgaaccagatgcatttcattaaccaaatccatatacatataaatattaatcatatataattaatatcaattgggttagcaaaacaaatctagtctaggtgtgttttgcgaatgcggccgccaccgcggtggagctcgaattccggtccgggcctagaaggccagcttcaagtttgtacaaaaaagcaggctccggccagagttacccggaccgaagcttgcatgcctgcagtgcagcgtgacccggtcgtgcccctctctagagataatgagcattgcatgtctaagttataaaaaattaccacatattttttttgtcacacttgtttgaagtgcagtttatctatctttatacatatatttaaactttactctacgaataatataatctatagtactacaataatatcagtgttttagagaatcatataaatgaacagttagacatggtctaaaggacaattgagtattttgacaacaggactctacagttttatctttttagtgtgcatgtgttctcctttttttttgcaaatagcttcacctatataatacttcatccattttattagtacatccatttagggtttagggttaatggtttttatagactaatttttttagtacatctattttattctattttagcctctaaattaagaaaactaaaactctattttagtttttttatttaataatttagatataaaatagaataaaataaagtgactaaaaattaaacaaataccctttaagaaattaaaaaaactaaggaaacatttttcttgtttcgagtagataatgccagcctgttaaacgccgtcgacgagtctaacggacaccaaccagcgaaccagcagcgtcgcgtcgggccaagcgaagcagacggcacggcatctctgtcgctgcctctggacccctctcgagagttccgctccaccgttggacttgctccgctgtcggcatccagaaattgcgtggcggagcggcagacgtgagccggcacggcaggcggcctcctcctcctctcacggcaccggcagctacgggggattcctttcccaccgctccttcgctttcccttcctcgcccgccgtaataaatagacaccccctccacaccctctttccccaacctcgtgttgttcggagcgcacacacacacaaccagatctcccccaaatccacccgtcggcacctccgcttcaaggtacgccgctcgtcctcccccccccccctctctaccttctctagatcggcgttccggtccatgcatggttagggcccggtagttctacttctgttcatgtttgtgttagatccgtgtttgtgttagatccgtgctgctagcgttcgtacacggatgcgacctgtacgtcagacacgttctgattgctaacttgccagtgtttctctttggggaatcctgggatggctctagccgttccgcagacgggatcgatttcatgattttttttgtttcgttgcatagggtttggtttgcccttttcctttatttcaatatatgccgtgcacttgtttgtcgggtcatcttttcatgcttttttttgtcttggttgtgatgatgtggtctggttgggcggtcgttctagatcggagtagaattctgtttcaaactacctggtggatttattaattttggatctgtatgtgtgtgccatacatattcatagttacgaattgaagatgatggatggaaatatcgatctaggataggtatacatgttgatgcgggttttactgatgcatatacagagatgctttttgttcgcttggttgtgatgatgtggtgtggttgggcggtcgttcattcgttctagatcggagtagaatactgtttcaaactacctggtgtatttattaattttggaactgtatgtgtgtgtcatacatcttcatagttacgagtttaagatggatggaaatatcgatctaggataggtatacatgttgatgtgggttttactgatgcatatacatgatggcatatgcagcatctattcatatgctctaaccttgagtacctatctattataataaacaagtatgttttataattattttgatcttgatatacttggatgatggcatatgcagcagctatatgtggatttttttagccctgccttcatacgctatttatttgcttggtactgtttcttttgtcgatgctcaccctgttgtttggtgttacttctgcaggtcgactttaacttagcctaggatgattcacattgtggatcatgttgatttagatgcttggagtgtgcctgaggtccttagaccactttatgaatccccgaagattcttgcacagaaaacaactattgctgcactgcgtcacattaggcaaattgcgcatgaatctagtggggaaatgccctatggagggggccgacagccagcagttttgagaacatttagccagaggcttagcaggggtttcaatgatgctgtcaatgggtttccagatgacggttggtcactgatgagcagtgacggtgctgaggatgttactattgctatcaactcttctccaaacaaacttattggtcctcatgtcaactcttcccagctgtttactgcgatcggaggtggcatcctgtgtgctaaggcatcaatgctgcttcagaatgtgccacctgccctactagtacgatttctgagggagcatcgctccgaatgggctgatcctggtgttgatgcttattctgccgctgctcttagggctagtccatatgcagttcctggcttgcgtgctagtgggtttatgggcagccaggttattctgccgcttgcacataccttagagcacgaagagttcttggaggttattaggcttgagggacacagcctctgccatgacgaagttgttctgtcacgagatatgtatcttctgcagttgtgcagtggtgtggatgaaaatgcagctggtgcatgtgcacagcttgtgtttgcacccatcgatgaatcttttgccgacgatgcgccactgctaccctcaggcttccgtgtcattccactggatgcaaagacggatccaccatcaggcacacgcacacttgacctcgcatctaccctcgaggttggatctggtgggacaacgcgtgcttcgagtgacgcctccagcacctgcaacacaagatcagtgctgaccattgctttccagttctcatatgagaatcacctacgagagagcgtcgcagccatggccaggcaatacgtcaggactgtggtggcgtcggtgcagagggtagccatggcaatagctccttcgcgcattggtggacagcttgaaatgaagcaaactccaggatctcctgaggcacacacgctggcaaggtggatcggcaggagctacaggttccacactggagccgaactcctccgcacggacacccaatgcacggatgcttccttgaaagcgctgtggcaacactcggactcgatcatgtgctgttccctgaaggctgctcccgtgttcacctttgccaaccaagccggcctggacatgctggagacgacgctgattgcgctccaggacatctcccttgagaagatccttgatgacgatggcaggaaggcgctctgcaccgagtaccctaagattatgcaacagggcttcgcgtacctccccggtggcgtgtgtgtgtcgagcatggggcggccggtgtcgtacgagcaggcggtggcgtggaaggtcctgagcgacgacgacaccccgcactgccttgccttcatgttcgtgaactggtccttcgtgtgaggtaccgttaacagatctactaactatctatactgtaataatgttgtatagccgccggatagctagctagtttagtcattcagcggcgatgggtaataataaagtgtcatccatccatcaccatgcgtggcaacgtgagcaatgacctgattgaacaaattgaaatgaaaagaagaaatatgttatatgtcaacgagatttcctcataatgccactgacgacgtgtgtccaagaaatgtatcagtgatacgtatattcacaatttttttatgacttatactcacaatttgtttttttactacttatactcacaatttgttgtgcgtaccataacaatttcgatcgaatatatatcagaaagttgacgaaagtaagctcactcaaaaagttaaatgggctgcggaagctgcgtcaggcccaagttttggctattctatccggtatccacgattttgatggctgagggacatatgttcgcttaagcttcggtccgggcctagaaggccgatctcccgggcacccagctttcttgtacaaagtggccgttaacggatcggccagaatggcccggaccgggttaccgaattcgagctcggtaccctggttcacaaactcaatacaacacacagtggagtagggtattacgctccggcggcccgaaccactctaaatccttgtgtcctcgtgtgctcttccaccattaatgactgtaattgcagggacacgaagagttgtagcgcttttgccaacaagatccgctatatgctagtagagtggaacctgcacagcaacaagcatccaataatctgagaataagaattatgtgtggtgatggttctcatctctgcaactcgccattttcgcgagagaaccaaatccaagttggtgaagatcatgatttgggctcatgggctggcatagtagctattacctttgcaattgtggttcgaatctatccgatattctccttttcagggagagctaatgcttatgcttattgggtattttggtttgacactgcttcacgcccaaaaaaaggcaactatgtctgagttggatatggcccaaaaaaaggcagctatgtctgagttggatatggaagtcttctttcgtttagggtgaagtaagaccaagctcatgagcttattatcttaggtcggaacaaattagttgataggcatggcacatttatcaaattataatgattttaacagaaaagcaacacctctttttcagcagcaccagctttgcaagctgcaattgacactccaagcatagtatttgctccaaactcagcctgcatttcgcacaatatcatatctatttccatttggataaaatatattttccagaaatatgggaacagaatcaagatacagaaaaaagttgtggtagtagtggtaagtggaaacacaagtacagtgaaaagatagcattatttctgaacagtcaaattaaccgaaataagtagtatcacatactgcccctaaattgactacacccaatgtaaagaattgcttgagcatattgagccatcagttgtttgtttgtgtaacggatttgacaatgcagagttcaggagcaaaaaaccgcaaaggagagaaagagggaaaggatctcctagtatcccaccttgtggcgcgccctgtcaagtgcatgatggcctggtcgatctgcgtctgctgctgcggttccatcccaacgagtgcctccgacaccttgtcgttgatcacccgcaccgcgtaggcgacccccctggcgaggaacttccgcctctcggaggccccggccgcgtcggcggcggcgccctcgagcgcgcccacgctagccgtagatgctcggtgcacggccttgttggtgtgcaactcgacctcaacggccggtgcgctacgcccgtcaaggatctggcgcgcccgcaccctcgtgatcacggtgggcgcctcccgcctcatgtggccgacgatgaaaagcgccgggttaggggccttggcgcgcaccgccgtattcagggcctcctcgctcttgcgcgagagcaggtgcttccccaggtactcctgcactgacaaggctgccacagcggtggaatttgtcctcacgacttcgccacgtcgtcctcacctccctggcttcccacgactccgccgtatcgaggtgctcggtgggtcgtcttaatccgaagtccgaactaggaagacgagacagagaggtctgaggaatgggcctcgtttgatgttgagctgaattatttttccagcataagcccaggtcttggtccatgaacaaaattactagaaacccagcccagtactacgatctaaaagagggactgccactggatagctctctctagcattctccacgctccaatacagcggcgtcgtgtctatccgggtctatccgcgaacacgtgagaactctccagaaactgctttctcctccacttcatctctctcgctttccctctataaaaagaccccttctaggaattgagggagacagcaagcaccaagcagcgatccgaagctcaatcaattcactcaaacctcttccccaaatcttcgattagatcttcgttgacaagaagactagaaccgaacctgacatgtccaacctgctcacggttcaccagaaccttccggctcttccagtggacgcgacgtccgatgaagtcaggaagaacctcatggacatgttccgcgacaggcaagcgttcagcgagcacacctggaagatgctgctctccgtctgccgctcctgggctgcatggtgcaagctgaacaacaggaagtggttccccgctgagcccgaggacgtgagggattaccttctgtacctgcaagcgcgaggtttgtttctgcttctacctttgatatatatataataattatcattaattagtagtaatataatatttcaaatatttttttcaaaataaaagaatgtagtatatagcaattgcttttctgtagtttataagtgtgtatattttaatttataacttttctaatatatgaccaaaacatggtgatgcctaggtctggcagtgaagaccatccagcaacaccttggacaactgaacatgcttcacaggcgctccggcctcccgcgccccagcgactcgaacgccgtgagcctcgtcatgcgccgcatcaggaaggaaaacgtcgatgccggcgaaagggcaaagcaggccctcgcgttcgagaggaccgatttcgaccaggtccgcagcctgatggagaacagcgacaggtgccaggacattaggaacctggcgttcctcggaattgcatacaacacgctcctcaggatcgcggaaattgcccgcattcgcgtgaaggacattagccgcaccgacggcggcaggatgcttatccacattggcaggaccaagacgctcgtttccaccgcaggcgtcgaaaaggccctcagcctcggagtgaccaagctcgtcgaacgctggatctccgtgtccggcgtcgcggacgacccaaacaactacctcttctgccgcgtccgcaagaacggggtggctgcccctagcgccaccagccaactcagcacgagggccttggaaggtattttcgaggccacccaccgcctgatctacggcgcgaaggatgacagcggtcaacgctacctcgcatggtccgggcactccgcccgcgttggagctgctagggacatggcccgcgccggtgtttccatccccgaaatcatgcaggcgggtggatggacgaacgtgaacattgtcatgaactacattcgcaaccttgacagcgagacgggcgcaatggttcgcctcctggaagatggtgactgaggtacccaacctagacttgtccatcttctggattggccaacttaattaatgtatgaaataaaaggatgcacacatagtgacatgctaatcactataatgtgggcatcaaagttgtgtgttatgtgtaattactagttatctgaataaaagagaaagagatcatccatatttcttatcctaaatgaatgtcacgtgtctttataattctttgatgaaccagatgcatttcattaaccaaatccatatacatataaatattaatcatatataattaatatcaattgggttagcaaaacaaatctagtctaggtgtgttttgcgatccgatatcgaattggccacggtaccagctgctgctgttctagggttcacaagtctgcctatttgtcttccccaatggagctatggttgtctggtctggtccttggtcgtgtcccgtttcattgtgtactatttacctgtaatgtgtatccttaagtctggtttgatggtgtctgaaacgttttgctgtggtagagcagcatggaagaactataatgaataagtgatccctaatcattgtgtccaaattttgcttctgctatacccttttgtgctgtttcttatgttttgcttaaaaatttgatctgacaaacaaatttgtctaaattatgctcttgttctgactgtgtactgtacacatttgtattgctaccggtttggcacatagttttctctttgattgcagatcaaacccttctgattgcagattgcttggctatggctgatgtgctcactgttcttctttagcttgtatattgctgatggtggcttggctacggctgaaaaagttgctgctgcgccgacttggcaactgttgctccagtaatgctttgtcctctcttcctagccgccgacttggcacttggcagctgttgctcctgtaatgcgttgttatctcttatctcttgagatgtactatgattttgaggctgtttgacttgtgccagattgccagtgctgatgctatattatctcaggtttttatgctagtatatgttttactgtgtgctgcctgtgtcgagttacgtaatctattgaaccgctatgcgtgttgatgccctgttgttgcttgccagattgatgcccctgttgcttgcagcttgcaagctgtagtgaaatcctaaaattccaaaccaaatctattctgaacttttgaagatctgtgatgtccggaagaaaagattcaaacagataaacgggactctccagaatctataaaataaatgatcgacaaacgctttgctttggtaggcttcaagcttggtcacccggtccgggcctagaaggccagcttcggccgccccgggcaactttattatacaaagttgatagataaatcagatatctggttcctaaggacccggcggaccgattaaactgattcggtccgacgcgttacctaataacttcgtatagcatacattatacgaagttattagctaactaactagtaagcttaagccatgggtcgacggatccgttaactagcgtggcatttggcaccgccgcacactatgcgagctaggagtgctagtttacagatgaaactatgaaaccaagaaaacacaattgtccgtagctagcgcgtggcgtcgtgtcaagcttcacacagtatcttcgttcttcactataaatcgcgcctgttgttcgtgagacccaccaccgtggataacagtcccctaataataagcgatcaacagcactgctgatggctgaacaccgaggcgccgccgcgcgtaaccatccgccggagcagcccgtcgtgccggcgaacgacgccttccccgaccgcgcccagcagctctgcctcgacgccgggcgcgcgctcgcgatgtgcggcgtgctcgtcgccgtccctcccgcattttacgcgtcgacgtcgcggacgacaccgcacttgccttcgtcggcttcgtcctctggatcatcggtgcgtggctgtgcctcctggcgctcacgcccttggctccacgggcggtgagggcgggcggggccgccgccagcaccttgctgatcaggtgcctgtccctttcatgaactactagcgcccgcgcccgcggccgccgggcacaagagaacacatcgatgttcgctgcgtacgtcagcaataaggcactctttgtcagtagtcgagtgcatatgttgggtgtttgccctgggagatttcaagtgttgtggccattatcccgcaggataaaaaatcggcggcttttggattgatacggaaaataacgatgtttcatgctcgtgttgtgtgtgtgacatcttgtcagccaagtttttaaccgttgctactccccctctgtgggctcagtgtgtggaccggaatacgtcgtacataggccgtagcctaagcccaatatgccgtttttcaggttggcctgtgtgacgacaagcgggtctcaaaagcccatcacgcaactggcctgcaattattggaggagagcgcgtcgagttggttccagaggctgcgtggtggggccggactctgcgacgacctctcgttcgcgtccgatttggttgccgtgagccgtgacgtaacgcctccttccgttcctccctatataagttccacccccgggtccggtttccccaagccccagtgacccccgatcccgatcgcgaaatctccgcacccgccggcaagggaccgaagcaagcctctctcccgaccgtcgcatcaaggtacgcgtccgctcgatctgtcctcttccttctcgatttgacttgctgtggtgcccgatcacgggatcagaatcgcaccagtgtagatttcgcatgttctaagatgtgttagtttccaggctaatccagttctcttgacgcccgatccgatcgagctccgtgtttatttcagcctaatcgtagtattcccctaaaatttcctcattagggggttcgcaagattgttggtcgacaggttcacttatgctcgatcgcttacttttagtcgattcatgctgcgtactattgttgccccccgtggttttatcttttctcgtgtgaaatccagtagatatagtagatatcgtagcattaggttttaattcaatcgattgattattgtatcatcaaaattgagaagttcgaatcatgcctatcatgctgcctcaaccgaaatcctgtatattgaagtttcaattcaattgattgatcattcattagattcaaccaaaatctagaaggttagatgacgcatgtcatgctgcctgcgtagtttacctttgatctgtttatgattaccttatcagtaggatatttgtgattttgggaagtagcactaactgattcatgctgacatgatgttccctttcagattatactgttgagtcctatctaattgatgctttgtatgctatatgaatacgtcatggtaaattagcagttaattagcatattagcaattgggcgtacctcatcaggattgctcttgtagatgtgtgtggtgatgtttcttgttcaattcatgttctgctttaaaagtatgtgttctctgtttgttaattaagattcatggttataatgatttggacctaattaatcagggttgcccttttagatgcgtggttacttgttgagttcatttttttcctgctatagttgtatgcgtttgttcattcatggttagatttgatttgtttcttctctattccatgccttccatatacttcaattgtagcttaacatgagatttctgtatatgcaggtcgaccgccggggatccacacgacaccatggcccagtccaagcacggcctgaccaaggagatgaccatgaagtaccgcatggagggctgcgtggacggccacaagttcgtgatcaccggcgagggcatcggctaccccttcaagggcaagcaggccatcaacctgtgcgtggtggagggcggccccttgcccttcgccgaggacatcttgtccgccgccttcatgtacggcaaccgcgtgttcaccgagtacccccaggacatcgtcgactacttcaagaactcctgccccgccggctacacctgggaccgctccttcctgttcgaggacggcgccgtgtgcatctgcaacgccgacatcaccgtgagcgtggaggagaactgcatgtaccacgagtccaagttctacggcgtgaacttccccgccgacggccccgtgatgaagaagatgaccgacaactgggagccctcctgcgagaagatcatccccgtgcccaagcagggcatcttgaagggcgacgtgagcatgtacctgctgctgaaggacggtggccgcttgcgctgccagttcgacaccgtgtacaaggccaagtccgtgccccgcaagatgcccgactggcacttcatccagcacaagctgacccgcgaggaccgcagcgacgccaagaaccagaagtggcacctgaccgagcacgccatcgcctccggctccgccttgccctccggactcagatctcgatagagtcaacctagacttgtccatcttctggattggccaacttaattaatgtatgaaataaaaggatgcacacatagtgacatgctaatcactataatgtgggcatcaaagttgtgtgttatgtgtaattactagttatctgaataaaagagaaagagatcatccatatttcttatcctaaatgaatgtcacgtgtctttataattctttgatgaaccagatgcatttcattaaccaaatccatatacatataaatattaatcatatataattaatatcaattgggttagcaaaacaaatctagtctaggtgtgttttgcgaattgcggcgcccttactttaacgcctctaaccaacacccctttatctttataaggaacaataaacagaatttgccccactgttctaaatcacctaataatatccccagctaaaaacaataaaggtttcctagaattaagacaagcatgactgttcctccaggagggtttggaacattgttgcagtcttgcagatacgggcgaagggtgagaaacagagcggagggctggaggtgacctcggtagtcgacgccggagttgagcttgacaacgacggggcggcccctgatggacttgaggaagtccgatggcgtcttcaccgtcccgccggcgcccgaggcgggcctgtcgctgccgccgccgccgctgctcatcttgcgcgctgtgcccccggcggtgtccctgtgttgcggatcgcgggtgggccaggtggatgcgagggcgacccgtttggactccggccggagccgccggatccctggtcggtgtcagtgccgtttactctgggccccacgtgtcagtaccgtctgtagatgacaacaacccgtcgtccacagtcatgtccaaaatatcctttcttcttttttttcgattcggatatctatcttccttttttttttccaaaaatcttcttgacgcaccagcgcgcacgtttgtggtaaacgccgacacgtcggtcccacgtcgatagaccccacccaccagtgagtagcgtgtacgtattcgggggtgacggacgtgtcgccgtcgtcttgctagtcccattcccatctgagccacacatctctgaacaaaaaaaaggagggaggcctccacgcacatccccctccgtgccacccgccccaaaccctcgcgccgcctccgagacagccgccgcaaccatggccaccgccgccgccgcgtctaccgcgctcactggcgccactaccgctgcgcccaaggcgaggcgccgggcgcacctcctggccacccgccgcgccctcgccgcgcccatcaggtgctcagcggcgtcacccgccatgccgatggctcccccggccaccccgctccggccgtggggccccaccgagccccgcaagggtgctgacatcctcgtcgagtccctcgagcgctgcggcgtccgcgacgtcttcgcctaccccggcggcgcgtccatggagatccaccaggcactcacccgctcccccgtcatcgccaaccacctcttccgccacgagcaaggggaggcctttgccgcctccggctacgcgcgctcctcgggccgcgtcggcgtctgcatcgccacctccggccccggcgccaccaacctagtctccgcgctcgccgacgcgctgctcgattccgtccccatggtcgccatcacgggacaggtggcgcgacgcatgattggcaccgacgccttccaggagacgcccatcgtcgaggtcacccgctccatcaccaagcacaactacctggtcctcgacgtcgacgacatcccccgcgtcgtgcaggaggctttcttcctcgcctcctctggtcgaccagggccggtgcttgtcgacatccccaaggacatccagcagcagatggcggtgcctgtctgggacaagcccatgagtctgcctgggtacattgcgcgccttcccaagccccctgcgactgagttgcttgagcaggtgctgcgtcttgttggtgaatcgcggcgccctgttctttatgtgggcggtggctgcgcagcatctggtgaggagttgcgacgctttgtggagctgactggaatcccggtcacaactactcttatgggcctcggcaacttccccagcgacgacccactgtctctgcgcatgctaggtatgcatgggacggtgtatgcaaattatgcagtggataaggccgatctgttgcttgcacttggtgtgcggtttgatgatcgcgtgacagggaagattgaggcttttgcaagcagggctaagattgtgcacgttgatattgatccggctgagattggcaagaacaagcagccacatgtgtccatctgtgcagatgttaagcttgctttgcagggcatgaatgctcttcttgaaggaagcacatcaaagaagagctttgactttggctcatggaacgatgagttggatcagcagaagagggaattcccccttgggtataaaacatctaatgaggagatccagccacaatatgctattcaggttcttgatgagctgacgaaaggcgaggccatcatcggcacaggtgttgggcagcaccagatgtgggcggcacagtactacacttacaagcggccaaggcagtggttgtcttcagctggtcttggggctatgggatttggtttgccggctgctgctggtgcttctgtggcaaacccaggtgtcactgttgttgacatcgatggagatggtagctttctcatgaacgttcaggagctagctatgatccgaattgagaacctcccagtgaaggtctttgtgctaaacaaccagcacctggggatggtggtgcagttggaggacaggttctataaggccaacagagcgcacacatacttgggaaacccagagaatgaaagtgagatatatccagatttcgtgacgatcgccaaagggttcaacattccagcggtccgtgtgacaaagaagaacgaagtccgcgcagcgataaagaagatgctcgagactccagggccgtacctcttggatataatcgtcccacaccaggagcatgtgttgcctatgatccctagtggtggggctttcaaggatatgatcctggatggtgatggcaggactgtgtactgactagctagtcagttaacagatctgccagatcctcggtgtacaaataacccgtcttatcctatgagacgggccggcgtcagtgtgttctggaggaatttttatgtcagagcctttttctttgtgtgcttgatgtagatgccaagggaagcttattggctgttgaagcttgatgcaaaataaattatggaactctgttttttgtttatctaataataactagcaaatatgcttccattgcattgaaactaacagccttttgtgtttccaagttttattttgtgacaatgtcatctatttcaattagttgtggaatcggaaacttgcaggactaacttggaaactccaatccctcagcatcctggactttttcctggtgtaatccatgtagatattattttaatcatcattttagttctggaggtttttccatctccggttttgctcccctttcttcaaaaaaaaaaaaaaaatgccgtaggcgccgcaacgcccacctgttgttcaaactcatgggcacgagtggctcgaagattttatacaacaattgctgtagtttcaccgttgctggtgaagaagcatttttttaaaaaaatatagtggtattcattttaattagtttagttgtgcagcgagcaaaatttggacatgctctgctcggaatctgatcgacctagacacagattagcagcagtagctttgtcatctgttccaagagttgcgatctgatagaagaaaaaaaaaccttcccttcaatgtaaaaccgaaactaacaagaaagaagcacagtgccgtttaggcaagtatggagtacgtattaagcatgtagaaggccatgcatgaaccactaacaagaaagaagcgcagtgccattcaggcaagcataagcatgtagattggcatgcatgaacaactaacagtagatcgtctctggtctgattagaagttttttgggaagccaagaaatcatgtacaactggttccatctcaaattccgtggcaaaaagaggcctaagcaacatacctcgagtagatcacattcaagcttggtcacccggtccgtcaatattctgattccgatgacttcgtaggttcctagctcaagccgctcgtgtccaagcgtcacttacgattagctaatgattacggcatctaggaccgactagtggcgcgccgactagctagctaaggtaccgagctcgaattcattccgattaatcgtggcctcttgctcttcaggatgaagagctatgtttaaacgtgcaagcgctactagacaattcagtacattaaaaacgtccgcaatgtgttattaagttgtctaagcgtcaatttgtttacaccacaatatatcctgcca

SEQ ID NO: 63 - DNA, 23075 bp, synthetic construct
  misc_feature 1..23075: note = PHP96031
  source 1..23075: mol_type = other DNA
gtttacccgccaatatatcctgtcaaacactgatagtttaaactgaaggcgggaaacgacaatctgatcatgagcggagaattaagggagtcacgttatgacccccgccgatgacgcgggacaagccgttttacgtttggaactgacagaaccgcaacgttgaaggagccactcagcaagctggtacgattgtaatacgactcactatagggcgaattgagcgctgtttaaacgctcttcaactggaagagcggttacgctgtttaaacgctcttcaactggaagagcggttactaccggttcactagctagctgctaatcgagctagttaccctatgaggtgacatgaagcgctcacggttactatgacggttagcttcacgactgttggtggcagtagcgtacgacttagctatagttccggacttacccttaagcgatttaaatctgcggttaccgaattcgagctcggtacctagtacccttgtacttttggtttcacctgcatagagaaaacccacaagaatatgacagtctgatttgtcagtctcattctcaagcaacatttctctatccgttactttcatggtgaataacacaatccatcatcaatactttgtgttactcagaaactgaaagttattccgagtcttgcatatctttggacctactcgtttttctaccattattgctgattgttaagctctcgctacttgaatcggcattgttggagtgggaaggttcaaaaaattggagttatgactagttgtctctttctatgtacgatggagaaaatgaataaacaactgagaaaatggctcttgtttagttgatgatgctcttaagctttccactggttgccatatatgatttgggcatttcactttgatcttaatgggccttgtaaagcccaagactcatgattatctttagttgatgctcttaattaggtgtgggcaaataattcaaactgtatgtacccgaccaaaaccaaagcaaaaataatcgaaccaaaccgaaaatttaaaaataaccgaatgaaaactaaatcctataactgaaagaactgaaaccgaatcaaaatatttaatgtaaccaaaaatatccgaaatataattatattgtcaaaaatattaataatttctagattaaataattaaaaatacttaaaaatttatataaaatagtaaaaatactcgaaaataaccacaaatattcaaaaacaaccgaaatatcccaaaatattcaaagcaaaataaccgaatggataccaaattttaaaaccgaaaaaactggaacaaaaccaaaatcgaaccaaaatttcaaaaatcgaataaatactaaactttagaacaaaaaaaaacgataaccgaatgtatacgaaccaaagccgaattagataaccgaacgtccaggactactcttaatctttccgccacttatgatttgggctattactttgtttataatgagccttttcaagctcaagttcatgattgtccgtgagatgagaaactgacttgttggattcgaaaccctagctagtattggttaatacttaatacataaatgacctgcattgacatcatcatccaagaaaataaaaattgtatgcttgagatatttagttttcctagctaggttttctttattttagtaccgaatctttaggtgtgccacgttaatttagacccattttttcatacttaccaactgagtctagtttaatcatgactataatcgtataaaatgattcagtcgacgtcattgcgaacgtatataaaatcatccaaattgacgtcattccaaagaggtaagcatgcttatctaagagtccgagcatactaaacaagacgacattttatttgcactccaaatcaaattttgtattgcctaaagaaaaacaatcaaactcaagtttcttaaaattaatttcattcaaactaatcactttcaatatctcacatattattcatgccatttctatttgtctaaacatgatttaaaaaaaaaagtaaaatacaaagattactatgcaaaaactctataaaaaaaaattcaaatttcttatttatttgtgacatcaaattttcaaaataatttttttaattatcggttgatccggtcagtcgataaaaacataaactttcagcgaccgttaaaactttcctactaccgatttagagaaaatcttagcttgaaacgtaattgtaacctgccttcatgcaagtcgcaagatatgtcatcctaagttgtatatgttttctcaaaagatgtatttacttgagaaaatacgtttcaacgttgatggacaaccaattaagaatcaagcacctttcgtaatcaatttaggcttatcgtctaaggtatactgatttacgacagttgactagacttataaggaacaaaataatagaatagtttctaaacacttcacctaatcatagagactaagatggtaattcgtaaacgacaaagcctagtgacactgtccattgtaaaattccacatcatattagtattaaacatatacatgtagtttcctgaacacatgtagtatcaaacacacttcgtggcttcttcctcgaaacctgcggccgcgctatagttccggacttacccttaagataacttcgtatagcatacattatacgaagttatgggcccacgcgtgaagagcggttaccagagctggtcacctttgtccaccaagatggaactgtcttcggccagaatggccatctggattcagcaggcctagaaggccatttatcgctatcaactttgtatagaaaagttgggccgaattcgagctcggtacggccagaatggcccggaccgaagcttcggccgcacactgatagtttaaaccctggtaattattggctgtaggattctaaacagagcctaaatagctggaatagctctagccctcaatccaaactaatgatatctatacttatgcaactctaaatttttattctaaaagtaatatttcatttttgtcaacgagattctctactctattccacaatcttttgaagctatatttaccttaaatctgtactctataccaataatcatatattctattatttatttttatctctctcctaaggagcatccctctatgtctgcatggcccccgcctcgggtcccaatctcttgctctgctagtagcacagaagaaaacactagaaatgacttgcttgacttagagtatcagataaacatcatgtttacttaactttaatttgtatcggtttctactatttttataatatttttgtctctatagatactacgtgcaacagtataatcaacctagtttaatccagagcgaaggattttttactaagtacgtgactccatatgcacagcgttccttttatggttcctcactgggcacagcataaacgaaccctgtccaatgttttcagcgcgaacaaacagaaattccatcagcgaacaaacaacatacatgcgagatgaaaataaataataaaaaaagctccgtctcgataggccggcacgaatcgagagcctccatagccagttttttccatcggaacggcggttcgcgcacctaattatatgcaccacacgcctataaagccaaccaacccgtcggaggggcgcaagccagacagaagacagcccgtcagcccctctcgtttttcatccgccttcgcctccaaccgcgtgcgctccacgcctcctccaggaaagcgagaggtgagcgcagtcccctttcccctccttccaattcaattcgtcttctcgttcgcagccctaggatttgggggtctggaggggtttgatcgtttctcgccgtgaatctgctttggtgtaaaccaacggatctcggatcgtagtcttcagaagatcccggattttgcggtttggcccctcctggattcaattcgtcgtatcgttcgcagccctaggatttggggatctggaggggtttgatcgtttctcgccgcgaatctgctctggtgtaaaccaacggatctcgggtcgtagtcttcagaaggtcccggattttgcggtttggcccctcctggattcaattcgtcgtatcgttcgcagccctaggatttggggatctggaggggtttgatcctttctcgccgcgaatctgctctggtataaccaacggatctcgggtcgtagtcttcagaaggtcccggattttgcggtttggtggttcttgctctatgaatcagagggatggttcttcccggatttatgccttgcggccactctgtcgaatcatggggtttcgacccgattcgtaggcgtgctccctgttttggatgggaagtaggcgtgtttgtagtattcgtgcttcgattcgtcaacggagattagaagacctgggatgggatttgaggaaatctaggtatctgtctagcacgtttctagatctattcttcagctgttatatgagagtaattttggaaccctggtggggtatgtttgaccgagtattctgtagattattgtccgtgacttgctggctgttaccgtccttatctctgcatcatctatctgtgctagtttctgcgtgcttctcaaatatttccggcctgtgtagcatgtgactgataatatgattttggcagcttctgcataagaacaacaaatcaaaagcttgatcagctcggtgcctacaaaacctcaacaaccaagtttcccgggggatctcgactctagaggatcgctcaggaaggccgctgagatagaggcatggcggccaatgcgggcggcggtggagcgggaggaggcagcggcagcggcagcgtggctgcgccggcggtgtgccgccccagcggctcgcggtggacgccgacgccggagcagatcaggatgctgaaggagctctactacggctgcggcatccggtcgcccagctcggagcagatccagcgcatcaccgccatgctgcggcagcacggcaagatcgagggcaagaacgtcttctactggttccagaaccacaaggcccgcgagcgccagaagcgccgcctcaccagcctcgacgtcaacgtgcccgccgccggcgcggccgacgccaccaccagccaactcggcgtcctctcgctgtcgtcgccgccgccttcaggcgcggcgcctccctcgcccaccctcggcttctacgccgccggcaatggcggcggatcggctgtgctgctggacacgagttccgactggggcagcagcggcgctgccatggccaccgagacatgcttcctgcaggactacatgggcgtgacggacacgggcagctcgtcgcagtggccacgcttctcgtcgtcggacacgataatggcggcggccgcggcgcgggcggcgacgacgcgggcgcccgagacgctccctctcttcccgacctgcggcgacgacggcggcagcggtagcagcagctacttgccgttctggggtgccgcgtccacaactgccggcgccacttcttccgttgcgatccagcagcaacaccagctgcaggagcagtacagcttttacagcaacagcaacagcacccagctggccggcaccggcaaccaagacgtatcggcaacagcagcagcagccgccgccctggagctgagcctcagctcatggtgctccccttaccctgctgcagggagtatgtgagagcaacgcgagctgccactgctcttcactgatgtctctggaatggaaggaggaggaagtgagcatagcgttggtgcgttgctgtcaagggcgaattcacatggttaacctagacttgtccatcttctggattggccaacttaattaatgtatgaaataaaaggatgcacacatagtgacatgctaatcactataatgtgggcatcaaagttgtgtgttatgtgtaattactagttatctgaataaaagagaaagagatcatccatatttcttatcctaaatgaatgtcacgtgtctttataattctttgatgaaccagatgcatttcattaaccaaatccatatacatataaatattaatcatatataattaatatcaattgggttagcaaaacaaatctagtctaggtgtgttttgcgaatgcggccgccaccgcggtggagctcgaattccggtccgggcctagaaggccagcttcaagtttgtacaaaaaagcaggctccggccagaatggcccggaccgggttaccgaattcgagctcggtaccatttaaattgcgcccgccacggccgtggaggtcgtattccggtcagcttgcatccctgcagtgcagcgtgacccggtcgtgcccctctctagagataatgagcattgcatgtctaagttataaaaaattaccacatattttttttgtcacacttgtttgaagtgcagtttatctatctttatacatatatttaaactttactctacgaataatataatctatagtactacaataatatcagtgttttagagaatcatataaatgaacagttagacatggtctaaaggacaattgagtattttgacaacaggactctacagttttatctttttagtgtgcatgtgttctcctttttttttgcaaatagcttcacctatataatacttcatccattttattagtacatccatttagggtttagggttaatggtttttatagactaatttttttagtacatctattttattctattttagcctctaaattaagaaaactaaaactctattttagtttttttatttaataatttagatataaaatagaataaaataaagtgactaaaaattaaacaaataccctttaagaaattaaaaaaactaaggaaacatttttcttgtttcgagtagataatgccagcctgttaaacgccgtcgacgagtctaacggacaccaaccagcgaaccagcagcgtcgcgtcgggccaagcgaagcagacggcacggcatctctgtcgctgcctctggacccctctcgagagttccgctccaccgttggacttgctccgctgtcggcatccagaaattgcgtggcggagcggcagacgtgagccggcacggcaggcggcctcctcctcctctcacggcaccggcagctacgggggattcctttcccaccgctccttcgctttcccttcctcgcccgccgtaataaatagacaccccctccacaccctctttccccaacctcgtgttgttcggagcgcacacacacacaaccagatctcccccaaatccacccgtcggcacctccgcttcaaggtacgccgctcgtcctcccccccccccctctctaccttctctagatcggcgttccggtccatgcatggttagggcccggtagttctacttctgttcatgtttgtgttagatccgtgtttgtgttagatccgtgctgctagcgttcgtacacggatgcgacctgtacgtcagacacgttctgattgctaacttgccagtgtttctctttggggaatcctgggatggctctagccgttccgcagacgggatcgatttcatgattttttttgtttcgttgcatagggtttggtttgcccttttcctttatttcaatatatgccgtgcacttgtttgtcgggtcatcttttcatgcttttttttgtcttggttgtgatgatgtggtctggttgggcggtcgttctagatcggagtagaattctgtttcaaactacctggtggatttattaattttggatctgtatgtgtgtgccatacatattcatagttacgaattgaagatgatggatggaaatatcgatctaggataggtatacatgttgatgcgggttttactgatgcatatacagagatgctttttgttcgcttggttgtgatgatgtggtgtggttgggcggtcgttcattcgttctagatcggagtagaatactgtttcaaactacctggtgtatttattaattttggaactgtatgtgtgtgtcatacatcttcatagttacgagtttaagatggatggaaatatcgatctaggataggtatacatgttgatgtgggttttactgatgcatatacatgatggcatatgcagcatctattcatatgctctaaccttgagtacctatctattataataaacaagtatgttttataattattttgatcttgatatacttggatgatggcatatgcagcagctatatgtggatttttttagccctgccttcatacgctatttatttgcttggtactgtttcttttgtcgatgctcaccctgttgtttggtgttacttctgcaggtcgactctagaggatccatggccactgtgaacaactggctcgctttctccctctccccgcaggagctgccgccctcccagacgacggactccacactcatctcggccgccaccgccgaccatgtctccggcgatgtctgcttcaacatcccccaagattggagcatgaggggatcagagctttcggcgctcgtcgcggagccgaagctggaggacttcctcggcggcatctccttctccgagcagcatcacaaggccaactgcaacatgatacccagcactagcagcacagtttgctacgcgagctcaggtgctagcaccggctaccatcaccagctgtaccaccagcccaccagctcagcgctccacttcgcggactccgtaatggtggcttcctcggccggtgtccacgacggcggtgccatgctcagcgcggccgccgctaacggtgtcgctggcgctgccagtgccaacggcggcggcatcgggctgtccatgattaagaactggctgcggagccaaccggcgcccatgcagccgagggtggcggcggctgagggcgcgcaggggctctctttgtccatgaacatggcggggacgacccaaggcgctgctggcatgccacttctcgctggagagcgcgcacgggcgcccgagagtgtatcgacgtcagcacagggtggagccgtcgtcgtcacggcgccgaaggaggatagcggtggcagcggtgttgccggcgctctagtagccgtgagcacggacacgggtggcagcggcggcgcgtcggctgacaacacggcaaggaagacggtggacacgttcgggcagcgcacgtcgatttaccgtggcgtgacaaggcatagatggactgggagatatgaggcacatctttgggataacagttgcagaagggaagggcaaactcgtaagggtcgtcaagtctatttaggtggctatgataaagaggagaaagctgctagggcttatgatcttgctgctctgaagtactggggtgccacaacaacaacaaattttccagtgagtaactacgaaaaggagctcgaggacatgaagcacatgacaaggcaggagtttgtagcgtctctgagaaggaagagcagtggtttctccagaggtgcatccatttacaggggagtgactaggcatcaccaacatggaagatggcaagcacggattggacgagttgcagggaacaaggatctttacttgggcaccttcagcacccaggaggaggcagcggaggcgtacgacatcgcggcgatcaagttccgcggcctcaacgccgtcaccaacttcgacatgagccgctacgacgtgaagagcatcctggacagcagcgccctccccatcggcagcgccgccaagcgcctcaaggaggccgaggccgcagcgtccgcgcagcaccaccacgccggcgtggtgagctacgacgtcggccgcatcgcctcgcagctcggcgacggcggagccctggcggcggcgtacggcgcgcactaccacggcgccgcctggccgaccatcgcgttccagccgggcgccgccagcacaggcctgtaccacccgtacgcgcagcagccaatgcgcggcggcgggtggtgcaagcaggagcaggaccacgcggtgatcgcggccgcgcacagcctgcaggacctccaccacctgaacctgggcgcggccggcgcgcacgactttttctcggcagggcagcaggccgccgccgctgcgatgcacggcctgggtagcatcgacagtgcgtcgctcgagcacagcaccggctccaactccgtcgtctacaacggcggggtcggcgacagcaacggcgccagcgccgtcggcggcagtggcggtggctacatgatgccgatgagcgctgccggagcaaccactacatcggcaatggtgagccacgagcaggtgcatgcacgggcctacgacgaagccaagcaggctgctcagatggggtacgagagctacctggtgaacgcggagaacaatggtggcggaaggatgtctgcatgggggactgtcgtgtctgcagccgcggcggcagcagcaagcagcaacgacaacatggccgccgacgtcgggcatggcggcgcgcagctcttcagtgtctggaacgacacttaagcgtacgtgccggcctggctctccgaaagggcgtattccagcacactggcggccgttactagacccaacctagacttgtccatcttctggattggccaacttaattaatgtatgaaataaaaggatgcacacatagtgacatgctaatcactataatgtgggcatcaaagttgtgtgttatgtgtaattactagttatctgaataaaagagaaagagatcatccatatttcttatcctaaatgaatgtcacgtgtctttataattctttgatgaaccagatgcatttcattaaccaaatccatatacatataaatattaatcatatataattaatatcaattgggttagcaaaacaaatctagtctaggtgtgttttgcgaatgcggcctccgggcacccagctttcttgtacaaagtggccgttaacggatcggccagaatggcccggaccgggttaccgaattcgagctcggtaccctggttcacaaactcaatacaacacacagtggagtagggtattacgctccggcggcccgaaccactctaaatccttgtgtcctcgtgtgctcttccaccattaatgactgtaattgcagggacacgaagagttgtagcgcttttgccaacaagatccgctatatgctagtagagtggaacctgcacagcaacaagcatccaataatctgagaataagaattatgtgtggtgatggttctcatctctgcaactcgccattttcgcgagagaaccaaatccaagttggtgaagatcatgatttgggctcatgggctggcatagtagctattacctttgcaattgtggttcgaatctatccgatattctccttttcagggagagctaatgcttatgcttattgggtattttggtttgacactgcttcacgcccaaaaaaaggcaactatgtctgagttggatatggcccaaaaaaaggcagctatgtctgagttggatatggaagtcttctttcgtttagggtgaagtaagaccaagctcatgagcttattatcttaggtcggaacaaattagttgataggcatggcacatttatcaaattataatgattttaacagaaaagcaacacctctttttcagcagcaccagctttgcaagctgcaattgacactccaagcatagtatttgctccaaactcagcctgcatttcgcacaatatcatatctatttccatttggataaaatatattttccagaaatatgggaacagaatcaagatacagaaaaaagttgtggtagtagtggtaagtggaaacacaagtacagtgaaaagatagcattatttctgaacagtcaaattaaccgaaataagtagtatcacatactgcccctaaattgactacacccaatgtaaagaattgcttgagcatattgagccatcagttgtttgtttgtgtaacggatttgacaatgcagagttcaggagcaaaaaaccgcaaaggagagaaagagggaaaggatctcctagtatcccaccttgtggcgcgccctgtcaagtgcatgatggcctggtcgatctgcgtctgctgctgcggttccatcccaacgagtgcctccgacaccttgtcgttgatcacccgcaccgcgtaggcgacccccctggcgaggaacttccgcctctcggaggccccggccgcgtcggcggcggcgccctcgagcgcgcccacgctagccgtagatgctcggtgcacggccttgttggtgtgcaactcgacctcaacggccggtgcgctacgcccgtcaaggatctggcgcgcccgcaccctcgtgatcacggtgggcgcctcccgcctcatgtggccgacgatgaaaagcgccgggttaggggccttggcgcgcaccgccgtattcagggcctcctcgctcttgcgcgagagcaggtgcttccccaggtactcctgcactgacaaggctgccacagcggtggaatttgtcctcacgacttcgccacgtcgtcctcacctccctggcttcccacgactccgccgtatcgaggtgctcggtgggtcgtcttaatccgaagtccgaactaggaagacgagacagagaggtctgaggaatgggcctcgtttgatgttgagctgaattatttttccagcataagcccaggtcttggtccatgaacaaaattactagaaacccagcccagtactacgatctaaaagagggactgccactggatagctctctctagcattctccacgctccaatacagcggcgtcgtgtctatccgggtctatccgcgaacacgtgagaactctccagaaactgctttctcctccacttcatctctctcgctttccctctataaaaagaccccttctaggaattgagggagacagcaagcaccaagcagcgatccgaagctcaatcaattcactcaaacctcttccccaaatcttcgattagatcttcgttgacaagaagactagaaccgaacctgacatgtccaacctgctcacggttcaccagaaccttccggctcttccagtggacgcgacgtccgatgaagtcaggaagaacctcatggacatgttccgcgacaggcaagcgttcagcgagcacacctggaagatgctgctctccgtctgccgctcctgggctgcatggtgcaagctgaacaacaggaagtggttccccgctgagcccgaggacgtgagggattaccttctgtacctgcaagcgcgaggtttgtttctgcttctacctttgatatatatataataattatcattaattagtagtaatataatatttcaaatatttttttcaaaataaaagaatgtagtatatagcaattgcttttctgtagtttataagtgtgtatattttaatttataacttttctaatatatgaccaaaacatggtgatgcctaggtctggcagtgaagaccatccagcaacaccttggacaactgaacatgcttcacaggcgctccggcctcccgcgccccagcgactcgaacgccgtgagcctcgtcatgcgccgcatcaggaaggaaaacgtcgatgccggcgaaagggcaaagcaggccctcgcgttcgagaggaccgatttcgaccaggtccgcagcctgatggagaacagcgacaggtgccaggacattaggaacctggcgttcctcggaattgcatacaacacgctcctcaggatcgcggaaattgcccgcattcgcgtgaaggacattagccgcaccgacggcggcaggatgcttatccacattggcaggaccaagacgctcgtttccaccgcaggcgtcgaaaaggccctcagcctcggagtgaccaagctcgtcgaacgctggatctccgtgtccggcgtcgcggacgacccaaacaactacctcttctgccgcgtccgcaagaacggggtggctgcccctagcgccaccagccaactcagcacgagggccttggaaggtattttcgaggccacccaccgcctgatctacggcgcgaaggatgacagcggtcaacgctacctcgcatggtccgggcactccgcccgcgttggagctgctagggacatggcccgcgccggtgtttccatccccgaaatcatgcaggcgggtggatggacgaacgtgaacattgtcatgaactacattcgcaaccttgacagcgagacgggcgcaatggttcgcctcctggaagatggtgactgaggtacccaacctagacttgtccatcttctggattggccaacttaattaatgtatgaaataaaaggatgcacacatagtgacatgctaatcactataatgtgggcatcaaagttgtgtgttatgtgtaattactagttatctgaataaaagagaaagagatcatccatatttcttatcctaaatgaatgtcacgtgtctttataattctttgatgaaccagatgcatttcattaaccaaatccatatacatataaatattaatcatatataattaatatcaattgggttagcaaaacaaatctagtctaggtgtgttttgcgatccgatatcgaattggccacggtaccagctgctgctgttctagggttcacaagtctgcctatttgtcttccccaatggagctatggttgtctggtctggtccttggtcgtgtcccgtttcattgtgtactatttacctgtaatgtgtatccttaagtctggtttgatggtgtctgaaacgttttgctgtggtagagcagcatggaagaactataatgaataagtgatccctaatcattgtgtccaaattttgcttctgctatacccttttgtgctgtttcttatgttttgcttaaaaatttgatctgacaaacaaatttgtctaaattatgctcttgttctgactgtgtactgtacacatttgtattgctaccggtttggcacatagttttctctttgattgcagatcaaacccttctgattgcagattgcttggctatggctgatgtgctcactgttcttctttagcttgtatattgctgatggtggcttggctacggctgaaaaagttgctgctgcgccgacttggcaactgttgctccagtaatgctttgtcctctcttcctagccgccgacttggcacttggcagctgttgctcctgtaatgcgttgttatctcttatctcttgagatgtactatgattttgaggctgtttgacttgtgccagattgccagtgctgatgctatattatctcaggtttttatgctagtatatgttttactgtgtgctgcctgtgtcgagttacgtaatctattgaaccgctatgcgtgttgatgccctgttgttgcttgccagattgatgcccctgttgcttgcagcttgcaagctgtagtgaaatcctaaaattccaaaccaaatctattctgaacttttgaagatctgtgatgtccggaagaaaagattcaaacagataaacgggactctccagaatctataaaataaatgatcgacaaacgctttgctttggtaggcttcaagcttggtcacccggtccgggcctagaaggccagcttcggccgccccgggcaactttattatacaaagttgatagataaatcagatatctggttcctaaggacccggcggaccgattaaactgattcggtccgacgcgttacctaataacttcgtatagcatacattatacgaagttattagctaactaactagtaagcttaagccatgggtcgacggatccgttaactagcgtggcatttggcaccgccgcacactatgcgagctaggagtgctagtttacagatgaaactatgaaaccaagaaaacacaattgtccgtagctagcgcgtggcgtcgtgtcaagcttcacacagtatcttcgttcttcactataaatcgcgcctgttgttcgtgagacccaccaccgtggataacagtcccctaataataagcgatcaacagcactgctgatggctgaacaccgaggcgccgccgcgcgtaaccatccgccggagcagcccgtcgtgccggcgaacgacgccttccccgaccgcgcccagcagctctgcctcgacgccgggcgcgcgctcgcgatgtgcggcgtgctcgtcgccgtccctcccgcattttacgcgtcgacgtcgcggacgacaccgcacttgccttcgtcggcttcgtcctctggatcatcggtgcgtggctgtgcctcctggcgctcacgcccttggctccacgggcggtgagggcgggcggggccgccgccagcaccttgctgatcaggtgcctgtccctttcatgaactactagcgcccgcgcccgcggccgccgggcacaagagaacacatcgatgttcgctgcgtacgtcagcaataaggcactctttgtcagtagtcgagtgcatatgttgggtgtttgccctgggagatttcaagtgttgtggccattatcccgcaggataaaaaatcggcggcttttggattgatacggaaaataacgatgtttcatgctcgtgttgtgtgtgtgacatcttgtcagccaagtttttaaccgttgctactccccctctgtgggctcagtgtgtggaccggaatacgtcgtacataggccgtagcctaagcccaatatgccgtttttcaggttggcctgtgtgacgacaagcgggtctcaaaagcccatcacgcaactggcctgcaattattggaggagagcgcgtcgagttggttccagaggctgcgtggtggggccggactctgcgacgacctctcgttcgcgtccgatttggttgccgtgagccgtgacgtaacgcctccttccgttcctccctatataagttccacccccgggtccggtttccccaagccccagtgacccccgatcccgatcgcgaaatctccgcacccgccggcaagggaccgaagcaagcctctctcccgaccgtcgcatcaaggtacgcgtccgctcgatctgtcctcttccttctcgatttgacttgctgtggtgcccgatcacgggatcagaatcgcaccagtgtagatttcgcatgttctaagatgtgttagtttccaggctaatccagttctcttgacgcccgatccgatcgagctccgtgtttatttcagcctaatcgtagtattcccctaaaatttcctcattagggggttcgcaagattgttggtcgacaggttcacttatgctcgatcgcttacttttagtcgattcatgctgcgtactattgttgccccccgtggttttatcttttctcgtgtgaaatccagtagatatagtagatatcgtagcattaggttttaattcaatcgattgattattgtatcatcaaaattgagaagttcgaatcatgcctatcatgctgcctcaaccgaaatcctgtatattgaagtttcaattcaattgattgatcattcattagattcaaccaaaatctagaaggttagatgacgcatgtcatgctgcctgcgtagtttacctttgatctgtttatgattaccttatcagtaggatatttgtgattttgggaagtagcactaactgattcatgctgacatgatgttccctttcagattatactgttgagtcctatctaattgatgctttgtatgctatatgaatacgtcatggtaaattagcagttaattagcatattagcaattgggcgtacctcatcaggattgctcttgtagatgtgtgtggtgatgtttcttgttcaattcatgttctgctttaaaagtatgtgttctctgtttgttaattaagattcatggttataatgatttggacctaattaatcagggttgcccttttagatgcgtggttacttgttgagttcatttttttcctgctatagttgtatgcgtttgttcattcatggttagatttgatttgtttcttctctattccatgccttccatatacttcaattgtagcttaacatgagatttctgtatatgcaggtcgaccgccggggatccacacgacaccatggcccagtccaagcacggcctgaccaaggagatgaccatgaagtaccgcatggagggctgcgtggacggccacaagttcgtgatcaccggcgagggcatcggctaccccttcaagggcaagcaggccatcaacctgtgcgtggtggagggcggccccttgcccttcgccgaggacatcttgtccgccgccttcatgtacggcaaccgcgtgttcaccgagtacccccaggacatcgtcgactacttcaagaactcctgccccgccggctacacctgggaccgctccttcctgttcgaggacggcgccgtgtgcatctgcaacgccgacatcaccgtgagcgtggaggagaactgcatgtaccacgagtccaagttctacggcgtgaacttccccgccgacggccccgtgatgaagaagatgaccgacaactgggagccctcctgcgagaagatcatccccgtgcccaagcagggcatcttgaagggcgacgtgagcatgtacctgctgctgaaggacggtggccgcttgcgctgccagttcgacaccgtgtacaaggccaagtccgtgccccgcaagatgcccgactggcacttcatccagcacaagctgacccgcgaggaccgcagcgacgccaagaaccagaagtggcacctgaccgagcacgccatcgcctccggctccgccttgccctccggactcagatctcgatagagtcaacctagacttgtccatcttctggattggccaacttaattaatgtatgaaataaaaggatgcacacatagtgacatgctaatcactataatgtgggcatcaaagttgtgtgttatgtgtaattactagttatctgaataaaagagaaagagatcatccatatttcttatcctaaatgaatgtcacgtgtctttataattctttgatgaaccagatgcatttcattaaccaaatccatatacatataaatattaatcatatataattaatatcaattgggttagcaaaacaaatctagtctaggtgtgttttgcgaattgcggcgcccttactttaacgcctctaaccaacacccctttatctttataaggaacaataaacagaatttgccccactgttctaaatcacctaataatatccccagctaaaaacaataaaggtttcctagaattaagacaagcatgactgttcctccaggagggtttggaacattgttgcagtcttgcagatacgggcgaagggtgagaaacagagcggagggctggaggtgacctcggtagtcgacgccggagttgagcttgacaacgacggggcggcccctgatggacttgaggaagtccgatggcgtcttcaccgtcccgccggcgcccgaggcgggcctgtcgctgccgccgccgccgctgctcatcttgcgcgctgtgcccccggcggtgtccctgtgttgcggatcgcgggtgggccaggtggatgcgagggcgacccgtttggactccggccggagccgccggatccctggtcggtgtcagtgccgtttactctgggccccacgtgtcagtaccgtctgtagatgacaacaacccgtcgtccacagtcatgtccaaaatatcctttcttcttttttttcgattcggatatctatcttccttttttttttccaaaaatcttcttgacgcaccagcgcgcacgtttgtggtaaacgccgacacgtcggtcccacgtcgatagaccccacccaccagtgagtagcgtgtacgtattcgggggtgacggacgtgtcgccgtcgtcttgctagtcccattcccatctgagccacacatctctgaacaaaaaaaaggagggaggcctccacgcacatccccctccgtgccacccgccccaaaccctcgcgccgcctccgagacagccgccgcaaccatggccaccgccgccgccgcgtctaccgcgctcactggcgccactaccgctgcgcccaaggcgaggcgccgggcgcacctcctggccacccgccgcgccctcgccgcgcccatcaggtgctcagcggcgtcacccgccatgccgatggctcccccggccaccccgctccggccgtggggccccaccgagccccgcaagggtgctgacatcctcgtcgagtccctcgagcgctgcggcgtccgcgacgtcttcgcctaccccggcggcgcgtccatggagatccaccaggcactcacccgctcccccgtcatcgccaaccacctcttccgccacgagcaaggggaggcctttgccgcctccggctacgcgcgctcctcgggccgcgtcggcgtctgcatcgccacctccggccccggcgccaccaacctagtctccgcgctcgccgacgcgctgctcgattccgtccccatggtcgccatcacgggacaggtggcgcgacgcatgattggcaccgacgccttccaggagacgcccatcgtcgaggtcacccgctccatcaccaagcacaactacctggtcctcgacgtcgacgacatcccccgcgtcgtgcaggaggctttcttcctcgcctcctctggtcgaccagggccggtgcttgtcgacatccccaaggacatccagcagcagatggcggtgcctgtctgggacaagcccatgagtctgcctgggtacattgcgcgccttcccaagccccctgcgactgagttgcttgagcaggtgctgcgtcttgttggtgaatcgcggcgccctgttctttatgtgggcggtggctgcgcagcatctggtgaggagttgcgacgctttgtggagctgactggaatcccggtcacaactactcttatgggcctcggcaacttccccagcgacgacccactgtctctgcgcatgctaggtatgcatgggacggtgtatgcaaattatgcagtggataaggccgatctgttgcttgcacttggtgtgcggtttgatgatcgcgtgacagggaagattgaggcttttgcaagcagggctaagattgtgcacgttgatattgatccggctgagattggcaagaacaagcagccacatgtgtccatctgtgcagatgttaagcttgctttgcagggcatgaatgctcttcttgaaggaagcacatcaaagaagagctttgactttggctcatggaacgatgagttggatcagcagaagagggaattcccccttgggtataaaacatctaatgaggagatccagccacaatatgctattcaggttcttgatgagctgacgaaaggcgaggccatcatcggcacaggtgttgggcagcaccagatgtgggcggcacagtactacacttacaagcggccaaggcagtggttgtcttcagctggtcttggggctatgggatttggtttgccggctgctgctggtgcttctgtggcaaacccaggtgtcactgttgttgacatcgatggagatggtagctttctcatgaacgttcaggagctagctatgatccgaattgagaacctcccagtgaaggtctttgtgctaaacaaccagcacctggggatggtggtgcagttggaggacaggttctataaggccaacagagcgcacacatacttgggaaacccagagaatgaaagtgagatatatccagatttcgtgacgatcgccaaagggttcaacattccagcggtccgtgtgacaaagaagaacgaagtccgcgcagcgataaagaagatgctcgagactccagggccgtacctcttggatataatcgtcccacaccaggagcatgtgttgcctatgatccctagtggtggggctttcaaggatatgatcctggatggtgatggcaggactgtgtactgactagctagtcagttaacagatctgccagatcctcggtgtacaaataacccgtcttatcctatgagacgggccggcgtcagtgtgttctggaggaatttttatgtcagagcctttttctttgtgtgcttgatgtagatgccaagggaagcttattggctgttgaagcttgatgcaaaataaattatggaactctgttttttgtttatctaataataactagcaaatatgcttccattgcattgaaactaacagccttttgtgtttccaagttttattttgtgacaatgtcatctatttcaattagttgtggaatcggaaacttgcaggactaacttggaaactccaatccctcagcatcctggactttttcctggtgtaatccatgtagatattattttaatcatcattttagttctggaggtttttccatctccggttttgctcccctttcttcaaaaaaaaaaaaaaaatgccgtaggcgccgcaacgcccacctgttgttcaaactcatgggcacgagtggctcgaagattttatacaacaattgctgtagtttcaccgttgctggtgaagaagcatttttttaaaaaaatatagtggtattcattttaattagtttagttgtgcagcgagcaaaatttggacatgctctgctcggaatctgatcgacctagacacagattagcagcagtagctttgtcatctgttccaagagttgcgatctgatagaagaaaaaaaaaccttcccttcaatgtaaaaccgaaactaacaagaaagaagcacagtgccgtttaggcaagtatggagtacgtattaagcatgtagaaggccatgcatgaaccactaacaagaaagaagcgcagtgccattcaggcaagcataagcatgtagattggcatgcatgaacaactaacagtagatcgtctctggtctgattagaagttttttgggaagccaagaaatcatgtacaactggttccatctcaaattccgtggcaaaaagaggcctaagcaacatacctcgagtagatcacattcaagcttggtcacccggtccgtcaatattctgattccgatgacttcgtaggttcctagctcaagccgctcgtgtccaagcgtcacttacgattagctaatgattacggcatctaggaccgactagtggcgcgccgactagctagctaaggtaccgagctcgaattcattccgattaatcgtggcctcttgctcttcaggatgaagagctatgtttaaacgtgcaagcgctactagacaattcagtacattaaaaacgtccgcaatgtgttattaagttgtctaagcgtcaatttgtttacaccacaatatatcctgcca

SEQ ID NO: 64 - DNA, 24912 bp, synthetic construct
  misc_feature 1..24912: note = PHP96032
  source 1..24912: mol_type = other DNA
gtttacccgccaatatatcctgtcaaacactgatagtttaaactgaaggcgggaaacgacaatctgatcatgagcggagaattaagggagtcacgttatgacccccgccgatgacgcgggacaagccgttttacgtttggaactgacagaaccgcaacgttgaaggagccactcagcaagctggtacgattgtaatacgactcactatagggcgaattgagcgctgtttaaacgctcttcaactggaagagcggttacgctgtttaaacgctcttcaactggaagagcggttactaccggttcactagctagctgctaatcgagctagttaccctatgaggtgacatgaagcgctcacggttactatgacggttagcttcacgactgttggtggcagtagcgtacgacttagctatagttccggacttacccttaagcgatttaaatctgcggttaccgaattcgagctcggtacctagtacccttgtacttttggtttcacctgcatagagaaaacccacaagaatatgacagtctgatttgtcagtctcattctcaagcaacatttctctatccgttactttcatggtgaataacacaatccatcatcaatactttgtgttactcagaaactgaaagttattccgagtcttgcatatctttggacctactcgtttttctaccattattgctgattgttaagctctcgctacttgaatcggcattgttggagtgggaaggttcaaaaaattggagttatgactagttgtctctttctatgtacgatggagaaaatgaataaacaactgagaaaatggctcttgtttagttgatgatgctcttaagctttccactggttgccatatatgatttgggcatttcactttgatcttaatgggccttgtaaagcccaagactcatgattatctttagttgatgctcttaattaggtgtgggcaaataattcaaactgtatgtacccgaccaaaaccaaagcaaaaataatcgaaccaaaccgaaaatttaaaaataaccgaatgaaaactaaatcctataactgaaagaactgaaaccgaatcaaaatatttaatgtaaccaaaaatatccgaaatataattatattgtcaaaaatattaataatttctagattaaataattaaaaatacttaaaaatttatataaaatagtaaaaatactcgaaaataaccacaaatattcaaaaacaaccgaaatatcccaaaatattcaaagcaaaataaccgaatggataccaaattttaaaaccgaaaaaactggaacaaaaccaaaatcgaaccaaaatttcaaaaatcgaataaatactaaactttagaacaaaaaaaaacgataaccgaatgtatacgaaccaaagccgaattagataaccgaacgtccaggactactcttaatctttccgccacttatgatttgggctattactttgtttataatgagccttttcaagctcaagttcatgattgtccgtgagatgagaaactgacttgttggattcgaaaccctagctagtattggttaatacttaatacataaatgacctgcattgacatcatcatccaagaaaataaaaattgtatgcttgagatatttagttttcctagctaggttttctttattttagtaccgaatctttaggtgtgccacgttaatttagacccattttttcatacttaccaactgagtctagtttaatcatgactataatcgtataaaatgattcagtcgacgtcattgcgaacgtatataaaatcatccaaattgacgtcattccaaagaggtaagcatgcttatctaagagtccgagcatactaaacaagacgacattttatttgcactccaaatcaaattttgtattgcctaaagaaaaacaatcaaactcaagtttcttaaaattaatttcattcaaactaatcactttcaatatctcacatattattcatgccatttctatttgtctaaacatgatttaaaaaaaaaagtaaaatacaaagattactatgcaaaaactctataaaaaaaaattcaaatttcttatttatttgtgacatcaaattttcaaaataatttttttaattatcggttgatccggtcagtcgataaaaacataaactttcagcgaccgttaaaactttcctactaccgatttagagaaaatcttagcttgaaacgtaattgtaacctgccttcatgcaagtcgcaagatatgtcatcctaagttgtatatgttttctcaaaagatgtatttacttgagaaaatacgtttcaacgttgatggacaaccaattaagaatcaagcacctttcgtaatcaatttaggcttatcgtctaaggtatactgatttacgacagttgactagacttataaggaacaaaataatagaatagtttctaaacacttcacctaatcatagagactaagatggtaattcgtaaacgacaaagcctagtgacactgtccattgtaaaattccacatcatattagtattaaacatatacatgtagtttcctgaacacatgtagtatcaaacacacttcgtggcttcttcctcgaaacctgcggccgcgctatagttccggacttacccttaagataacttcgtatagcatacattatacgaagttatgggcccacgcgtgaagagcggttaccagagctggtcacctttgtccaccaagatggaactgtcttcggccagaatggccatctggattcagcaggcctagaaggccatttatcgctatcaactttgtatagaaaagttgggccgaattcgagctcggtacggccagaatggcccggaccgaagcttcctaactaactagaacaaaaattttgtgtatttgtcgtataaggattgcttccctttaaggtcatgttcctgcactgtaaagcaggcaaaggaaaaaaaagttatgaaggttaaaatgcatcatgggagcatcacctcattttgcacaaataacaaagaagctaaattttgctcccgaacaaacaacagcaatgctacggaatgcaactacctagcatttccaaaaatacagggccttccggtactgtattacaacttacaagcgatgaggccaagacgattagacgaatagctacagaacaagacaatgagagttcagcactcactttttgccagttccttctccttggcagcagccaggcgcttgagtttagcagcttgtgcaaatgtggacggcctacagcagacatacaggcaaagaagcgaggagtaatttgcagttggaaatcattcttcgatcaatagggaaactctgagtcacagcgaaaggaaggttaattgcctacgttgacaactgatcagcctccttgagaagttgcttgatttcaagccgcactttgatctgctcatcactaagtcctccgctctggatgacaaaagcacagaacgcatgagtggcaagtggaaacactagagcgaaataaatacaaaaccgcagactacaggctaacagatagggagaccgggaagacaaagactcgagcctgcattcaacagttacagtcgcctcggccaaaggttgagaaatttgcatcaaaatccaaactgtctagggccttgggaaatagttcctcggaatcagagttcaattcatggacgaaatagatggaactgatggtaggctactcttccgcccaatcacaattcacggaagatccaggtctcgagactaggagacggatgggaggcgcaacgcgcgatggggaggggggcggcgctgacctttctggcgaggtcgaggtagcggtagagcagctgcagcgcggacacgatgaggaagacgaagatagccgccagggacatggtcgccggcggcggcggagcgaggctgagccggtctctccggcctccgatcggcgttaagttggggatcgtaacgtgacgtgtctcctctccacagatcgacacaaccggcctactcgggtgcacgacgccgcgacaagggtgagatgtccgtgcacgcagcccgtttggagtcctcgttgcccacgaaccgaccccttacagaacaaggcctagcccaaaactattctgagttgagcttttgagcctagcccacctaagccgagcgtcatgaactgatgaacccactaccactagtcaaggcaaaccacaaccacaaatggatgaattgatctagaacaatccgaaggaggggaggccacgtcacactcacaccaaccgaaatatctgccagtatcagatcaaccggccaataggacgccagcgagcccaacacctagcgacgccgcaaaattcaccgcgaggggcaccgggcacggcaaaaacaaaagcccggcgcggtgagaatatctggcgactggcggagacctggtggccagcgcgcggccacatcagccaccccatccgcccacctcacctccggcgagccaatggcaactcgtcttaagattccacgagataaggacccgatcgccggcgacgctatttagccaggtgcgccccccacggtacactccaccagcggcatctatagcaaccggtccaacactttcacgctcagcttcagccccgggggatctcgactctagaggatcgctcaggaaggccgctgagatagaggcatggcggccaatgcgggcggcggtggagcgggaggaggcagcggcagcggcagcgtggctgcgccggcggtgtgccgccccagcggctcgcggtggacgccgacgccggagcagatcaggatgctgaaggagctctactacggctgcggcatccggtcgcccagctcggagcagatccagcgcatcaccgccatgctgcggcagcacggcaagatcgagggcaagaacgtcttctactggttccagaaccacaaggcccgcgagcgccagaagcgccgcctcaccagcctcgacgtcaacgtgcccgccgccggcgcggccgacgccaccaccagccaactcggcgtcctctcgctgtcgtcgccgccgccttcaggcgcggcgcctccctcgcccaccctcggcttctacgccgccggcaatggcggcggatcggctgtgctgctggacacgagttccgactggggcagcagcggcgctgccatggccaccgagacatgcttcctgcaggactacatgggcgtgacggacacgggcagctcgtcgcagtggccacgcttctcgtcgtcggacacgataatggcggcggccgcggcgcgggcggcgacgacgcgggcgcccgagacgctccctctcttcccgacctgcggcgacgacggcggcagcggtagcagcagctacttgccgttctggggtgccgcgtccacaactgccggcgccacttcttccgttgcgatccagcagcaacaccagctgcaggagcagtacagcttttacagcaacagcaacagcacccagctggccggcaccggcaaccaagacgtatcggcaacagcagcagcagccgccgccctggagctgagcctcagctcatggtgctccccttaccctgctgcagggagtatgtgagagcaacgcgagctgccactgctcttcactgatgtctctggaatggaaggaggaggaagtgagcatagcgttggtgcgttgctgtcaagggcgaattcacatggttaacctagacttgtccatcttctggattggccaacttaattaatgtatgaaataaaaggatgcacacatagtgacatgctaatcactataatgtgggcatcaaagttgtgtgttatgtgtaattactagttatctgaataaaagagaaagagatcatccatatttcttatcctaaatgaatgtcacgtgtctttataattctttgatgaaccagatgcatttcattaaccaaatccatatacatataaatattaatcatatataattaatatcaattgggttagcaaaacaaatctagtctaggtgtgttttgcgaatgcggccgccaccgcggtggagctcgaattccggtccgggcctagaaggccagcttcaagtttgtacaaaaaagcaggctccggccagaatggcccggaccgggttaccgaattcgagctcggtaccatttaaattgcgcccgccacggccgtggaggtcgtattccggtcagcttgcatccctgcagtgcagcgtgacccggtcgtgcccctctctagagataatgagcattgcatgtctaagttataaaaaattaccacatattttttttgtcacacttgtttgaagtgcagtttatctatctttatacatatatttaaactttactctacgaataatataatctatagtactacaataatatcagtgttttagagaatcatataaatgaacagttagacatggtctaaaggacaattgagtattttgacaacaggactctacagttttatctttttagtgtgcatgtgttctcctttttttttgcaaatagcttcacctatataatacttcatccattttattagtacatccatttagggtttagggttaatggtttttatagactaatttttttagtacatctattttattctattttagcctctaaattaagaaaactaaaactctattttagtttttttatttaataatttagatataaaatagaataaaataaagtgactaaaaattaaacaaataccctttaagaaattaaaaaaactaaggaaacatttttcttgtttcgagtagataatgccagcctgttaaacgccgtcgacgagtctaacggacaccaaccagcgaaccagcagcgtcgcgtcgggccaagcgaagcagacggcacggcatctctgtcgctgcctctggacccctctcgagagttccgctccaccgttggacttgctccgctgtcggcatccagaaattgcgtggcggagcggcagacgtgagccggcacggcaggcggcctcctcctcctctcacggcaccggcagctacgggggattcctttcccaccgctccttcgctttcccttcctcgcccgccgtaataaatagacaccccctccacaccctctttccccaacctcgtgttgttcggagcgcacacacacacaaccagatctcccccaaatccacccgtcggcacctccgcttcaaggtacgccgctcgtcctcccccccccccctctctaccttctctagatcggcgttccggtccatgcatggttagggcccggtagttctacttctgttcatgtttgtgttagatccgtgtttgtgttagatccgtgctgctagcgttcgtacacggatgcgacctgtacgtcagacacgttctgattgctaacttgccagtgtttctctttggggaatcctgggatggctctagccgttccgcagacgggatcgatttcatgattttttttgtttcgttgcatagggtttggtttgcccttttcctttatttcaatatatgccgtgcacttgtttgtcgggtcatcttttcatgcttttttttgtcttggttgtgatgatgtggtctggttgggcggtcgttctagatcggagtagaattctgtttcaaactacctggtggatttattaattttggatctgtatgtgtgtgccatacatattcatagttacgaattgaagatgatggatggaaatatcgatctaggataggtatacatgttgatgcgggttttactgatgcatatacagagatgctttttgttcgcttggttgtgatgatgtggtgtggttgggcggtcgttcattcgttctagatcggagtagaatactgtttcaaactacctggtgtatttattaattttggaactgtatgtgtgtgtcatacatcttcatagttacgagtttaagatggatggaaatatcgatctaggataggtatacatgttgatgtgggttttactgatgcatatacatgatggcatatgcagcatctattcatatgctctaaccttgagtacctatctattataataaacaagtatgttttataattattttgatcttgatatacttggatgatggcatatgcagcagctatatgtggatttttttagccctgccttcatacgctatttatttgcttggtactgtttcttttgtcgatgctcaccctgttgtttggtgttacttctgcaggtcgactctagaggatccatggccactgtgaacaactggctcgctttctccctctccccgcaggagctgccgccctcccagacgacggactccacactcatctcggccgccaccgccgaccatgtctccggcgatgtctgcttcaacatcccccaagattggagcatgaggggatcagagctttcggcgctcgtcgcggagccgaagctggaggacttcctcggcggcatctccttctccgagcagcatcacaaggccaactgcaacatgatacccagcactagcagcacagtttgctacgcgagctcaggtgctagcaccggctaccatcaccagctgtaccaccagcccaccagctcagcgctccacttcgcggactccgtaatggtggcttcctcggccggtgtccacgacggcggtgccatgctcagcgcggccgccgctaacggtgtcgctggcgctgccagtgccaacggcggcggcatcgggctgtccatgattaagaactggctgcggagccaaccggcgcccatgcagccgagggtggcggcggctgagggcgcgcaggggctctctttgtccatgaacatggcggggacgacccaaggcgctgctggcatgccacttctcgctggagagcgcgcacgggcgcccgagagtgtatcgacgtcagcacagggtggagccgtcgtcgtcacggcgccgaaggaggatagcggtggcagcggtgttgccggcgctctagtagccgtgagcacggacacgggtggcagcggcggcgcgtcggctgacaacacggcaaggaagacggtggacacgttcgggcagcgcacgtcgatttaccgtggcgtgacaaggcatagatggactgggagatatgaggcacatctttgggataacagttgcagaagggaagggcaaactcgtaagggtcgtcaagtctatttaggtggctatgataaagaggagaaagctgctagggcttatgatcttgctgctctgaagtactggggtgccacaacaacaacaaattttccagtgagtaactacgaaaaggagctcgaggacatgaagcacatgacaaggcaggagtttgtagcgtctctgagaaggaagagcagtggtttctccagaggtgcatccatttacaggggagtgactaggcatcaccaacatggaagatggcaagcacggattggacgagttgcagggaacaaggatctttacttgggcaccttcagcacccaggaggaggcagcggaggcgtacgacatcgcggcgatcaagttccgcggcctcaacgccgtcaccaacttcgacatgagccgctacgacgtgaagagcatcctggacagcagcgccctccccatcggcagcgccgccaagcgcctcaaggaggccgaggccgcagcgtccgcgcagcaccaccacgccggcgtggtgagctacgacgtcggccgcatcgcctcgcagctcggcgacggcggagccctggcggcggcgtacggcgcgcactaccacggcgccgcctggccgaccatcgcgttccagccgggcgccgccagcacaggcctgtaccacccgtacgcgcagcagccaatgcgcggcggcgggtggtgcaagcaggagcaggaccacgcggtgatcgcggccgcgcacagcctgcaggacctccaccacctgaacctgggcgcggccggcgcgcacgactttttctcggcagggcagcaggccgccgccgctgcgatgcacggcctgggtagcatcgacagtgcgtcgctcgagcacagcaccggctccaactccgtcgtctacaacggcggggtcggcgacagcaacggcgccagcgccgtcggcggcagtggcggtggctacatgatgccgatgagcgctgccggagcaaccactacatcggcaatggtgagccacgagcaggtgcatgcacgggcctacgacgaagccaagcaggctgctcagatggggtacgagagctacctggtgaacgcggagaacaatggtggcggaaggatgtctgcatgggggactgtcgtgtctgcagccgcggcggcagcagcaagcagcaacgacaacatggccgccgacgtcgggcatggcggcgcgcagctcttcagtgtctggaacgacacttaagcgtacgtgccggcctggctctccgaaagggcgtattccagcacactggcggccgttactagacccaacctagacttgtccatcttctggattggccaacttaattaatgtatgaaataaaaggatgcacacatagtgacatgctaatcactataatgtgggcatcaaagttgtgtgttatgtgtaattactagttatctgaataaaagagaaagagatcatccatatttcttatcctaaatgaatgtcacgtgtctttataattctttgatgaaccagatgcatttcattaaccaaatccatatacatataaatattaatcatatataattaatatcaattgggttagcaaaacaaatctagtctaggtgtgttttgcgaatgcggcctccgggcacccagctttcttgtacaaagtggccgttaacggatcggccagaatggcccggaccgggttaccgaattcgagctcggtaccctggttcacaaactcaatacaacacacagtggagtagggtattacgctccggcggcccgaaccactctaaatccttgtgtcctcgtgtgctcttccaccattaatgactgtaattgcagggacacgaagagttgtagcgcttttgccaacaagatccgctatatgctagtagagtggaacctgcacagcaacaagcatccaataatctgagaataagaattatgtgtggtgatggttctcatctctgcaactcgccattttcgcgagagaaccaaatccaagttggtgaagatcatgatttgggctcatgggctggcatagtagctattacctttgcaattgtggttcgaatctatccgatattctccttttcagggagagctaatgcttatgcttattgggtattttggtttgacactgcttcacgcccaaaaaaaggcaactatgtctgagttggatatggcccaaaaaaaggcagctatgtctgagttggatatggaagtcttctttcgtttagggtgaagtaagaccaagctcatgagcttattatcttaggtcggaacaaattagttgataggcatggcacatttatcaaattataatgattttaacagaaaagcaacacctctttttcagcagcaccagctttgcaagctgcaattgacactccaagcatagtatttgctccaaactcagcctgcatttcgcacaatatcatatctatttccatttggataaaatatattttccagaaatatgggaacagaatcaagatacagaaaaaagttgtggtagtagtggtaagtggaaacacaagtacagtgaaaagatagcattatttctgaacagtcaaattaaccgaaataagtagtatcacatactgcccctaaattgactacacccaatgtaaagaattgcttgagcatattgagccatcagttgtttgtttgtgtaacggatttgacaatgcagagttcaggagcaaaaaaccgcaaaggagagaaagagggaaaggatctcctagtatcccaccttgtggcgcgccctgtcaagtgcatgatggcctggtcgatctgcgtctgctgctgcggttccatcccaacgagtgcctccgacaccttgtcgttgatcacccgcaccgcgtaggcgacccccctggcgaggaacttccgcctctcggaggccccggccgcgtcggcggcggcgccctcgagcgcgcccacgctagccgtagatgctcggtgcacggccttgttggtgtgcaactcgacctcaacggccggtgcgctacgcccgtcaaggatctggcgcgcccgcaccctcgtgatcacggtgggcgcctcccgcctcatgtggccgacgatgaaaagcgccgggttaggggccttggcgcgcaccgccgtattcagggcctcctcgctcttgcgcgagagcaggtgcttccccaggtactcctgcactgacaaggctgccacagcggtggaatttgtcctcacgacttcgccacgtcgtcctcacctccctggcttcccacgactccgccgtatcgaggtgctcggtgggtcgtcttaatccgaagtccgaactaggaagacgagacagagaggtctgaggaatgggcctcgtttgatgttgagctgaattatttttccagcataagcccaggtcttggtccatgaacaaaattactagaaacccagcccagtactacgatctaaaagagggactgccactggatagctctctctagcattctccacgctccaatacagcggcgtcgtgtctatccgggtctatccgcgaacacgtgagaactctccagaaactgctttctcctccacttcatctctctcgctttccctctataaaaagaccccttctaggaattgagggagacagcaagcaccaagcagcgatccgaagctcaatcaattcactcaaacctcttccccaaatcttcgattagatcttcgttgacaagaagactagaaccgaacctgacatgtccaacctgctcacggttcaccagaaccttccggctcttccagtggacgcgacgtccgatgaagtcaggaagaacctcatggacatgttccgcgacaggcaagcgttcagcgagcacacctggaagatgctgctctccgtctgccgctcctgggctgcatggtgcaagctgaacaacaggaagtggttccccgctgagcccgaggacgtgagggattaccttctgtacctgcaagcgcgaggtttgtttctgcttctacctttgatatatatataataattatcattaattagtagtaatataatatttcaaatatttttttcaaaataaaagaatgtagtatatagcaattgcttttctgtagtttataagtgtgtatattttaatttataacttttctaatatatgaccaaaacatggtgatgcctaggtctggcagtgaagaccatccagcaacaccttggacaactgaacatgcttcacaggcgctccggcctcccgcgccccagcgactcgaacgccgtgagcctcgtcatgcgccgcatcaggaaggaaaacgtcgatgccggcgaaagggcaaagcaggccctcgcgttcgagaggaccgatttcgaccaggtccgcagcctgatggagaacagcgacaggtgccaggacattaggaacctggcgttcctcggaattgcatacaacacgctcctcaggatcgcggaaattgcccgcattcgcgtgaaggacattagccgcaccgacggcggcaggatgcttatccacattggcaggaccaagacgctcgtttccaccgcaggcgtcgaaaaggccctcagcctcggagtgaccaagctcgtcgaacgctggatctccgtgtccggcgtcgcggacgacccaaacaactacctcttctgccgcgtccgcaagaacggggtggctgcccctagcgccaccagccaactcagcacgagggccttggaaggtattttcgaggccacccaccgcctgatctacggcgcgaaggatgacagcggtcaacgctacctcgcatggtccgggcactccgcccgcgttggagctgctagggacatggcccgcgccggtgtttccatccccgaaatcatgcaggcgggtggatggacgaacgtgaacattgtcatgaactacattcgcaaccttgacagcgagacgggcgcaatggttcgcctcctggaagatggtgactgaggtacccaacctagacttgtccatcttctggattggccaacttaattaatgtatgaaataaaaggatgcacacatagtgacatgctaatcactataatgtgggcatcaaagttgtgtgttatgtgtaattactagttatctgaataaaagagaaagagatcatccatatttcttatcctaaatgaatgtcacgtgtctttataattctttgatgaaccagatgcatttcattaaccaaatccatatacatataaatattaatcatatataattaatatcaattgggttagcaaaacaaatctagtctaggtgtgttttgcgatccgatatcgaattggccacggtaccagctgctgctgttctagggttcacaagtctgcctatttgtcttccccaatggagctatggttgtctggtctggtccttggtcgtgtcccgtttcattgtgtactatttacctgtaatgtgtatccttaagtctggtttgatggtgtctgaaacgttttgctgtggtagagcagcatggaagaactataatgaataagtgatccctaatcattgtgtccaaattttgcttctgctatacccttttgtgctgtttcttatgttttgcttaaaaatttgatctgacaaacaaatttgtctaaattatgctcttgttctgactgtgtactgtacacatttgtattgctaccggtttggcacatagttttctctttgattgcagatcaaacccttctgattgcagattgcttggctatggctgatgtgctcactgttcttctttagcttgtatattgctgatggtggcttggctacggctgaaaaagttgctgctgcgccgacttggcaactgttgctccagtaatgctttgtcctctcttcctagccgccgacttggcacttggcagctgttgctcctgtaatgcgttgttatctcttatctcttgagatgtactatgattttgaggctgtttgacttgtgccagattgccagtgctgatgctatattatctcaggtttttatgctagtatatgttttactgtgtgctgcctgtgtcgagttacgtaatctattgaaccgctatgcgtgttgatgccctgttgttgcttgccagattgatgcccctgttgcttgcagcttgcaagctgtagtgaaatcctaaaattccaaaccaaatctattctgaacttttgaagatctgtgatgtccggaagaaaagattcaaacagataaacgggactctccagaatctataaaataaatgatcgacaaacgctttgctttggtaggcttcaagcttggtcacccggtccgggcctagaaggccagcttcggccgccccgggcaactttattatacaaagttgatagataaatcagatatctggttcctaaggacccggcggaccgattaaactgattcggtccgacgcgttacctaataacttcgtatagcatacattatacgaagttattagctaactaactagtaagcttaagccatgggtcgacggatccgttaactagcgtggcatttggcaccgccgcacactatgcgagctaggagtgctagtttacagatgaaactatgaaaccaagaaaacacaattgtccgtagctagcgcgtggcgtcgtgtcaagcttcacacagtatcttcgttcttcactataaatcgcgcctgttgttcgtgagacccaccaccgtggataacagtcccctaataataagcgatcaacagcactgctgatggctgaacaccgaggcgccgccgcgcgtaaccatccgccggagcagcccgtcgtgccggcgaacgacgccttccccgaccgcgcccagcagctctgcctcgacgccgggcgcgcgctcgcgatgtgcggcgtgctcgtcgccgtccctcccgcattttacgcgtcgacgtcgcggacgacaccgcacttgccttcgtcggcttcgtcctctggatcatcggtgcgtggctgtgcctcctggcgctcacgcccttggctccacgggcggtgagggcgggcggggccgccgccagcaccttgctgatcaggtgcctgtccctttcatgaactactagcgcccgcgcccgcggccgccgggcacaagagaacacatcgatgttcgctgcgtacgtcagcaataaggcactctttgtcagtagtcgagtgcatatgttgggtgtttgccctgggagatttcaagtgttgtggccattatcccgcaggataaaaaatcggcggcttttggattgatacggaaaataacgatgtttcatgctcgtgttgtgtgtgtgacatcttgtcagccaagtttttaaccgttgctactccccctctgtgggctcagtgtgtggaccggaatacgtcgtacataggccgtagcctaagcccaatatgccgtttttcaggttggcctgtgtgacgacaagcgggtctcaaaagcccatcacgcaactggcctgcaattattggaggagagcgcgtcgagttggttccagaggctgcgtggtggggccggactctgcgacgacctctcgttcgcgtccgatttggttgccgtgagccgtgacgtaacgcctccttccgttcctccctatataagttccacccccgggtccggtttccccaagccccagtgacccccgatcccgatcgcgaaatctccgcacccgccggcaagggaccgaagcaagcctctctcccgaccgtcgcatcaaggtacgcgtccgctcgatctgtcctcttccttctcgatttgacttgctgtggtgcccgatcacgggatcagaatcgcaccagtgtagatttcgcatgttctaagatgtgttagtttccaggctaatccagttctcttgacgcccgatccgatcgagctccgtgtttatttcagcctaatcgtagtattcccctaaaatttcctcattagggggttcgcaagattgttggtcgacaggttcacttatgctcgatcgcttacttttagtcgattcatgctgcgtactattgttgccccccgtggttttatcttttctcgtgtgaaatccagtagatatagtagatatcgtagcattaggttttaattcaatcgattgattattgtatcatcaaaattgagaagttcgaatcatgcctatcatgctgcctcaaccgaaatcctgtatattgaagtttcaattcaattgattgatcattcattagattcaaccaaaatctagaaggttagatgacgcatgtcatgctgcctgcgtagtttacctttgatctgtttatgattaccttatcagtaggatatttgtgattttgggaagtagcactaactgattcatgctgacatgatgttccctttcagattatactgttgagtcctatctaattgatgctttgtatgctatatgaatacgtcatggtaaattagcagttaattagcatattagcaattgggcgtacctcatcaggattgctcttgtagatgtgtgtggtgatgtttcttgttcaattcatgttctgctttaaaagtatgtgttctctgtttgttaattaagattcatggttataatgatttggacctaattaatcagggttgcccttttagatgcgtggttacttgttgagttcatttttttcctgctatagttgtatgcgtttgttcattcatggttagatttgatttgtttcttctctattccatgccttccatatacttcaattgtagcttaacatgagatttctgtatatgcaggtcgaccgccggggatccacacgacaccatggcccagtccaagcacggcctgaccaaggagatgaccatgaagtaccgcatggagggctgcgtggacggccacaagttcgtgatcaccggcgagggcatcggctaccccttcaagggcaagcaggccatcaacctgtgcgtggtggagggcggccccttgcccttcgccgaggacatcttgtccgccgccttcatgtacggcaaccgcgtgttcaccgagtacccccaggacatcgtcgactacttcaagaactcctgccccgccggctacacctgggaccgctccttcctgttcgaggacggcgccgtgtgcatctgcaacgccgacatcaccgtgagcgtggaggagaactgcatgtaccacgagtccaagttctacggcgtgaacttccccgccgacggccccgtgatgaagaagatgaccgacaactgggagccctcctgcgagaagatcatccccgtgcccaagcagggcatcttgaagggcgacgtgagcatgtacctgctgctgaaggacggtggccgcttgcgctgccagttcgacaccgtgtacaaggccaagtccgtgccccgcaagatgcccgactggcacttcatccagcacaagctgacccgcgaggaccgcagcgacgccaagaaccagaagtggcacctgaccgagcacgccatcgcctccggctccgccttgccctccggactcagatctcgatagagtcaacctagacttgtccatcttctggattggccaacttaattaatgtatgaaataaaaggatgcacacatagtgacatgctaatcactataatgtgggcatcaaagttgtgtgttatgtgtaattactagttatctgaataaaagagaaagagatcatccatatttcttatcctaaatgaatgtcacgtgtctttataattctttgatgaaccagatgcatttcattaaccaaatccatatacatataaatattaatcatatataattaatatcaattgggttagcaaaacaaatctagtctaggtgtgttttgcgaattgcggcgcccttactttaacgcctctaaccaacacccctttatctttataaggaacaataaacagaatttgccccactgttctaaatcacctaataatatccccagctaaaaacaataaaggtttcctagaattaagacaagcatgactgttcctccaggagggtttggaacattgttgcagtcttgcagatacgggcgaagggtgagaaacagagcggagggctggaggtgacctcggtagtcgacgccggagttgagcttgacaacgacggggcggcccctgatggacttgaggaagtccgatggcgtcttcaccgtcccgccggcgcccgaggcgggcctgtcgctgccgccgccgccgctgctcatcttgcgcgctgtgcccccggcggtgtccctgtgttgcggatcgcgggtgggccaggtggatgcgagggcgacccgtttggactccggccggagccgccggatccctggtcggtgtcagtgccgtttactctgggccccacgtgtcagtaccgtctgtagatgacaacaacccgtcgtccacagtcatgtccaaaatatcctttcttcttttttttcgattcggatatctatcttccttttttttttccaaaaatcttcttgacgcaccagcgcgcacgtttgtggtaaacgccgacacgtcggtcccacgtcgatagaccccacccaccagtgagtagcgtgtacgtattcgggggtgacggacgtgtcgccgtcgtcttgctagtcccattcccatctgagccacacatctctgaacaaaaaaaaggagggaggcctccacgcacatccccctccgtgccacccgccccaaaccctcgcgccgcctccgagacagccgccgcaaccatggccaccgccgccgccgcgtctaccgcgctcactggcgccactaccgctgcgcccaaggcgaggcgccgggcgcacctcctggccacccgccgcgccctcgccgcgcccatcaggtgctcagcggcgtcacccgccatgccgatggctcccccggccaccccgctccggccgtggggccccaccgagccccgcaagggtgctgacatcctcgtcgagtccctcgagcgctgcggcgtccgcgacgtcttcgcctaccccggcggcgcgtccatggagatccaccaggcactcacccgctcccccgtcatcgccaaccacctcttccgccacgagcaaggggaggcctttgccgcctccggctacgcgcgctcctcgggccgcgtcggcgtctgcatcgccacctccggccccggcgccaccaacctagtctccgcgctcgccgacgcgctgctcgattccgtccccatggtcgccatcacgggacaggtggcgcgacgcatgattggcaccgacgccttccaggagacgcccatcgtcgaggtcacccgctccatcaccaagcacaactacctggtcctcgacgtcgacgacatcccccgcgtcgtgcaggaggctttcttcctcgcctcctctggtcgaccagggccggtgcttgtcgacatccccaaggacatccagcagcagatggcggtgcctgtctgggacaagcccatgagtctgcctgggtacattgcgcgccttcccaagccccctgcgactgagttgcttgagcaggtgctgcgtcttgttggtgaatcgcggcgccctgttctttatgtgggcggtggctgcgcagcatctggtgaggagttgcgacgctttgtggagctgactggaatcccggtcacaactactcttatgggcctcggcaacttccccagcgacgacccactgtctctgcgcatgctaggtatgcatgggacggtgtatgcaaattatgcagtggataaggccgatctgttgcttgcacttggtgtgcggtttgatgatcgcgtgacagggaagattgaggcttttgcaagcagggctaagattgtgcacgttgatattgatccggctgagattggcaagaacaagcagccacatgtgtccatctgtgcagatgttaagcttgctttgcagggcatgaatgctcttcttgaaggaagcacatcaaagaagagctttgactttggctcatggaacgatgagttggatcagcagaagagggaattcccccttgggtataaaacatctaatgaggagatccagccacaatatgctattcaggttcttgatgagctgacgaaaggcgaggccatcatcggcacaggtgttgggcagcaccagatgtgggcggcacagtactacacttacaagcggccaaggcagtggttgtcttcagctggtcttggggctatgggatttggtttgccggctgctgctggtgcttctgtggcaaacccaggtgtcactgttgttgacatcgatggagatggtagctttctcatgaacgttcaggagctagctatgatccgaattgagaacctcccagtgaaggtctttgtgctaaacaaccagcacctggggatggtggtgcagttggaggacaggttctataaggccaacagagcgcacacatacttgggaaacccagagaatgaaagtgagatatatccagatttcgtgacgatcgccaaagggttcaacattccagcggtccgtgtgacaaagaagaacgaagtccgcgcagcgataaagaagatgctcgagactccagggccgtacctcttggatataatcgtcccacaccaggagcatgtgttgcctatgatccctagtggtggggctttcaaggatatgatcctggatggtgatggcaggactgtgtactgactagctagtcagttaacagatctgccagatcctcggtgtacaaataacccgtcttatcctatgagacgggccggcgtcagtgtgttctggaggaatttttatgtcagagcctttttctttgtgtgcttgatgtagatgccaagggaagcttattggctgttgaagcttgatgcaaaataaattatggaactctgttttttgtttatctaataataactagcaaatatgcttccattgcattgaaactaacagccttttgtgtttccaagttttattttgtgacaatgtcatctatttcaattagttgtggaatcggaaacttgcaggactaacttggaaactccaatccctcagcatcctggactttttcctggtgtaatccatgtagatattattttaatcatcattttagttctggaggtttttccatctccggttttgctcccctttcttcaaaaaaaaaaaaaaaatgccgtaggcgccgcaacgcccacctgttgttcaaactcatgggcacgagtggctcgaagattttatacaacaattgctgtagtttcaccgttgctggtgaagaagcatttttttaaaaaaatatagtggtattcattttaattagtttagttgtgcagcgagcaaaatttggacatgctctgctcggaatctgatcgacctagacacagattagcagcagtagctttgtcatctgttccaagagttgcgatctgatagaagaaaaaaaaaccttcccttcaatgtaaaaccgaaactaacaagaaagaagcacagtgccgtttaggcaagtatggagtacgtattaagcatgtagaaggccatgcatgaaccactaacaagaaagaagcgcagtgccattcaggcaagcataagcatgtagattggcatgcatgaacaactaacagtagatcgtctctggtctgattagaagttttttgggaagccaagaaatcatgtacaactggttccatctcaaattccgtggcaaaaagaggcctaagcaacatacctcgagtagatcacattcaagcttggtcacccggtccgtcaatattctgattccgatgacttcgtaggttcctagctcaagccgctcgtgtccaagcgtcacttacgattagctaatgattacggcatctaggaccgactagtggcgcgccgactagctagctaaggtaccgagctcgaattcattccgattaatcgtggcctcttgctcttcaggatgaagagctatgtttaaacgtgcaagcgctactagacaattcagtacattaaaaacgtccgcaatgtgttattaagttgtctaagcgtcaatttgtttacaccacaatatatcctgccaccagccagccaacagctccccgaccggcagctcggcacaaaatcaccactcgatacaggcagcccatcagtccgggacggcgtcagcgggagagccgttgtaaggcggcagactttgctcatgttaccgatgctattcggaagaacggcaactaagctgccgggtttgaaacacggatgatctcgcggagggtagcatgttgattgtaacgatgacagagcgttgctgcctgtgatcaaatatcatctccctcgcagagatccgaattatcagccttcttattcatttctcgcttaaccgtgacaggctgtcgatcttgagaactatgccgacataataggaaatcgctggataaagccgctgaggaagctgagtggcgctatttctttagaagtgaacgttgacgatcgtcgggcccaggtagaatccgcctgagtcgcaagggtgacttcgcctatattggacgacggcgcgcagagggcgacctctttttgggttacgattgtaggattatcactaaaacaatacatgaacatattcaaatggcaatctctctaaggcattggaaataaatacaaataacagttgggtggagtttttcgacctgtgggcgttaaccttctgttaacctaaaagctcttgcccaaacagcagaatcggcgctaattgccagcggcggaacttttccagtttcgcgaaaaatatcgccactggcaaggaatgggtttgagatggcgaagtctgtcctaaaagcagcgcctgtagttgtagggttgacggccttgatggagcgtcatgccgatgccctctcgagccaacttcaagcacatcatcttaaggttttcccgccgcattccgagaagggcattcgaacattcgggccatcggaggcgtccaagctgctcggcgttggcgagtcatatttacggcagaccgcgtctgagatgccagagttgaatgttagcatgagcccgggtggcaggcgaatgttctcaattgaagatatccatgcgattcggaagtatatggatcaggtcggccgcgggaaccggcgctacctgccacatcgtcgaggcggcgagcagcttcaggttatctctgtgatgaatttcaaaggtgggtcgggtaagaccaccaccgccgcgcatctggcgcagtacctcgctatgcgcggatatcgagtcttggccattgatctcgatcctcaagcgagcctttctgcactctttgggagccaaccggagacggacgttggcccgaacgaaacgctctacggcgctataaggtatgatgatgagcaggtggcaatcgaacgagtcgtccgagggacttacattcccgacctccacctgattcctggtaatcttgagctgatggagtttgaacacgatacgccacgcgcgctgatgaaccgcaaagagggcgacacgctcttttatggtcgcatcagccaagtaattgaagatatcgcggataactatgacgtcgtggtcatcgactgccctccccagcttgggtatctcacgctatccgcattgactgcggcgacgtccattcttgtcacggtccatccgcagatgctggatgtgatgtcgatgaaccagtttctggcaatgacatcgaaccttttgcgtgaaatcgagaatgctggcgccaagttcaagtttaattggatgcgctatctgataacccgtttcgaaccgagcgacggaccacagaaccaaatggtaggttatctgcggtcgatttttggcgaaaatgtcctcaattttccgatgcttaaaaccaccgcggtttcggacgctggcctgacaaaccagactctattcgaagtggagcgtggcctgttcacgcgctcgacctatgatcgagccttggaggcgatgaacgccgtcaacgacgagatcgaaacactgatcaaaaaagcatggggtagg

SEQ ID NO: 65 - DNA, 20470 bp, synthetic construct
  misc_feature 1..20470: note = PHP96036
  source 1..20470: mol_type = other DNA
gtttacccgccaatatatcctgtcaaacactgatagtttaaactgaaggcgggaaacgacaatctgatcatgagcggagaattaagggagtcacgttatgacccccgccgatgacgcgggacaagccgttttacgtttggaactgacagaaccgcaacgttgaaggagccactcagcaagctggtacgattgtaatacgactcactatagggcgaattgagcgctgtttaaacgctcttcaactggaagagcggttacgctgtttaaacgctcttcaactggaagagcggttactaccggttcactagctagctgctaatcgagctagttaccctatgaggtgacatgaagcgctcacggttactatgacggttagcttcacgactgttggtggcagtagcgtacgacttagctatagttccggacttacccttaagcgatttaaatctgcggttaccgaattcgagctcggtacctagtacccttgtacttttggtttcacctgcatagagaaaacccacaagaatatgacagtctgatttgtcagtctcattctcaagcaacatttctctatccgttactttcatggtgaataacacaatccatcatcaatactttgtgttactcagaaactgaaagttattccgagtcttgcatatctttggacctactcgtttttctaccattattgctgattgttaagctctcgctacttgaatcggcattgttggagtgggaaggttcaaaaaattggagttatgactagttgtctctttctatgtacgatggagaaaatgaataaacaactgagaaaatggctcttgtttagttgatgatgctcttaagctttccactggttgccatatatgatttgggcatttcactttgatcttaatgggccttgtaaagcccaagactcatgattatctttagttgatgctcttaattaggtgtgggcaaataattcaaactgtatgtacccgaccaaaaccaaagcaaaaataatcgaaccaaaccgaaaatttaaaaataaccgaatgaaaactaaatcctataactgaaagaactgaaaccgaatcaaaatatttaatgtaaccaaaaatatccgaaatataattatattgtcaaaaatattaataatttctagattaaataattaaaaatacttaaaaatttatataaaatagtaaaaatactcgaaaataaccacaaatattcaaaaacaaccgaaatatcccaaaatattcaaagcaaaataaccgaatggataccaaattttaaaaccgaaaaaactggaacaaaaccaaaatcgaaccaaaatttcaaaaatcgaataaatactaaactttagaacaaaaaaaaacgataaccgaatgtatacgaaccaaagccgaattagataaccgaacgtccaggactactcttaatctttccgccacttatgatttgggctattactttgtttataatgagccttttcaagctcaagttcatgattgtccgtgagatgagaaactgacttgttggattcgaaaccctagctagtattggttaatacttaatacataaatgacctgcattgacatcatcatccaagaaaataaaaattgtatgcttgagatatttagttttcctagctaggttttctttattttagtaccgaatctttaggtgtgccacgttaatttagacccattttttcatacttaccaactgagtctagtttaatcatgactataatcgtataaaatgattcagtcgacgtcattgcgaacgtatataaaatcatccaaattgacgtcattccaaagaggtaagcatgcttatctaagagtccgagcatactaaacaagacgacattttatttgcactccaaatcaaattttgtattgcctaaagaaaaacaatcaaactcaagtttcttaaaattaatttcattcaaactaatcactttcaatatctcacatattattcatgccatttctatttgtctaaacatgatttaaaaaaaaaagtaaaatacaaagattactatgcaaaaactctataaaaaaaaattcaaatttcttatttatttgtgacatcaaattttcaaaataatttttttaattatcggttgatccggtcagtcgataaaaacataaactttcagcgaccgttaaaactttcctactaccgatttagagaaaatcttagcttgaaacgtaattgtaacctgccttcatgcaagtcgcaagatatgtcatcctaagttgtatatgttttctcaaaagatgtatttacttgagaaaatacgtttcaacgttgatggacaaccaattaagaatcaagcacctttcgtaatcaatttaggcttatcgtctaaggtatactgatttacgacagttgactagacttataaggaacaaaataatagaatagtttctaaacacttcacctaatcatagagactaagatggtaattcgtaaacgacaaagcctagtgacactgtccattgtaaaattccacatcatattagtattaaacatatacatgtagtttcctgaacacatgtagtatcaaacacacttcgtggcttcttcctcgaaacctgcggccgcgctatagttccggacttacccttaagataacttcgtatagcatacattatacgaagttatgggcccacgcgtgaagagcggttaccagagctggtcacctttgtccaccaagatggaactgtcttcggccagaatggccatctggattcagcaggcctagaaggccatttatcgctatcaactttgtatagaaaagttgggccgaattcgagctcggtacggccagaatggcccggaccgaagcttgcggccgcacactgatagtttaaactgaaggcgggaaacgacaatctgatcatgagcggagaattaagggagtcacgttatgacccccgccgatgacgcgggacaagccgttttacgtttggaactgacagaaccgcaacgttgaaggagccactcagccgcgggtttctggagtttaatgagctaagcacatacgtcagaaaccattattgcgcgttcaaaagtcgcctaaggtcactatcagctagcaaatatttcttgtcaaaaatgctccactgacgttccataaattcccctcggtatccaattagagtctcatattcactctcccgggggatctcgactctagaggatcgctcaggaaggccgctgagatagaggcatggcggccaatgcgggcggcggtggagcgggaggaggcagcggcagcggcagcgtggctgcgccggcggtgtgccgccccagcggctcgcggtggacgccgacgccggagcagatcaggatgctgaaggagctctactacggctgcggcatccggtcgcccagctcggagcagatccagcgcatcaccgccatgctgcggcagcacggcaagatcgagggcaagaacgtcttctactggttccagaaccacaaggcccgcgagcgccagaagcgccgcctcaccagcctcgacgtcaacgtgcccgccgccggcgcggccgacgccaccaccagccaactcggcgtcctctcgctgtcgtcgccgccgccttcaggcgcggcgcctccctcgcccaccctcggcttctacgccgccggcaatggcggcggatcggctgtgctgctggacacgagttccgactggggcagcagcggcgctgccatggccaccgagacatgcttcctgcaggactacatgggcgtgacggacacgggcagctcgtcgcagtggccacgcttctcgtcgtcggacacgataatggcggcggccgcggcgcgggcggcgacgacgcgggcgcccgagacgctccctctcttcccgacctgcggcgacgacggcggcagcggtagcagcagctacttgccgttctggggtgccgcgtccacaactgccggcgccacttcttccgttgcgatccagcagcaacaccagctgcaggagcagtacagcttttacagcaacagcaacagcacccagctggccggcaccggcaaccaagacgtatcggcaacagcagcagcagccgccgccctggagctgagcctcagctcatggtgctccccttaccctgctgcagggagtatgtgagagcaacgcgagctgccactgctcttcactgatgtctctggaatggaaggaggaggaagtgagcatagcgttggtgcgttgctgtcaagggcgaattcacatggttaacctagacttgtccatcttctggattggccaacttaattaatgtatgaaataaaaggatgcacacatagtgacatgctaatcactataatgtgggcatcaaagttgtgtgttatgtgtaattactagttatctgaataaaagagaaagagatcatccatatttcttatcctaaatgaatgtcacgtgtctttataattctttgatgaaccagatgcatttcattaaccaaatccatatacatataaatattaatcatatataattaatatcaattgggttagcaaaacaaatctagtctaggtgtgttttgcgaatgcggccgccaccgcggtggagctcgaattccggtccgggcctagaaggccagcttcaagtttgtacaaaaaagcaggctccggccagaatggcccggaccgggttaccgaattcgagctcggtaccctgggatccgatatcgatgggccctggccgaagcttgcatgcctgcagtgcagcgtgacccggtcgtgcccctctctagagataatgagcattgcatgtctaagttataaaaaattaccacatattttttttgtcacacttgtttgaagtgcagtttatctatctttatacatatatttaaactttactctacgaataatataatctatagtactacaataatatcagtgttttagagaatcatataaatgaacagttagacatggtctaaaggacaattgagtattttgacaacaggactctacagttttatctttttagtgtgcatgtgttctcctttttttttgcaaatagcttcacctatataatacttcatccattttattagtacatccatttagggtttagggttaatggtttttatagactaatttttttagtacatctattttattctattttagcctctaaattaagaaaactaaaactctattttagtttttttatttaataatttagatataaaatagaataaaataaagtgactaaaaattaaacaaataccctttaagaaattaaaaaaactaaggaaacatttttcttgtttcgagtagataatgccagcctgttaaacgccgtcgacgagtctaacggacaccaaccagcgaaccagcagcgtcgcgtcgggccaagcgaagcagacggcacggcatctctgtcgctgcctctggacccctctcgagagttccgctccaccgttggacttgctccgctgtcggcatccagaaattgcgtggcggagcggcagacgtgagccggcacggcaggcggcctcctcctcctctcacggcaccggcagctacgggggattcctttcccaccgctccttcgctttcccttcctcgcccgccgtaataaatagacaccccctccacaccctctttccccaacctcgtgttgttcggagcgcacacacacacaaccagatctcccccaaatccacccgtcggcacctccgcttcaaggtacgccgctcgtcctccccccccccccctctctaccttctctagatcggcgttccggtccatggttagggcccggtagttctacttctgttcatgtttgtgttagatccgtgtttgtgttagatccgtgctgctagcgttcgtacacggatgcgacctgtacgtcagacacgttctgattgctaacttgccagtgtttctctttggggaatcctgggatggctctagccgttccgcagacgggatcgatttcatgattttttttgtttcgttgcatagggtttggtttgcccttttcctttatttcaatatatgccgtgcacttgtttgtcgggtcatcttttcatgcttttttttgtcttggttgtgatgatgtggtctggttgggcggtcgttctagatcggagtagaattctgtttcaaactacctggtggatttattaattttggatctgtatgtgtgtgccatacatattcatagttacgaattgaagatgatggatggaaatatcgatctaggataggtatacatgttgatgcgggttttactgatgcatatacagagatgctttttgttcgcttggttgtgatgatgtggtgtggttgggcggtcgttcattcgttctagatcggagtagaatactgtttcaaactacctggtgtatttattaattttggaactgtatgtgtgtgtcatacatcttcatagttacgagtttaagatggatggaaatatcgatctaggataggtatacatgttgatgtgggttttactgatgcatatacatgatggcatatgcagcatctattcatatgctctaaccttgagtacctatctattataataaacaagtatgttttataattattttgatcttgatatacttggatgatggcatatgcagcagctatatgtggatttttttagccctgccttcatacgctatttatttgcttggtactgtttcttttgtcgatgctcaccctgttgtttggtgttacttctgcaggtcgactctagaggatccatggaggagatcacccaacactttggagttggcgcaagcagccacggccatggccacggccagcaccaccatcatcaccaccaccaccacccgtgggcatcctccctcagcgccgtcgtagcgccgctgccgccgcaaccgccaagcgcaggcctgccgctgaccctgaacacggtggcggccactgggaacagcggcggtagcggcaacccggtgctgcagcttgccaacggtggcggcctcctcgacgcatgcgtcaaggcgaaggagccctcgtcgtcgtctccctacgcaggcgacgtcgaggccatcaaggccaagatcatctcgcacccacactactactcgctcctcactgcctacctcgagtgcaacaaggtgggggcaccaccggaggtgtcggcgaggctgacggagatagcgcaggaggtggaggcgcggcagcgcacggcgctcggcggcctggccgctgcgacggagccggagctggaccagttcatggaggcgtaccacgagatgctggtgaagttcagggaggagctgacgaggccgctgcaggaggcgatggagttcatgcgaagggtggagtcgcagctgaactcgctttccatctccggaaggtcgctgcgcaacatcctttcatctggctcttctgaggaggatcaagaaggtagcggaggagagaccgagctccctgaagttgatgcacatggtgtggaccaagagctgaagcaccatctcctgaagaaatacagtggctatctaagctcgctcaagcaagaactgtcaaagaagaagaagaaagggaagctccccaaggaggctcgccagcagctccttagctggtgggatcagcactacaaatggccttacccctcagagactcagaaggtggcactggctgagtctaccgggcttgacctgaagcagatcaacaactggttcatcaaccagcggaagcggcactggaagccatccgaggagatgcaccacctgatgatggacgggtaccacaccaccaatgccttctacatggacggccacttcatcaacgacggcgggctgtaccggctcggctagccaccggtatctcgcttccattgttaacctagacttgtccatcttctggattggccaacttaattaatgtatgaaataaaaggatgcacacatagtgacatgctaatcactataatgtgggcatcaaagttgtgtgttatgtgtaattactagttatctgaataaaagagaaagagatcatccatatttcttatcctaaatgaatgtcacgtgtctttataattctttgatgaaccagatgcatttcattaaccaaatccatatacatataaatattaatcatatataattaatatcaattgggttagcaaaacaaatctagtctaggtgtgttttgcgaattgcaatgatcatcatgacagatctgcgcgcgatcgatgggcacccagctttcttgtacaaagtggccgttaacggatcggccagaatggcccggaccgggttaccgaattcgagctcggtaccctggttcacaaactcaatacaacacacagtggagtagggtattacgctccggcggcccgaaccactctaaatccttgtgtcctcgtgtgctcttccaccattaatgactgtaattgcagggacacgaagagttgtagcgcttttgccaacaagatccgctatatgctagtagagtggaacctgcacagcaacaagcatccaataatctgagaataagaattatgtgtggtgatggttctcatctctgcaactcgccattttcgcgagagaaccaaatccaagttggtgaagatcatgatttgggctcatgggctggcatagtagctattacctttgcaattgtggttcgaatctatccgatattctccttttcagggagagctaatgcttatgcttattgggtattttggtttgacactgcttcacgcccaaaaaaaggcaactatgtctgagttggatatggcccaaaaaaaggcagctatgtctgagttggatatggaagtcttctttcgtttagggtgaagtaagaccaagctcatgagcttattatcttaggtcggaacaaattagttgataggcatggcacatttatcaaattataatgattttaacagaaaagcaacacctctttttcagcagcaccagctttgcaagctgcaattgacactccaagcatagtatttgctccaaactcagcctgcatttcgcacaatatcatatctatttccatttggataaaatatattttccagaaatatgggaacagaatcaagatacagaaaaaagttgtggtagtagtggtaagtggaaacacaagtacagtgaaaagatagcattatttctgaacagtcaaattaaccgaaataagtagtatcacatactgcccctaaattgactacacccaatgtaaagaattgcttgagcatattgagccatcagttgtttgtttgtgtaacggatttgacaatgcagagttcaggagcaaaaaaccgcaaaggagagaaagagggaaaggatctcctagtatcccaccttgtggcgcgccctgtcaagtgcatgatggcctggtcgatctgcgtctgctgctgcggttccatcccaacgagtgcctccgacaccttgtcgttgatcacccgcaccgcgtaggcgacccccctggcgaggaacttccgcctctcggaggccccggccgcgtcggcggcggcgccctcgagcgcgcccacgctagccgtagatgctcggtgcacggccttgttggtgtgcaactcgacctcaacggccggtgcgctacgcccgtcaaggatctggcgcgcccgcaccctcgtgatcacggtgggcgcctcccgcctcatgtggccgacgatgaaaagcgccgggttaggggccttggcgcgcaccgccgtattcagggcctcctcgctcttgcgcgagagcaggtgcttccccaggtactcctgcactgacaaggctgccacagcggtggaatttgtcctcacgacttcgccacgtcgtcctcacctccctggcttcccacgactccgccgtatcgaggtgctcggtgggtcgtcttaatccgaagtccgaactaggaagacgagacagagaggtctgaggaatgggcctcgtttgatgttgagctgaattatttttccagcataagcccaggtcttggtccatgaacaaaattactagaaacccagcccagtactacgatctaaaagagggactgccactggatagctctctctagcattctccacgctccaatacagcggcgtcgtgtctatccgggtctatccgcgaacacgtgagaactctccagaaactgctttctcctccacttcatctctctcgctttccctctataaaaagaccccttctaggaattgagggagacagcaagcaccaagcagcgatccgaagctcaatcaattcactcaaacctcttccccaaatcttcgattagatcttcgttgacaagaagactagaaccgaacctgacatgtccaacctgctcacggttcaccagaaccttccggctcttccagtggacgcgacgtccgatgaagtcaggaagaacctcatggacatgttccgcgacaggcaagcgttcagcgagcacacctggaagatgctgctctccgtctgccgctcctgggctgcatggtgcaagctgaacaacaggaagtggttccccgctgagcccgaggacgtgagggattaccttctgtacctgcaagcgcgaggtttgtttctgcttctacctttgatatatatataataattatcattaattagtagtaatataatatttcaaatatttttttcaaaataaaagaatgtagtatatagcaattgcttttctgtagtttataagtgtgtatattttaatttataacttttctaatatatgaccaaaacatggtgatgcctaggtctggcagtgaagaccatccagcaacaccttggacaactgaacatgcttcacaggcgctccggcctcccgcgccccagcgactcgaacgccgtgagcctcgtcatgcgccgcatcaggaaggaaaacgtcgatgccggcgaaagggcaaagcaggccctcgcgttcgagaggaccgatttcgaccaggtccgcagcctgatggagaacagcgacaggtgccaggacattaggaacctggcgttcctcggaattgcatacaacacgctcctcaggatcgcggaaattgcccgcattcgcgtgaaggacattagccgcaccgacggcggcaggatgcttatccacattggcaggaccaagacgctcgtttccaccgcaggcgtcgaaaaggccctcagcctcggagtgaccaagctcgtcgaacgctggatctccgtgtccggcgtcgcggacgacccaaacaactacctcttctgccgcgtccgcaagaacggggtggctgcccctagcgccaccagccaactcagcacgagggccttggaaggtattttcgaggccacccaccgcctgatctacggcgcgaaggatgacagcggtcaacgctacctcgcatggtccgggcactccgcccgcgttggagctgctagggacatggcccgcgccggtgtttccatccccgaaatcatgcaggcgggtggatggacgaacgtgaacattgtcatgaactacattcgcaaccttgacagcgagacgggcgcaatggttcgcctcctggaagatggtgactgaggtacccaacctagacttgtccatcttctggattggccaacttaattaatgtatgaaataaaaggatgcacacatagtgacatgctaatcactataatgtgggcatcaaagttgtgtgttatgtgtaattactagttatctgaataaaagagaaagagatcatccatatttcttatcctaaatgaatgtcacgtgtctttataattctttgatgaaccagatgcatttcattaaccaaatccatatacatataaatattaatcatatataattaatatcaattgggttagcaaaacaaatctagtctaggtgtgttttgcgatccgatatcgaattggccacggtaccagctgctgctgttctagggttcacaagtctgcctatttgtcttccccaatggagctatggttgtctggtctggtccttggtcgtgtcccgtttcattgtgtactatttacctgtaatgtgtatccttaagtctggtttgatggtgtctgaaacgttttgctgtggtagagcagcatggaagaactataatgaataagtgatccctaatcattgtgtccaaattttgcttctgctatacccttttgtgctgtttcttatgttttgcttaaaaatttgatctgacaaacaaatttgtctaaattatgctcttgttctgactgtgtactgtacacatttgtattgctaccggtttggcacatagttttctctttgattgcagatcaaacccttctgattgcagattgcttggctatggctgatgtgctcactgttcttctttagcttgtatattgctgatggtggcttggctacggctgaaaaagttgctgctgcgccgacttggcaactgttgctccagtaatgctttgtcctctcttcctagccgccgacttggcacttggcagctgttgctcctgtaatgcgttgttatctcttatctcttgagatgtactatgattttgaggctgtttgacttgtgccagattgccagtgctgatgctatattatctcaggtttttatgctagtatatgttttactgtgtgctgcctgtgtcgagttacgtaatctattgaaccgctatgcgtgttgatgccctgttgttgcttgccagattgatgcccctgttgcttgcagcttgcaagctgtagtgaaatcctaaaattccaaaccaaatctattctgaacttttgaagatctgtgatgtccggaagaaaagattcaaacagataaacgggactctccagaatctataaaataaatgatcgacaaacgctttgctttggtaggcttcaagcttggtcacccggtccgggcctagaaggccagcttcggccgccccgggcaactttattatacaaagttgatagataaatcagatatctggttcctaaggacccggcggaccgattaaactgattcggtccgacgcgttacctaataacttcgtatagcatacattatacgaagttattagctaactaactagtaagcttaagccatgggtcgacggatccgttaactagcgtggcatttggcaccgccgcacactatgcgagctaggagtgctagtttacagatgaaactatgaaaccaagaaaacacaattgtccgtagctagcgcgtggcgtcgtgtcaagcttcacacagtatcttcgttcttcactataaatcgcgcctgttgttcgtgagacccaccaccgtggataacagtcccctaataataagcgatcaacagcactgctgatggctgaacaccgaggcgccgccgcgcgtaaccatccgccggagcagcccgtcgtgccggcgaacgacgccttccccgaccgcgcccagcagctctgcctcgacgccgggcgcgcgctcgcgatgtgcggcgtgctcgtcgccgtccctcccgcattttacgcgtcgacgtcgcggacgacaccgcacttgccttcgtcggcttcgtcctctggatcatcggtgcgtggctgtgcctcctggcgctcacgcccttggctccacgggcggtgagggcgggcggggccgccgccagcaccttgctgatcaggtgcctgtccctttcatgaactactagcgcccgcgcccgcggccgccgggcacaagagaacacatcgatgttcgctgcgtacgtcagcaataaggcactctttgtcagtagtcgagtgcatatgttgggtgtttgccctgggagatttcaagtgttgtggccattatcccgcaggataaaaaatcggcggcttttggattgatacggaaaataacgatgtttcatgctcgtgttgtgtgtgtgacatcttgtcagccaagtttttaaccgttgctactccccctctgtgggctcagtgtgtggaccggaatacgtcgtacataggccgtagcctaagcccaatatgccgtttttcaggttggcctgtgtgacgacaagcgggtctcaaaagcccatcacgcaactggcctgcaattattggaggagagcgcgtcgagttggttccagaggctgcgtggtggggccggactctgcgacgacctctcgttcgcgtccgatttggttgccgtgagccgtgacgtaacgcctccttccgttcctccctatataagttccacccccgggtccggtttccccaagccccagtgacccccgatcccgatcgcgaaatctccgcacccgccggcaagggaccgaagcaagcctctctcccgaccgtcgcatcaaggtacgcgtccgctcgatctgtcctcttccttctcgatttgacttgctgtggtgcccgatcacgggatcagaatcgcaccagtgtagatttcgcatgttctaagatgtgttagtttccaggctaatccagttctcttgacgcccgatccgatcgagctccgtgtttatttcagcctaatcgtagtattcccctaaaatttcctcattagggggttcgcaagattgttggtcgacaggttcacttatgctcgatcgcttacttttagtcgattcatgctgcgtactattgttgccccccgtggttttatcttttctcgtgtgaaatccagtagatatagtagatatcgtagcattaggttttaattcaatcgattgattattgtatcatcaaaattgagaagttcgaatcatgcctatcatgctgcctcaaccgaaatcctgtatattgaagtttcaattcaattgattgatcattcattagattcaaccaaaatctagaaggttagatgacgcatgtcatgctgcctgcgtagtttacctttgatctgtttatgattaccttatcagtaggatatttgtgattttgggaagtagcactaactgattcatgctgacatgatgttccctttcagattatactgttgagtcctatctaattgatgctttgtatgctatatgaatacgtcatggtaaattagcagttaattagcatattagcaattgggcgtacctcatcaggattgctcttgtagatgtgtgtggtgatgtttcttgttcaattcatgttctgctttaaaagtatgtgttctctgtttgttaattaagattcatggttataatgatttggacctaattaatcagggttgcccttttagatgcgtggttacttgttgagttcatttttttcctgctatagttgtatgcgtttgttcattcatggttagatttgatttgtttcttctctattccatgccttccatatacttcaattgtagcttaacatgagatttctgtatatgcaggtcgaccgccggggatccacacgacaccatggcccagtccaagcacggcctgaccaaggagatgaccatgaagtaccgcatggagggctgcgtggacggccacaagttcgtgatcaccggcgagggcatcggctaccccttcaagggcaagcaggccatcaacctgtgcgtggtggagggcggccccttgcccttcgccgaggacatcttgtccgccgccttcatgtacggcaaccgcgtgttcaccgagtacccccaggacatcgtcgactacttcaagaactcctgccccgccggctacacctgggaccgctccttcctgttcgaggacggcgccgtgtgcatctgcaacgccgacatcaccgtgagcgtggaggagaactgcatgtaccacgagtccaagttctacggcgtgaacttccccgccgacggccccgtgatgaagaagatgaccgacaactgggagccctcctgcgagaagatcatccccgtgcccaagcagggcatcttgaagggcgacgtgagcatgtacctgctgctgaaggacggtggccgcttgcgctgccagttcgacaccgtgtacaaggccaagtccgtgccccgcaagatgcccgactggcacttcatccagcacaagctgacccgcgaggaccgcagcgacgccaagaaccagaagtggcacctgaccgagcacgccatcgcctccggctccgccttgccctccggactcagatctcgatagagtcaacctagacttgtccatcttctggattggccaacttaattaatgtatgaaataaaaggatgcacacatagtgacatgctaatcactataatgtgggcatcaaagttgtgtgttatgtgtaattactagttatctgaataaaagagaaagagatcatccatatttcttatcctaaatgaatgtcacgtgtctttataattctttgatgaaccagatgcatttcattaaccaaatccatatacatataaatattaatcatatataattaatatcaattgggttagcaaaacaaatctagtctaggtgtgttttgcgaattgcggcgcccttactttaacgcctctaaccaacacccctttatctttataaggaacaataaacagaatttgccccactgttctaaatcacctaataatatccccagctaaaaacaataaaggtttcctagaattaagacaagcatgactgttcctccaggagggtttggaacattgttgcagtcttgcagatacgggcgaagggtgagaaacagagcggagggctggaggtgacctcggtagtcgacgccggagttgagcttgacaacgacggggcggcccctgatggacttgaggaagtccgatggcgtcttcaccgtcccgccggcgcccgaggcgggcctgtcgctgccgccgccgccgctgctcatcttgcgcgctgtgcccccggcggtgtccctgtgttgcggatcgcgggtgggccaggtggatgcgagggcgacccgtttggactccggccggagccgccggatccctggtcggtgtcagtgccgtttactctgggccccacgtgtcagtaccgtctgtagatgacaacaacccgtcgtccacagtcatgtccaaaatatcctttcttcttttttttcgattcggatatctatcttccttttttttttccaaaaatcttcttgacgcaccagcgcgcacgtttgtggtaaacgccgacacgtcggtcccacgtcgatagaccccacccaccagtgagtagcgtgtacgtattcgggggtgacggacgtgtcgccgtcgtcttgctagtcccattcccatctgagccacacatctctgaacaaaaaaaaggagggaggcctccacgcacatccccctccgtgccacccgccccaaaccctcgcgccgcctccgagacagccgccgcaaccatggccaccgccgccgccgcgtctaccgcgctcactggcgccactaccgctgcgcccaaggcgaggcgccgggcgcacctcctggccacccgccgcgccctcgccgcgcccatcaggtgctcagcggcgtcacccgccatgccgatggctcccccggccaccccgctccggccgtggggccccaccgagccccgcaagggtgctgacatcctcgtcgagtccctcgagcgctgcggcgtccgcgacgtcttcgcctaccccggcggcgcgtccatggagatccaccaggcactcacccgctcccccgtcatcgccaaccacctcttccgccacgagcaaggggaggcctttgccgcctccggctacgcgcgctcctcgggccgcgtcggcgtctgcatcgccacctccggccccggcgccaccaacctagtctccgcgctcgccgacgcgctgctcgattccgtccccatggtcgccatcacgggacaggtggcgcgacgcatgattggcaccgacgccttccaggagacgcccatcgtcgaggtcacccgctccatcaccaagcacaactacctggtcctcgacgtcgacgacatcccccgcgtcgtgcaggaggctttcttcctcgcctcctctggtcgaccagggccggtgcttgtcgacatccccaaggacatccagcagcagatggcggtgcctgtctgggacaagcccatgagtctgcctgggtacattgcgcgccttcccaagccccctgcgactgagttgcttgagcaggtgctgcgtcttgttggtgaatcgcggcgccctgttctttatgtgggcggtggctgcgcagcatctggtgaggagttgcgacgctttgtggagctgactggaatcccggtcacaactactcttatgggcctcggcaacttccccagcgacgacccactgtctctgcgcatgctaggtatgcatgggacggtgtatgcaaattatgcagtggataaggccgatctgttgcttgcacttggtgtgcggtttgatgatcgcgtgacagggaagattgaggcttttgcaagcagggctaagattgtgcacgttgatattgatccggctgagattggcaagaacaagcagccacatgtgtccatctgtgcagatgttaagcttgctttgcagggcatgaatgctcttcttgaaggaagcacatcaaagaagagctttgactttggctcatggaacgatgagttggatcagcagaagagggaattcccccttgggtataaaacatctaatgaggagatccagccacaatatgctattcaggttcttgatgagctgacgaaaggcgaggccatcatcggcacaggtgttgggcagcaccagatgtgggcggcacagtactacacttacaagcggccaaggcagtggttgtcttcagctggtcttggggctatgggatttggtttgccggctgctgctggtgcttctgtggcaaacccaggtgtcactgttgttgacatcgatggagatggtagctttctcatgaacgttcaggagctagctatgatccgaattgagaacctcccagtgaaggtctttgtgctaaacaaccagcacctggggatggtggtgcagttggaggacaggttctataaggccaacagagcgcacacatacttgggaaacccagagaatgaaagtgagatatatccagatttcgtgacgatcgccaaagggttcaacattccagcggtccgtgtgacaaagaagaacgaagtccgcgcagcgataaagaagatgctcgagactccagggccgtacctcttggatataatcgtcccacaccaggagcatgtgttgcctatgatccctagtggtggggctttcaaggatatgatcctggatggtgatggcaggactgtgtactgactagctagtcagttaacagatctgccagatcctcggtgtacaaataacccgtcttatcctatgagacgggccggcgtcagtgtgttctggaggaatttttatgtcagagcctttttctttgtgtgcttgatgtagatgccaagggaagcttattggctgttgaagcttgatgcaaaataaattatggaactctgttttttgtttatctaataataactagcaaatatgcttccattgcattgaaactaacagccttttgtgtttccaagttttattttgtgacaatgtcatctatttcaattagttgtggaatcggaaacttgcaggactaacttggaaactccaatccctcagcatcctggactttttcctggtgtaatccatgtagatattattttaatcatcattttagttctggaggtttttccatctccggttttgctcccctttcttcaaaaaaaaaaaaaaaatgccgtaggcgccgcaacgcccacctgttgttcaaactcatgggcacgagtggctcgaagattttatacaacaattgctgtagtttcaccgttgctggtgaagaagcatttttttaaaaaaatatagtggtattcattttaattagtttagttgtgcagcgagcaaaatttggacatgctctgctcggaatctgatcgacctagacacagattagcagcagtagctttgtcatctgttccaagagttgcgatctgatagaagaaaaaaaaaccttcccttcaatgtaaaaccgaaactaacaagaaagaagcacagtgccgtttaggcaagtatggagtacgtattaagcatgtagaaggccatgcatgaaccactaacaagaaagaagcgcagtgccattcaggcaagcataagcatgtagattggcatgcatgaacaactaacagtagatcgtctctggtctgattagaagttttttgggaagccaagaaatcatgtacaactggttccatctcaaattccgtggcaaaaagaggcctaagcaacatacctcgagtagatcacattcaagcttggtcacccggtccgtcaatattctgattccgatgacttcgtaggttcctagctcaagccgctcgtgtccaagcgtcacttacgattagctaatgattacggcatctaggaccgactagtggcgcgccgactagctagctaaggtaccgagctcgaattcattccgattaatcgtggcctcttgctcttcaggatgaagagctatgtttaaacgtgcaagcgctactagacaattcagtacattaaaaacgtccgcaatgtgttattaagttgtctaagcgtcaatttgtttacaccacaatatatcctgcca

SEQ ID NO: 66 - DNA, 20881 bp, synthetic construct
  misc_feature 1..20881: note = PHP96037
  source 1..20881: mol_type = other DNA
gtttacccgccaatatatcctgtcaaacactgcggccgcacttgaccgcggatggagccggagctgtggtgaggccatcgacgggaggtgggggagaacacagtctcagtgttctttgtgagtccgcaaggtttttagcttttctgtattaattaaggttgctgttggctgtagaatacggtcgtggaagagctgtatcggtagctactacgtaagctattatatactggaagtctggagctcgtcgatctccggtcgtcttcctccatttctcctcgtcttgctttgactgctgctaccatttgcttctgttttctgatgaagcatgccatgtcggccaccagtgtttgtgtggtttttgcagggaatggctttcaagtgctgtgattgaatggccctcgtcgtcctcggctgagctcacatggacgcgtcatgtgagtgagatatatgatcatatgatgagtggggttcgggtgagtgcgtacttgaagtaggatcccgctttcactcattcattcattggcctttaaaccgggaaattttcgcgaggagatggagggaagcaagcagggtgacgagtgcagagtgccgcgagcgctttgtcaaaaggcaccgccgtaggcaaaaaaatcaatggccctgactgactcgatggtagtactactgtagagactagagagggttgctccccatatcttcgtgtgacttttactccagcattgcatttccgtcattgagacgttaattaatagcagctttcgggacagatgactgtggccatgtttcgtcacggccgcttcgtgccagctgggggtactatagtactgtgattttgttagtaaaaactttcattaggccaccattgacgaccgggccttcgcttttgctgcgctaattaaccatttcccggcgaccgaagggaacatgaacatgccccgacacatgagggcatgaggactagtgttctccctgtcgttcgttgacttgactagtgatagtttaaacgctcttcaactggaagagcggttactaccggttcactagctagctgctaatcgagctagttaccctatgaggtgacatgaagcgctcacggttactatgacggttagcttcacgactgttggtggcagtagcgtacgacttagctatagttccggacttacctagctaataacttcgtatagcatacattatacgaagttatggttaccgagctcccctggccgaagcttacactgatagtttaaactgaaggcgggaaacgacaatctgatcatgagcggagaattaagggagtcacgttatgacccccgccgatgacgcgggacaagccgttttacgtttggaactgacagaaccgcaacgattgaaggagccactcagccgcgggtttctggagtttaatgagctaagcacatacgtcagaaaccattattgcgcgttcaaaagtcgcctaaggtcactatcagctagcaaatatttcttgtcaaaaatgctccactgacgttccataaattcccctcggtatccaattagagtctcatattcactcccatggcggccaatgcgggcggcggtggagcgggaggaggcagcggcagcggcagcgtggctgcgccggcggtgtgccgccccagcggctcgcggtggacgccgacgccggagcagatcaggatgctgaaggagctctactacggctgcggcatccggtcgcccagctcggagcagatccagcgcatcaccgccatgctgcggcagcacggcaagatcgagggcaagaacgtcttctactggttccagaaccacaaggcccgcgagcgccagaagcgccgcctcaccagcctcgacgtcaacgtgcccgccgccggcgcggccgacgccaccaccagccaactcggcgtcctctcgctgtcgtcgccgccgccttcaggcgcggcgcctccctcgcccaccctcggcttctacgccgccggcaatggcggcggatcggctgtgctgctggacacgagttccgactggggcagcagcggcgctgctatggccaccgagacatgcttcctgcaggactacatgggcgtgacggacacgggcagctcgtcgcagtggccacgcttctcgtcgtcggacacgataatggcggcggccgcggcgcgggcggcgacgacgcgggcgcccgagacgctccctctcttcccgacctgcggcgacgacggcggcagcggtagcagcagctacttgccgttctggggtgccgcgtccacaactgccggcgccacttcttccgttgcgatccaacagcaacaccagctgcaggagcagtacagcttttacagcaacagcaacagcacccagctggccggcaccggcaaccaagacgtatcggcaacagcagcagcagccgccgccctggagctgagcctcagctcatggtgctccccttaccctgctgcagggagtatgtgagagcaacgcgagctgccactgctcttcactgatgtctctggaatggaaggaggaggaagtgagaacagatcattcgacaaagcagcattagtccgttgatcggtggaagaccactcgtcagtgttgagttgaatgtttgatcaataaaatacggcaatgctgtaagggttgttttttatgccattgataatacactgtactgttcagttgttgaactctatttcttagccatgccaagtgcttttcttattttgaataacattacagcaaaaagttgaaagacaaaaaaaaaacccccgaacagagtgctttgggtcccaagcttctttagactgtgttcggcgttccccctaaatttctccccctatatctcactcacttgtcacatcagcgttctctttccccctatatctccacgctctacagcagttccacctatatcaaacctctataccccaccacaacaatattatatactttcatcttcaactaactcatgtaccttccaatttttttctactaataattatttacgtgcacagaaacttagcaaggagagagagagcgggaatttaaatgctcggcgttaggcttttagtccgctaggtggctagaccgaggttaggacgctagttcactaggggcctagtggtgttttaagacgtcacggtcaccgcggccgcatcgagcagctggcttgtggggaccagacaaaaaaggaatggtgcagaattgttaggcgcacctaccaaaagcatctttgcctttattgcaaagataaagcagattcctctagtacaagtggggaacaaaataacgtggaaaagagctgtcctgacagcccactcactaatgcgtatgacgaacgcagtgacgaccacaaaactcgagcaacgagatcatgagccaatcaaagaggagtgatgtagacctaaagcaataatggagccatgacgtaagggcttacgcccatacgaaataattaaaggctgatgtgacctgtcggtctctcagaacctttactttttatgtttggcgtgtatttttaaatttccacggcaatgacgatgtgaccgtcgacccactaaaacattgctttgtcaaaagctaaaaaagatgatgcccgacagccacttgtgtgaagcatgagaagccggtccctccactaagaaaattagtgaagcatcttccagtggtccctccactcacagctcaatcagtgagcaacaggacgaaggaaatgacgtaagccatgacgtctaatcccattcgaaacgcgtggaccgaagcttgcatgcctgcagtgcagcgtgacccggtcgtgcccctctctagagataatgagcattgcatgtctaagttataaaaaattaccacatattttttttgtcacacttgtttgaagtgcagtttatctatctttatacatatatttaaactttactctacgaataatataatctatagtactacaataatatcagtgttttagagaatcatataaatgaacagttagacatggtctaaaggacaattgagtattttgacaacaggactctacagttttatctttttagtgtgcatgtgttctcctttttttttgcaaatagcttcacctatataatacttcatccattttattagtacatccatttagggtttagggttaatggtttttatagactaatttttttagtacatctattttattctattttagcctctaaattaagaaaactaaaactctattttagtttttttatttaataatttagatataaaatagaataaaataaagtgactaaaaattaaacaaataccctttaagaaattaaaaaaactaaggaaacatttttcttgtttcgagtagataatgccagcctgttaaacgccgtcgacgagtctaacggacaccaaccagcgaaccagcagcgtcgcgtcgggccaagcgaagcagacggcacggcatctctgtcgctgcctctggacccctctcgagagttccgctccaccgttggacttgctccgctgtcggcatccagaaattgcgtggcggagcggcagacgtgagccggcacggcaggcggcctcctcctcctctcacggcaccggcagctacgggggattcctttcccaccgctccttcgctttcccttcctcgcccgccgtaataaatagacaccccctccacaccctctttccccaacctcgtgttgttcggagcgcacacacacacaaccagatctcccccaaatccacccgtcggcacctccgcttcaaggtacgccgctcgtcctcccccccccccctctctaccttctctagatcggcgttccggtccatgcatggttagggcccggtagttctacttctgttcatgtttgtgttagatccgtgtttgtgttagatccgtgctgctagcgttcgtacacggatgcgacctgtacgtcagacacgttctgattgctaacttgccagtgtttctctttggggaatcctgggatggctctagccgttccgcagacgggatcgatttcatgattttttttgtttcgttgcatagggtttggtttgcccttttcctttatttcaatatatgccgtgcacttgtttgtcgggtcatcttttcatgcttttttttgtcttggttgtgatgatgtggtctggttgggcggtcgttctagatcggagtagaattctgtttcaaactacctggtggatttattaattttggatctgtatgtgtgtgccatacatattcatagttacgaattgaagatgatggatggaaatatcgatctaggataggtatacatgttgatgcgggttttactgatgcatatacagagatgctttttgttcgcttggttgtgatgatgtggtgtggttgggcggtcgttcattcgttctagatcggagtagaatactgtttcaaactacctggtgtatttattaattttggaactgtatgtgtgtgtcatacatcttcatagttacgagtttaagatggatggaaatatcgatctaggataggtatacatgttgatgtgggttttactgatgcatatacatgatggcatatgcagcatctattcatatgctctaaccttgagtacctatctattataataaacaagtatgttttataattattttgatcttgatatacttggatgatggcatatgcagcagctatatgtggatttttttagccctgccttcatacgctatttatttgcttggtactgtttcttttgtcgatgctcaccctgttgtttggtgttacttctgcaggtcgactttaacttagcctaggatccatggccactgtgaacaactggctcgctttctccctctccccgcaggagctgccgccctcccagacgacggactccacactcatctcggccgccaccgccgaccatgtctccggcgatgtctgcttcaacatcccccaagattggagcatgaggggatcagagctttcggcgctcgtcgcggagccgaagctggaggacttcctcggcggcatctccttctccgagcagcatcacaaggccaactgcaacatgatacccagcactagcagcacagtttgctacgcgagctcaggtgctagcaccggctaccatcaccagctgtaccaccagcccaccagctcagcgctccacttcgcggactccgtaatggtggcttcctcggccggtgtccacgacggcggtgccatgctcagcgcggccgccgctaacggtgtcgctggcgctgccagtgccaacggcggcggcatcgggctgtccatgattaagaactggctgcggagccaaccggcgcccatgcagccgagggtggcggcggctgagggcgcgcaggggctctctttgtccatgaacatggcggggacgacccaaggcgctgctggcatgccacttctcgctggagagcgcgcacgggcgcccgagagtgtatcgacgtcagcacagggtggagccgtcgtcgtcacggcgccgaaggaggatagcggtggcagcggtgttgccggcgctctagtagccgtgagcacggacacgggtggcagcggcggcgcgtcggctgacaacacggcaaggaagacggtggacacgttcgggcagcgcacgtcgatttaccgtggcgtgacaaggcatagatggactgggagatatgaggcacatctttgggataacagttgcagaagggaagggcaaactcgtaagggtcgtcaagtctatttaggtggctatgataaagaggagaaagctgctagggcttatgatcttgctgctctgaagtactggggtgccacaacaacaacaaattttccagtgagtaactacgaaaaggagctcgaggacatgaagcacatgacaaggcaggagtttgtagcgtctctgagaaggaagagcagtggtttctccagaggtgcatccatttacaggggagtgactaggcatcaccaacatggaagatggcaagcacggattggacgagttgcagggaacaaggatctttacttgggcaccttcagcacccaggaggaggcagcggaggcgtacgacatcgcggcgatcaagttccgcggcctcaacgccgtcaccaacttcgacatgagccgctacgacgtgaagagcatcctggacagcagcgccctccccatcggcagcgccgccaagcgcctcaaggaggccgaggccgcagcgtccgcgcagcaccaccacgccggcgtggtgagctacgacgtcggccgcatcgcctcgcagctcggcgacggcggagccctggcggcggcgtacggcgcgcactaccacggcgccgcctggccgaccatcgcgttccagccgggcgccgccagcacaggcctgtaccacccgtacgcgcagcagccaatgcgcggcggcgggtggtgcaagcaggagcaggaccacgcggtgatcgcggccgcgcacagcctgcaggacctccaccacctgaacctgggcgcggccggcgcgcacgactttttctcggcagggcagcaggccgccgccgctgcgatgcacggcctgggtagcatcgacagtgcgtcgctcgagcacagcaccggctccaactccgtcgtctacaacggcggggtcggcgacagcaacggcgccagcgccgtcggcggcagtggcggtggctacatgatgccgatgagcgctgccggagcaaccactacatcggcaatggtgagccacgagcaggtgcatgcacgggcctacgacgaagccaagcaggctgctcagatggggtacgagagctacctggtgaacgcggagaacaatggtggcggaaggatgtctgcatgggggactgtcgtgtctgcagccgcggcggcagcagcaagcagcaacgacaacatggccgccgacgtcgggcatggcggcgcgcagctcttcagtgtctggaacgacacttaagcgtacctagtggtacctgacatcttatagtctgcaacctctcgtgtctgaattcctatctttatcaagtgttattgcttccacgactataggacagctttcgtcgaaagcttttgctcatgtgatctcgaaggattcatctagtctgatttttcgtgacttgtatcggttttattggattcatccaacatatatcaataaaaaatgagttgtgtttcctttcttcctagttcagttaaaattatttccctcctgcgcttgtgctgtaattgtctgtgtacctgttgtttgtgactgtgttagttcccttggatatgatttcgtatttgatatgtacatggagatagcttagcttcattattggagtatgaagttagtatgacatagtcactctcctggaaaattgacactgcaaaccatatttttattctgaaccacaaatcctagtcagtccgctggcatatgccgtccgtttgctgaatccagaacgtgggtttggagatgtacggctgagatgcctctatgcgaaggggatttcgtggtgaaacgagatgggagtagagcaacgcccgtggaagatgcttcaaacttccacacttttgagcaacgatcggcagtagtaaggtagacgatttcaagatcaaagcatatgaagataaacaacatcaacaacaaaatttgttggggttctatagagagaaacagagctacatacatacactgttttgtatctaccatctgagatgatgaaaagatgaaaaactaaagaatgccccggcgccaacgccaggacacgccgcgcgcgcgtcacccgagccatctcttgacccagccggcgctgtatatttacacacgttgcagcatcgatcaccacctgttcgatcgcgtcgccgtcaccggcgcgccgcgacttattgaactagtctagggcgcggctaacaacctagcttagattgccttgtctaaacccttaggctaacgcgccactctagaaggccgatctccccgggttaccgagctccaccttgctagttggatattacctcttctcttcaaagtatccttgaacgctcaccggttatcaaatctctacactatagctctgtagtcttgctagatagttagttctttagctctctctagaggttcacaaactcaatacaacacacagtggagtagggtattacgctccggcggcccgaaccactctaaatccttgtgtcctcgtgtgctcttccaccattaatgactgtaattgcagggacacgaagagttgtagcgcttttgccaacaagatccgctatatgctagtagagtggaacctgcacagcaacaagcatccaataatctgagaataagaattatgtgtggtgatggttctcatctctgcaactcgccattttcgcgagagaaccaaatccaagttggtgaagatcatgatttgggctcatgggctggcatagtagctattacctttgcaattgtggttcgaatctatccgatattctccttttcagggagagctaatgcttatgcttattgggtattttggtttgacactgcttcacgcccaaaaaaaggcaactatgtctgagttggatatggcccaaaaaaaggcagctatgtctgagttggatatggaagtcttctttcgtttagggtgaagtaagaccaagctcatgagcttattatcttaggtcggaacaaattagttgataggcatggcacatttatcaaattataatgattttaacagaaaagcaacacctctttttcagcagcaccagctttgcaagctgcaattgacactccaagcatagtatttgctccaaactcagcctgcatttcgcacaatatcatatctatttccatttggataaaatatattttccagaaatatgggaacagaatcaagatacagaaaaaagttgtggtagtagtggtaagtggaaacacaagtacagtgaaaagatagcattatttctgaacagtcaaattaaccgaaataagtagtatcacatactgcccctaaattgactacacccaatgtaaagaattgcttgagcatattgagccatcagttgtttgtttgtgtaacggatttgacaatgcagagttcaggagcaaaaaaccgcaaaggagagaaagagggaaaggatctcctagtatcccaccttgtggcgcgccctgtcaagtgcatgatggcctggtcgatctgcgtctgctgctgcggttccatcccaacgagtgcctccgacaccttgtcgttgatcacccgcaccgcgtaggcgacccccctggcgaggaacttccgcctctcggaggccccggccgcgtcggcggcggcgccctcgagcgcgcccacgctagccgtagatgctcggtgcacggccttgttggtgtgcaactcgacctcaacggccggtgcgctacgcccgtcaaggatctggcgcgcccgcaccctcgtgatcacggtgggcgcctcccgcctcatgtggccgacgatgaaaagcgccgggttaggggccttggcgcgcaccgccgtattcagggcctcctcgctcttgcgcgagagcaggtgcttccccaggtactcctgcactgacaaggctgccacagcggtggaatttgtcctcacgacttcgccacgtcgtcctcacctccctggcttcccacgactccgccgtatcgaggtgctcggtgggtcgtcttaatccgaagtccgaactaggaagacgagacagagaggtctgaggaatgggcctcgtttgatgttgagctgaattatttttccagcataagcccaggtcttggtccatgaacaaaattactagaaacccagcccagtactacgatctaaaagagggactgccactggatagctctctctagcattctccacgctccaatacagcggcgtcgtgtctatccgggtctatccgcgaacacgtgagaactctccagaaactgctttctcctccacttcatctctctcgctttccctctataaaaagaccccttctaggaattgagggagacagcaagcaccaagcagcgatccgaagctcaatcaattcactcaaacctcttccccaaatcttcgattagatcttcgttgacaagaagactagaaccgaacctgacatgtccaacctgctcacggttcaccagaaccttccggctcttccagtggacgcgacgtccgatgaagtcaggaagaacctcatggacatgttccgcgacaggcaagcgttcagcgagcacacctggaagatgctgctctccgtctgccgctcctgggctgcatggtgcaagctgaacaacaggaagtggttccccgctgagcccgaggacgtgagggattaccttctgtacctgcaagcgcgaggtttgtttctgcttctacctttgatatatatataataattatcattaattagtagtaatataatatttcaaatatttttttcaaaataaaagaatgtagtatatagcaattgcttttctgtagtttataagtgtgtatattttaatttataacttttctaatatatgaccaaaacatggtgatgcctaggtctggcagtgaagaccatccagcaacaccttggacaactgaacatgcttcacaggcgctccggcctcccgcgccccagcgactcgaacgccgtgagcctcgtcatgcgccgcatcaggaaggaaaacgtcgatgccggcgaaagggcaaagcaggccctcgcgttcgagaggaccgatttcgaccaggtccgcagcctgatggagaacagcgacaggtgccaggacattaggaacctggcgttcctcggaattgcatacaacacgctcctcaggatcgcggaaattgcccgcattcgcgtgaaggacattagccgcaccgacggcggcaggatgcttatccacattggcaggaccaagacgctcgtttccaccgcaggcgtcgaaaaggccctcagcctcggagtgaccaagctcgtcgaacgctggatctccgtgtccggcgtcgcggacgacccaaacaactacctcttctgccgcgtccgcaagaacggggtggctgcccctagcgccaccagccaactcagcacgagggccttggaaggtattttcgaggccacccaccgcctgatctacggcgcgaaggatgacagcggtcaacgctacctcgcatggtccgggcactccgcccgcgttggagctgctagggacatggcccgcgccggtgtttccatccccgaaatcatgcaggcgggtggatggacgaacgtgaacattgtcatgaactacattcgcaaccttgacagcgagacgggcgcaatggttcgcctcctggaagatggtgactgaggtacccaacctagacttgtccatcttctggattggccaacttaattaatgtatgaaataaaaggatgcacacatagtgacatgctaatcactataatgtgggcatcaaagttgtgtgttatgtgtaattactagttatctgaataaaagagaaagagatcatccatatttcttatcctaaatgaatgtcacgtgtctttataattctttgatgaaccagatgcatttcattaaccaaatccatatacatataaatattaatcatatataattaatatcaattgggttagcaaaacaaatctagtctaggtgtgttttgcgatccgatatcgatcaccttgctagttggatattacctcttctcttcaaagtatccttgaacgctcaccggttatcaaatctctacactatagctctgtagtcttgctagatagttagttctttagctctcgggccctggccgaagcttcgtgcgcacgataacttcgtatagcatacattatacgaagttataacagcggaccgggttaccgaattcctgcccttaaggccaattgttcaagattcattcaacaattgaaacatctcccatgattaaatcagtataaggttgctatggtcttgcttgacaaagtttttttttgagggaatttcaactaaatttttgagtgaaactatcaaatactgattttaaaaaatttttataaaaggaagcgcagagataaaaggccatctatgctacaaaagtacccaaaaatgtaatcctaaagtatgaattgcattttttttttgtttggacgaaaggaaaggagtattaccacaagaatgatatcatcttcatatttagatcttttttgggtaaagcttgagattctctaaatatagagaaatcagaagaaaaaaaaaccgtgttttggtggttttgatttctagcctccacaataactttgacggcgtcgacaagtctaacggacaccaagcagcgaaccaccagcgccgagccaagcgaagcagacggccgagacgttgacaccttcggcgcggcatctctcgagagttccgctccggcgctccacctccaccgctggcggtttcttattccgttccgttccgcctcctgctctgctcctctccacaccacacggcacgaaaccgttacggcaccggcagcacccagcacgggagaggggattcctttcccaccgttccttccctttccgccccgccgctataaatagccagccccatccccagcttttttccccaatctcatctcctctctcctgttgttcggagcacacgcacaatccgatcgatccccaaatccccttcgtctctcctcgcgagcctcgtggatcccagcttcaaggtacggcgatcgatcatcccccctccttctctctaccttcttttctctagactacatcggatggcgatccatggttagggcctgctagtttcccttcctgttttgtcgatggctgcgaggcacaatagatctgatggcgttatgacggctaacttgtcatgttgttgcgatttatagtccctttaggagatcagtttaatttctcggatggttcgagatcggtggtccatggttagtaccctaagatccgcgctgttagggttcgtagatggaggcgacctgttctgattgttaacttgtcagtacctgggaaatcctgggatggttctagctcgtccgcagatgagatcgatttcatgatcctctgtatcttgtttcgttgcctaggttccgtctaatctatccgtggtatgatgtagatgttttgatcgtgctaactacgtcttgtaaagttaattgtcaggtcataatttttagcatgcctttttttttgtttggttttgtctaattgggctgtcgttctagatcagagtagaagactgttccaaactacctgctggatttattgaacttggatctgtatgtgtgtcacatatcttcataaattcatgattaagatggattgaaatatcttttatctttttggtatggatagttctatatgttggtgtggctttgttagatgtatacatgcttagatacatgaagcaacgtgctgctactgtttagtaattgctgttcatttgtctaataaacagataaggatatgtatttatgttgctgttggttttgctggtactttgttggatacaaatgcttcaatacagaaaacagcatgctgctacgatttaccatttatctaatcttatcatatgtctaatctaataaacaaacatgcttttaaattatcttcatatgcttggatgatggcatacacagcggctatgtgtggttttttaaatacccagcatcatgggcatgcatgacactgctttaatatgctttttatttgcttgagactgtttcttttgtttatactgaccctttagttcggtgactcttctgcaggtcgactttaacttagcctaggatccatggcccagtccaagcacggcctgaccaaggagatgaccatgaagtaccgcatggagggctgcgtggacggccacaagttcgtgatcaccggcgagggcatcggctaccccttcaagggcaagcaggccatcaacctgtgcgtggtggagggcggccccttgcccttcgccgaggacatcttgtccgccgccttcatgtacggcaaccgcgtgttcaccgagtacccccaggacatcgtcgactacttcaagaactcctgccccgccggctacacctgggaccgctccttcctgttcgaggacggcgccgtgtgcatctgcaacgccgacatcaccgtgagcgtggaggagaactgcatgtaccacgagtccaagttctacggcgtgaacttccccgccgacggccccgtgatgaagaagatgaccgacaactgggagccctcctgcgagaagatcatccccgtgcccaagcagggcatcttgaagggcgacgtgagcatgtacctgctgctgaaggacggtggccgcttgcgctgccagttcgacaccgtgtacaaggccaagtccgtgccccgcaagatgcccgactggcacttcatccagcacaagctgacccgcgaggaccgcagcgacgccaagaaccagaagtggcacctgaccgagcacgccatcgcctccggctccgccttgccctccggactcagatctcgatagggtaccaatggccagttaacagatccagctgctgctgttctagggttcacaagtctgcctatttgtcttccccaatggagctatggttgtctggtctggtccttggtcgtgtcccgtttcattgtgtactatttacctgtaatgtgtatccttaagtctggtttgatggtgtctgaaacgttttgctgtggtagagcagcatggaagaactataatgaataagtgatccctaatcattgtgtccaaattttgcttctgctatacccttttgtgctgtttcttatgttttgcttaaaaatttgatctgacaaacaaatttgtctaaattatgctcttgttctgactgtgtactgtacacatttgtattgctaccggtttggcacatagttttctctttgattgcagatcaaacccttctgattgcagattgcttggctatggctgatgtgctcactgttcttctttagcttgtatattgctgatggtggcttggctacggctgaaaaagttgctgctgcgccgacttggcaactgttgctccagtaatgctttgtcctctcttcctagccgccgacttggcacttggcagctgttgctcctgtaatgcgttgttatctcttatctcttgagatgtactatgattttgaggctgtttgacttgtgccagattgccagtgctgatgctatattatctcaggtttttatgctagtatatgttttactgtgtgctgcctgtgtcgagttacgtaatctattgaaccgctatgcgtgttgatgccctgttgttgcttgccagattgatgcccctgttgcttgcagcttgcaagctgtagtgaaatcctaaaattcgaaaccaaatctattctgaacttttgaagatctgtgatgtccggaagaaaagattcaaacagataaacgggactctccagaatctataaaataaatgatcgacaaacgctttgctttggtaggcttcctagttagttagcggaccgaagcttcggtccgggcctagaaggccagcttcggccgcccctcggtaccctgggatctgcccttactttaacgcctctaaccaacacccctttatctttataaggaacaataaacagaatttgccccactgttctaaatcacctaataatatccccagctaaaaacaataaaggtttcctagaattaagacaagcatgactgttcctccaggagggtttggaacattgttgcagtcttgcagatacgggcgaagggtgagaaacagagcggagggctggaggtgacctcggtagtcgacgccggagttgagcttgacaacgacggggcggcccctgatggacttgaggaagtccgatggcgtcttcaccgtcccgccggcgcccgaggcgggcctgtcgctgccgccgccgccgctgctcatcttgcgcgctgtgcccccggcggtgtccctgtgttgcggatcgcgggtgggccaggtggatgcgagggcgacccgtttggactccggccggagccgccggatccctggtcggtgtcagtgccgtttactctgggccccacgtgtcagtaccgtctgtagatgacaacaacccgtcgtccacagtcatgtccaaaatatcctttcttcttttttttcgattcggatatctatcttccttttttttttccaaaaatcttcttgacgcaccagcgcgcacgtttgtggtaaacgccgacacgtcggtcccacgtcgatagaccccacccaccagtgagtagcgtgtacgtattcgggggtgacggacgtgtcgccgtcgtcttgctagtcccattcccatctgagccacacatctctgaacaaaaaaaaggagggaggcctccacgcacatccccctccgtgccacccgccccaaaccctcgcgccgcctccgagacagccgccgcaaccatggccaccgccgccgccgcgtctaccgcgctcactggcgccactaccgctgcgcccaaggcgaggcgccgggcgcacctcctggccacccgccgcgccctcgccgcgcccatcaggtgctcagcggcgtcacccgccatgccgatggctcccccggccaccccgctccggccgtggggccccaccgagccccgcaagggtgctgacatcctcgtcgagtccctcgagcgctgcggcgtccgcgacgtcttcgcctaccccggcggcgcgtccatggagatccaccaggcactcacccgctcccccgtcatcgccaaccacctcttccgccacgagcaaggggaggcctttgccgcctccggctacgcgcgctcctcgggccgcgtcggcgtctgcatcgccacctccggccccggcgccaccaacctagtctccgcgctcgccgacgcgctgctcgattccgtccccatggtcgccatcacgggacaggtggcgcgacgcatgattggcaccgacgccttccaggagacgcccatcgtcgaggtcacccgctccatcaccaagcacaactacctggtcctcgacgtcgacgacatcccccgcgtcgtgcaggaggctttcttcctcgcctcctctggtcgaccagggccggtgcttgtcgacatccccaaggacatccagcagcagatggcggtgcctgtctgggacaagcccatgagtctgcctgggtacattgcgcgccttcccaagccccctgcgactgagttgcttgagcaggtgctgcgtcttgttggtgaatcgcggcgccctgttctttatgtgggcggtggctgcgcagcatctggtgaggagttgcgacgctttgtggagctgactggaatcccggtcacaactactcttatgggcctcggcaacttccccagcgacgacccactgtctctgcgcatgctaggtatgcatgggacggtgtatgcaaattatgcagtggataaggccgatctgttgcttgcacttggtgtgcggtttgatgatcgcgtgacagggaagattgaggcttttgcaagcagggctaagattgtgcacgttgatattgatccggctgagattggcaagaacaagcagccacatgtgtccatctgtgcagatgttaagcttgctttgcagggcatgaatgctcttcttgaaggaagcacatcaaagaagagctttgactttggctcatggaacgatgagttggatcagcagaagagggaattcccccttgggtataaaacatctaatgaggagatccagccacaatatgctattcaggttcttgatgagctgacgaaaggcgaggccatcatcggcacaggtgttgggcagcaccagatgtgggcggcacagtactacacttacaagcggccaaggcagtggttgtcttcagctggtcttggggctatgggatttggtttgccggctgctgctggtgcttctgtggcaaacccaggtgtcactgttgttgacatcgatggagatggtagctttctcatgaacgttcaggagctagctatgatccgaattgagaacctcccagtgaaggtctttgtgctaaacaaccagcacctggggatggtggtgcagttggaggacaggttctataaggccaacagagcgcacacatacttgggaaacccagagaatgaaagtgagatatatccagatttcgtgacgatcgccaaagggttcaacattccagccgtccgtgtgacaaagaagaacgaagtccgcgcagcgataaagaagatgctcgagactccagggccgtacctcttggatataatcgtcccacaccaggagcatgtgttgcctatgatccctagtggtggggctttcaaggatatgatcctggatggtgatggcaggactgtgtactgacttcgaataggtacccggggatcctctagtgccgtgggtcgtttaagctgccgctgtacctgtgtcgtctggtgccttctggtgtacctgggaggttgtcgtctatcaagtatctgtggttggtgtcatgagtcagtgagtcccaatactgttcgtgtcctgtgtgcattatacccaaaactgttatgggcaaatcatgaataagcttgatgttcgaacttaaaagtctctgctcaatatggtattatggttgtttttgttcgtctcctaatatttgcctgggatcaaattttattggctggtgttcatttgacctccatgttcttgctaggctccattttttactctacagccataatatgtttgattgtttggtttgttctttgttgtacacctggttctgtcgagcttagttttcgacactggcttacagcttaacatgttgctattttattgggttctgattgctattttattgggttctgattgctagtttttgctgaatccaaaaaccatgttatttatttaagcgatccaggttattattatgatggtggctaagtttttttttttccaagggtaaattttctggattctccagtgtttctgtggccgaattcaatcactagagtcgacctgcaaagcttcggtccgggcctagaaggcccgcgccacttacgcttgattccgatgacttcgtaggttcctagctcaagccgctcgtgtccaagcgtcacttacgattagctaatgattacggcatctaggaccgactagttcttatgtgcttctagtctccaaatgtggttgatagttattttgctctaagatcaacagtaatgaagtataaatcatcgttgtggtgtgctactcggttaattgagcattaacacacacaaacatgacgaggatggtataatctccaaaaatgtgtactttgttaggtgggaccctatagccttgattaatgtgctatgttaggcatgcctggaaacgtgtgacgcatatgttttgtgaacctgttgatattatatgtgcttttatattaccatattttattaaaatactaatatttattactagtaagatataacattctatctagcttaaaaactaaccataaatattccataataactagatttaccaaactaatatactaaatatacataataaatacaaaattaacaagacaataatcaatatttatgagcttaatatatttagacattatggttggtcgacgataatcatgctaacttttcgtaattgcttgattgaaatatgcttagaataatgcctctttgttctacatggcaaatagggaccattatggtgtaacaccctgggaaccacaaacaccccgaaatgctactaaactacacaactaaccttcatatataaaatttcgacagcatctcctttgaaaatttgcatagacgtggaagcaacagagtataaacagatctgcgtttaaacgtgcaagcgctactagacaattcagtacattaaaaacgtccgcaatgtgttattaagttgtctaagcgtcaatttgtttacaccacaatatatcctgcca

SEQ ID NO: 67 - DNA, 21827 bp, synthetic construct
  misc_feature 1..21827: note = PHP96277
  source 1..21827: mol_type = other DNA
gtttacccgccaatatatcctgtcaaacactgcggccgcacttgaccgcggatggagccggagctgtggtgaggccatcgacgggaggtgggggagaacacagtctcagtgttctttgtgagtccgcaaggtttttagcttttctgtattaattaaggttgctgttggctgtagaatacggtcgtggaagagctgtatcggtagctactacgtaagctattatatactggaagtctggagctcgtcgatctccggtcgtcttcctccatttctcctcgtcttgctttgactgctgctaccatttgcttctgttttctgatgaagcatgccatgtcggccaccagtgtttgtgtggtttttgcagggaatggctttcaagtgctgtgattgaatggccctcgtcgtcctcggctgagctcacatggacgcgtcatgtgagtgagatatatgatcatatgatgagtggggttcgggtgagtgcgtacttgaagtaggatcccgctttcactcattcattcattggcctttaaaccgggaaattttcgcgaggagatggagggaagcaagcagggtgacgagtgcagagtgccgcgagcgctttgtcaaaaggcaccgccgtaggcaaaaaaatcaatggccctgactgactcgatggtagtactactgtagagactagagagggttgctccccatatcttcgtgtgacttttactccagcattgcatttccgtcattgagacgttaattaatagcagctttcgggacagatgactgtggccatgtttcgtcacggccgcttcgtgccagctgggggtactatagtactgtgattttgttagtaaaaactttcattaggccaccattgacgaccgggccttcgcttttgctgcgctaattaaccatttcccggcgaccgaagggaacatgaacatgccccgacacatgagggcatgaggactagtgttctccctgtcgttcgttgacttgactagtgatagtttaaacgctcttcaactggaagagcggttactaccggttcactagctagctgctaatcgagctagttaccctatgaggtgacatgaagcgctcacggttactatgacggttagcttcacgactgttggtggcagtagcgtacgacttagctatagttccggacttacctagctaataacttcgtatagcatacattatacgaagttatggttaccgaattcgagctccggaccgaagcttgcatgcctgcagcccatccctcagccgcctttcactatcttttttgcccgagtcattgtcatgtgaaccttggcatgtataatcggtgaattgcgtcgattttcctcttataggtgggccaatgaatccgtgtgatcgcgtctgattggctagagatatgtttcttccttgttggatgtattttcatacataatcatatgcatacaaatatttcattacactttatagaaatggtcagtaataaaccctatcactatgtctggtgtttcattttatttgcttttaaacgaaaattgacttcctgattcaatatttaaggatcgtcaacggtgtgcagttactaaattctggtttgtaggaactatagtaaactattcaagtcttcacttattgtgcactcacctctcgccacatcaccacagatgttattcacgtcttaaatttgaactacacatcatattgacacaatattttttttaaataagcgattaaaacctagcctctatgtcaacaatggtgtacataaccagcgaagtttagggagtaaaaaacatcgccttacacaaagttcgctttaaaaaataaagagtaaattttactttggaccacccttcaaccaatgtttcactttagaacgagtaattttattattgtcactttggaccaccctcaaatcttttttccatctacatccaatttatcatgtcaaagaaatggtctacatacagctaaggagatttatcgacgaatagtagctagcatactcgaggtcattcatatgcttgagaagagagtcgggatagtccaaaataaaacaaaggtaagattacctggtcaaaagtgaaaacatcagttaaaaggtggtataaagtaaaatatcggtaataaaaggtggcccaaagtgaaatttactcttttctactattataaaaattgaggatgtttttgtcggtactttgatacgtcatttttgtatgaattggtttttaagtttattcgcttttggaaatgcatatctgtatttgagtcgggttttaagttcgtttgcttttgtaaatacagagggatttgtataagaaatatctttaaaaaaacccatatgctaatttgacataatttttgagaaaaatatatattcaggcgaattctcacaatgaacaataataagattaaaatagctttcccccgttgcagcgcatgggtattttttctagtaaaaataaaagataaacttagactcaaaacatttacaaaaacaacccctaaagttcctaaagcccaaagtgctatccacgatccatagcaagcccagcccaacccaacccaacccaacccaccccagtccagccaactggacaatagtctccacacccccccactatcaccgtgagttgtccgcacgcaccgcacgtctcgcagccaaaaaaaaaaaaagaaagaaaaaaaagaaaaagaaaaaacagcaggtgggtccgggtcgtgggggccggaaacgcgaggaggatcgcgagccagcgacgaggccggccctccctccgcttccaaagaaacgccccccatcgccactatatacatacccccccctctcctcccatccccccaaccctaccaccaccaccaccaccacctccacctcctcccccctcgctgccggacgacgagctcctcccccctccccctccgccgccgccgcgccggtaaccaccccgcccctctcctctttctttctccgttttttttttccgtcacggtctcgatctttggccttggtagtttgggtgggcgagaggcggcttcgtgcgcgcccagatcggtgcgcgggaggggcgggatctcgcggctggggctctcgccggcgtggatcaggcccggatctcgcggggaatggggctctcggatgtagatctgcgatccgccgttgttgggggagatgatggggggtttaaaatttccgccatgctaaacaagatcaggaagaggggaaaagggcactatggtttatatttttatatatttctgctgcttcgtcaggcttagatgtgctagatctttctttcttctttttgtgggtagaatttgaatccctcagcattgttcatcggtagtttttcttttcatgatttgtgacaaatgcagcctcgtgcggagcttttttgtaggtagaaggatccgcccatggcggccaatgcgggcggcggtggagcgggaggaggcagcggcagcggcagcgtggctgcgccggcggtgtgccgccccagcggctcgcggtggacgccgacgccggagcagatcaggatgctgaaggagctctactacggctgcggcatccggtcgcccagctcggagcagatccagcgcatcaccgccatgctgcggcagcacggcaagatcgagggcaagaacgtcttctactggttccagaaccacaaggcccgcgagcgccagaagcgccgcctcaccagcctcgacgtcaacgtgcccgccgccggcgcggccgacgccaccaccagccaactcggcgtcctctcgctgtcgtcgccgccgccttcaggcgcggcgcctccctcgcccaccctcggcttctacgccgccggcaatggcggcggatcggctgtgctgctggacacgagttccgactggggcagcagcggcgctgctatggccaccgagacatgcttcctgcaggactacatgggcgtgacggacacgggcagctcgtcgcagtggccacgcttctcgtcgtcggacacgataatggcggcggccgcggcgcgggcggcgacgacgcgggcgcccgagacgctccctctcttcccgacctgcggcgacgacggcggcagcggtagcagcagctacttgccgttctggggtgccgcgtccacaactgccggcgccacttcttccgttgcgatccaacagcaacaccagctgcaggagcagtacagcttttacagcaacagcaacagcacccagctggccggcaccggcaaccaagacgtatcggcaacagcagcagcagccgccgccctggagctgagcctcagctcatggtgctccccttaccctgctgcagggagtatgtgagagcaacgcgagctgccactgctcttcactgatgtctctggaatggaaggaggaggaagtgagaacagatcattcgacaaagcagcattagtccgttgatcggtggaagaccactcgtcagtgttgagttgaatgtttgatcaataaaatacggcaatgctgtaagggttgttttttatgccattgataatacactgtactgttcagttgttgaactctatttcttagccatgccaagtgcttttcttattttgaataacattacagcaaaaagttgaaagacaaaaaaaaaaacccccgaacagagtgctttgggtcccaagcttctttagactgtgttcggcgttccccctaaatttctccccctatatctcactcacttgtcacatcagcgttctctttccccctatatctccacgctctacagcagttccacctatatcaaacctctataccccaccacaacaatattatatactttcatcttcaactaactcatgtaccttccaatttttttctactaataattatttacgtgcacagaaacttagcaaggagagagagagcgggaatttaaatgctcggcgttaggcttttagtccgctaggtggctagaccgaggttaggacgctagttcactaggggcctagtggtgttttaagacgtcacggtcaccgcggccgcatcgagcagctggcttgtggggaccagacaaaaaaggaatggtgcagaattgttaggcgcacctaccaaaagcatctttgcctttattgcaaagataaagcagattcctctagtacaagtggggaacaaaataacgtggaaaagagctgtcctgacagcccactcactaatgcgtatgacgaacgcagtgacgaccacaaaactcgagcaacgagatcatgagccaatcaaagaggagtgatgtagacctaaagcaataatggagccatgacgtaagggcttacgcccatacgaaataattaaaggctgatgtgacctgtcggtctctcagaacctttactttttatgtttggcgtgtatttttaaatttccacggcaatgacgatgtgaccgtcgacccactaaaacattgctttgtcaaaagctaaaaaagatgatgcccgacagccacttgtgtgaagcatgagaagccggtccctccactaagaaaattagtgaagcatcttccagtggtccctccactcacagctcaatcagtgagcaacaggacgaaggaaatgacgtaagccatgacgtctaatcccattcgaaacgcgtggaccgaagcttgcatgcctgcagtgcagcgtgacccggtcgtgcccctctctagagataatgagcattgcatgtctaagttataaaaaattaccacatattttttttgtcacacttgtttgaagtgcagtttatctatctttatacatatatttaaactttactctacgaataatataatctatagtactacaataatatcagtgttttagagaatcatataaatgaacagttagacatggtctaaaggacaattgagtattttgacaacaggactctacagttttatctttttagtgtgcatgtgttctcctttttttttgcaaatagcttcacctatataatacttcatccattttattagtacatccatttagggtttagggttaatggtttttatagactaatttttttagtacatctattttattctattttagcctctaaattaagaaaactaaaactctattttagtttttttatttaataatttagatataaaatagaataaaataaagtgactaaaaattaaacaaataccctttaagaaattaaaaaaactaaggaaacatttttcttgtttcgagtagataatgccagcctgttaaacgccgtcgacgagtctaacggacaccaaccagcgaaccagcagcgtcgcgtcgggccaagcgaagcagacggcacggcatctctgtcgctgcctctggacccctctcgagagttccgctccaccgttggacttgctccgctgtcggcatccagaaattgcgtggcggagcggcagacgtgagccggcacggcaggcggcctcctcctcctctcacggcaccggcagctacgggggattcctttcccaccgctccttcgctttcccttcctcgcccgccgtaataaatagacaccccctccacaccctctttccccaacctcgtgttgttcggagcgcacacacacacaaccagatctcccccaaatccacccgtcggcacctccgcttcaaggtacgccgctcgtcctcccccccccccctctctaccttctctagatcggcgttccggtccatgcatggttagggcccggtagttctacttctgttcatgtttgtgttagatccgtgtttgtgttagatccgtgctgctagcgttcgtacacggatgcgacctgtacgtcagacacgttctgattgctaacttgccagtgtttctctttggggaatcctgggatggctctagccgttccgcagacgggatcgatttcatgattttttttgtttcgttgcatagggtttggtttgcccttttcctttatttcaatatatgccgtgcacttgtttgtcgggtcatcttttcatgcttttttttgtcttggttgtgatgatgtggtctggttgggcggtcgttctagatcggagtagaattctgtttcaaactacctggtggatttattaattttggatctgtatgtgtgtgccatacatattcatagttacgaattgaagatgatggatggaaatatcgatctaggataggtatacatgttgatgcgggttttactgatgcatatacagagatgctttttgttcgcttggttgtgatgatgtggtgtggttgggcggtcgttcattcgttctagatcggagtagaatactgtttcaaactacctggtgtatttattaattttggaactgtatgtgtgtgtcatacatcttcatagttacgagtttaagatggatggaaatatcgatctaggataggtatacatgttgatgtgggttttactgatgcatatacatgatggcatatgcagcatctattcatatgctctaaccttgagtacctatctattataataaacaagtatgttttataattattttgatcttgatatacttggatgatggcatatgcagcagctatatgtggatttttttagccctgccttcatacgctatttatttgcttggtactgtttcttttgtcgatgctcaccctgttgtttggtgttacttctgcaggtcgactttaacttagcctaggatccatggccactgtgaacaactggctcgctttctccctctccccgcaggagctgccgccctcccagacgacggactccacactcatctcggccgccaccgccgaccatgtctccggcgatgtctgcttcaacatcccccaagattggagcatgaggggatcagagctttcggcgctcgtcgcggagccgaagctggaggacttcctcggcggcatctccttctccgagcagcatcacaaggccaactgcaacatgatacccagcactagcagcacagtttgctacgcgagctcaggtgctagcaccggctaccatcaccagctgtaccaccagcccaccagctcagcgctccacttcgcggactccgtaatggtggcttcctcggccggtgtccacgacggcggtgccatgctcagcgcggccgccgctaacggtgtcgctggcgctgccagtgccaacggcggcggcatcgggctgtccatgattaagaactggctgcggagccaaccggcgcccatgcagccgagggtggcggcggctgagggcgcgcaggggctctctttgtccatgaacatggcggggacgacccaaggcgctgctggcatgccacttctcgctggagagcgcgcacgggcgcccgagagtgtatcgacgtcagcacagggtggagccgtcgtcgtcacggcgccgaaggaggatagcggtggcagcggtgttgccggcgctctagtagccgtgagcacggacacgggtggcagcggcggcgcgtcggctgacaacacggcaaggaagacggtggacacgttcgggcagcgcacgtcgatttaccgtggcgtgacaaggcatagatggactgggagatatgaggcacatctttgggataacagttgcagaagggaagggcaaactcgtaagggtcgtcaagtctatttaggtggctatgataaagaggagaaagctgctagggcttatgatcttgctgctctgaagtactggggtgccacaacaacaacaaattttccagtgagtaactacgaaaaggagctcgaggacatgaagcacatgacaaggcaggagtttgtagcgtctctgagaaggaagagcagtggtttctccagaggtgcatccatttacaggggagtgactaggcatcaccaacatggaagatggcaagcacggattggacgagttgcagggaacaaggatctttacttgggcaccttcagcacccaggaggaggcagcggaggcgtacgacatcgcggcgatcaagttccgcggcctcaacgccgtcaccaacttcgacatgagccgctacgacgtgaagagcatcctggacagcagcgccctccccatcggcagcgccgccaagcgcctcaaggaggccgaggccgcagcgtccgcgcagcaccaccacgccggcgtggtgagctacgacgtcggccgcatcgcctcgcagctcggcgacggcggagccctggcggcggcgtacggcgcgcactaccacggcgccgcctggccgaccatcgcgttccagccgggcgccgccagcacaggcctgtaccacccgtacgcgcagcagccaatgcgcggcggcgggtggtgcaagcaggagcaggaccacgcggtgatcgcggccgcgcacagcctgcaggacctccaccacctgaacctgggcgcggccggcgcgcacgactttttctcggcagggcagcaggccgccgccgctgcgatgcacggcctgggtagcatcgacagtgcgtcgctcgagcacagcaccggctccaactccgtcgtctacaacggcggggtcggcgacagcaacggcgccagcgccgtcggcggcagtggcggtggctacatgatgccgatgagcgctgccggagcaaccactacatcggcaatggtgagccacgagcaggtgcatgcacgggcctacgacgaagccaagcaggctgctcagatggggtacgagagctacctggtgaacgcggagaacaatggtggcggaaggatgtctgcatgggggactgtcgtgtctgcagccgcggcggcagcagcaagcagcaacgacaacatggccgccgacgtcgggcatggcggcgcgcagctcttcagtgtctggaacgacacttaagcgtacctagtggtacctgacatcttatagtctgcaacctctcgtgtctgaattcctatctttatcaagtgttattgcttccacgactataggacagctttcgtcgaaagcttttgctcatgtgatctcgaaggattcatctagtctgatttttcgtgacttgtatcggttttattggattcatccaacatatatcaataaaaaatgagttgtgtttcctttcttcctagttcagttaaaattatttccctcctgcgcttgtgctgtaattgtctgtgtacctgttgtttgtgactgtgttagttcccttggatatgatttcgtatttgatatgtacatggagatagcttagcttcattattggagtatgaagttagtatgacatagtcactctcctggaaaattgacactgcaaaccatatttttattctgaaccacaaatcctagtcagtccgctggcatatgccgtccgtttgctgaatccagaacgtgggtttggagatgtacggctgagatgcctctatgcgaaggggatttcgtggtgaaacgagatgggagtagagcaacgcccgtggaagatgcttcaaacttccacacttttgagcaacgatcggcagtagtaaggtagacgatttcaagatcaaagcatatgaagataaacaacatcaacaacaaaatttgttggggttctatagagagaaacagagctacatacatacactgttttgtatctaccatctgagatgatgaaaagatgaaaaactaaagaatgccccggcgccaacgccaggacacgccgcgcgcgcgtcacccgagccatctcttgacccagccggcgctgtatatttacacacgttgcagcatcgatcaccacctgttcgatcgcgtcgccgtcaccggcgcgccgcgacttattgaactagtctagggcgcggctaacaacctagcttagattgccttgtctaaacccttaggctaacgcgccactctagacaccttgctagttggatattacctcttctcttcaaagtatccttgaacgctcaccggttatcaaatctctacactatagctctgtagtcttgctagatagttagttctttagctctcgaattcgagctcggtaccctggttcacaaactcaatacaacacacagtggagtagggtattacgctccggcggcccgaaccactctaaatccttgtgtcctcgtgtgctcttccaccattaatgactgtaattgcagggacacgaagagttgtagcgcttttgccaacaagatccgctatatgctagtagagtggaacctgcacagcaacaagcatccaataatctgagaataagaattatgtgtggtgatggttctcatctctgcaactcgccattttcgcgagagaaccaaatccaagttggtgaagatcatgatttgggctcatgggctggcatagtagctattacctttgcaattgtggttcgaatctatccgatattctccttttcagggagagctaatgcttatgcttattgggtattttggtttgacactgcttcacgcccaaaaaaaggcaactatgtctgagttggatatggcccaaaaaaaggcagctatgtctgagttggatatggaagtcttctttcgtttagggtgaagtaagaccaagctcatgagcttattatcttaggtcggaacaaattagttgataggcatggcacatttatcaaattataatgattttaacagaaaagcaacacctctttttcagcagcaccagctttgcaagctgcaattgacactccaagcatagtatttgctccaaactcagcctgcatttcgcacaatatcatatctatttccatttggataaaatatattttccagaaatatgggaacagaatcaagatacagaaaaaagttgtggtagtagtggtaagtggaaacacaagtacagtgaaaagatagcattatttctgaacagtcaaattaaccgaaataagtagtatcacatactgcccctaaattgactacacccaatgtaaagaattgcttgagcatattgagccatcagttgtttgtttgtgtaacggatttgacaatgcagagttcaggagcaaaaaaccgcaaaggagagaaagagggaaaggatctcctagtatcccaccttgtggcgcgccctgtcaagtgcatgatggcctggtcgatctgcgtctgctgctgcggttccatcccaacgagtgcctccgacaccttgtcgttgatcacccgcaccgcgtaggcgacccccctggcgaggaacttccgcctctcggaggccccggccgcgtcggcggcggcgccctcgagcgcgcccacgctagccgtagatgctcggtgcacggccttgttggtgtgcaactcgacctcaacggccggtgcgctacgcccgtcaaggatctggcgcgcccgcaccctcgtgatcacggtgggcgcctcccgcctcatgtggccgacgatgaaaagcgccgggttaggggccttggcgcgcaccgccgtattcagggcctcctcgctcttgcgcgagagcaggtgcttccccaggtactcctgcactgacaaggctgccacagcggtggaatttgtcctcacgacttcgccacgtcgtcctcacctccctggcttcccacgactccgccgtatcgaggtgctcggtgggtcgtcttaatccgaagtccgaactaggaagacgagacagagaggtctgaggaatgggcctcgtttgatgttgagctgaattatttttccagcataagcccaggtcttggtccatgaacaaaattactagaaacccagcccagtactacgatctaaaagagggactgccactggatagctctctctagcattctccacgctccaatacagcggcgtcgtgtctatccgggtctatccgcgaacacgtgagaactctccagaaactgctttctcctccacttcatctctctcgctttccctctataaaaagaccccttctaggaattgagggagacagcaagcaccaagcagcgatccgaagctcaatcaattcactcaaacctcttccccaaatcttcgattagatcttcgttgacaagaagactagaaccgaacctgacatgtccaacctgctcacggttcaccagaaccttccggctcttccagtggacgcgacgtccgatgaagtcaggaagaacctcatggacatgttccgcgacaggcaagcgttcagcgagcacacctggaagatgctgctctccgtctgccgctcctgggctgcatggtgcaagctgaacaacaggaagtggttccccgctgagcccgaggacgtgagggattaccttctgtacctgcaagcgcgaggtttgtttctgcttctacctttgatatatatataataattatcattaattagtagtaatataatatttcaaatatttttttcaaaataaaagaatgtagtatatagcaattgcttttctgtagtttataagtgtgtatattttaatttataacttttctaatatatgaccaaaacatggtgatgcctaggtctggcagtgaagaccatccagcaacaccttggacaactgaacatgcttcacaggcgctccggcctcccgcgccccagcgactcgaacgccgtgagcctcgtcatgcgccgcatcaggaaggaaaacgtcgatgccggcgaaagggcaaagcaggccctcgcgttcgagaggaccgatttcgaccaggtccgcagcctgatggagaacagcgacaggtgccaggacattaggaacctggcgttcctcggaattgcatacaacacgctcctcaggatcgcggaaattgcccgcattcgcgtgaaggacattagccgcaccgacggcggcaggatgcttatccacattggcaggaccaagacgctcgtttccaccgcaggcgtcgaaaaggccctcagcctcggagtgaccaagctcgtcgaacgctggatctccgtgtccggcgtcgcggacgacccaaacaactacctcttctgccgcgtccgcaagaacggggtggctgcccctagcgccaccagccaactcagcacgagggccttggaaggtattttcgaggccacccaccgcctgatctacggcgcgaaggatgacagcggtcaacgctacctcgcatggtccgggcactccgcccgcgttggagctgctagggacatggcccgcgccggtgtttccatccccgaaatcatgcaggcgggtggatggacgaacgtgaacattgtcatgaactacattcgcaaccttgacagcgagacgggcgcaatggttcgcctcctggaagatggtgactgaggtacccaacctagacttgtccatcttctggattggccaacttaattaatgtatgaaataaaaggatgcacacatagtgacatgctaatcactataatgtgggcatcaaagttgtgtgttatgtgtaattactagttatctgaataaaagagaaagagatcatccatatttcttatcctaaatgaatgtcacgtgtctttataattctttgatgaaccagatgcatttcattaaccaaatccatatacatataaatattaatcatatataattaatatcaattgggttagcaaaacaaatctagtctaggtgtgttttgcgatccgatatcaggcctgacgtctaaaaacggcccctaactaacgcttagttgcccgctagattagtcccccgttagtgcctagttagacacacgacgaactaggggctagccaccttgctagttggatattacctcttctcttcaaagtatccttgaacgctcaccggttatcaaatctctacactatagctctgtagtcttgctagatagttagttctttagctctcgtgcgcacgataacttcgtatagcatacattatacgaagttataacagcggaccgggttaccgaattcctgcccttaaggccaattgttcaagattcattcaacaattgaaacatctcccatgattaaatcagtataaggttgctatggtcttgcttgacaaagtttttttttgagggaatttcaactaaatttttgagtgaaactatcaaatactgattttaaaaaatttttataaaaggaagcgcagagataaaaggccatctatgctacaaaagtacccaaaaatgtaatcctaaagtatgaattgcattttttttttgtttggacgaaaggaaaggagtattaccacaagaatgatatcatcttcatatttagatcttttttgggtaaagcttgagattctctaaatatagagaaatcagaagaaaaaaaaaccgtgttttggtggttttgatttctagcctccacaataactttgacggcgtcgacaagtctaacggacaccaagcagcgaaccaccagcgccgagccaagcgaagcagacggccgagacgttgacaccttcggcgcggcatctctcgagagttccgctccggcgctccacctccaccgctggcggtttcttattccgttccgttccgcctcctgctctgctcctctccacaccacacggcacgaaaccgttacggcaccggcagcacccagcacgggagaggggattcctttcccaccgttccttccctttccgccccgccgctataaatagccagccccatccccagcttttttccccaatctcatctcctctctcctgttgttcggagcacacgcacaatccgatcgatccccaaatccccttcgtctctcctcgcgagcctcgtggatcccagcttcaaggtacggcgatcgatcatcccccctccttctctctaccttcttttctctagactacatcggatggcgatccatggttagggcctgctagtttcccttcctgttttgtcgatggctgcgaggcacaatagatctgatggcgttatgacggctaacttgtcatgttgttgcgatttatagtccctttaggagatcagtttaatttctcggatggttcgagatcggtggtccatggttagtaccctaagatccgcgctgttagggttcgtagatggaggcgacctgttctgattgttaacttgtcagtacctgggaaatcctgggatggttctagctcgtccgcagatgagatcgatttcatgatcctctgtatcttgtttcgttgcctaggttccgtctaatctatccgtggtatgatgtagatgttttgatcgtgctaactacgtcttgtaaagttaattgtcaggtcataatttttagcatgcctttttttttgtttggttttgtctaattgggctgtcgttctagatcagagtagaagactgttccaaactacctgctggatttattgaacttggatctgtatgtgtgtcacatatcttcataaattcatgattaagatggattgaaatatcttttatctttttggtatggatagttctatatgttggtgtggctttgttagatgtatacatgcttagatacatgaagcaacgtgctgctactgtttagtaattgctgttcatttgtctaataaacagataaggatatgtatttatgttgctgttggttttgctggtactttgttggatacaaatgcttcaatacagaaaacagcatgctgctacgatttaccatttatctaatcttatcatatgtctaatctaataaacaaacatgcttttaaattatcttcatatgcttggatgatggcatacacagcggctatgtgtggttttttaaatacccagcatcatgggcatgcatgacactgctttaatatgctttttatttgcttgagactgtttcttttgtttatactgaccctttagttcggtgactcttctgcaggtcgactttaacttagcctaggatccatggcccagtccaagcacggcctgaccaaggagatgaccatgaagtaccgcatggagggctgcgtggacggccacaagttcgtgatcaccggcgagggcatcggctaccccttcaagggcaagcaggccatcaacctgtgcgtggtggagggcggccccttgcccttcgccgaggacatcttgtccgccgccttcatgtacggcaaccgcgtgttcaccgagtacccccaggacatcgtcgactacttcaagaactcctgccccgccggctacacctgggaccgctccttcctgttcgaggacggcgccgtgtgcatctgcaacgccgacatcaccgtgagcgtggaggagaactgcatgtaccacgagtccaagttctacggcgtgaacttccccgccgacggccccgtgatgaagaagatgaccgacaactgggagccctcctgcgagaagatcatccccgtgcccaagcagggcatcttgaagggcgacgtgagcatgtacctgctgctgaaggacggtggccgcttgcgctgccagttcgacaccgtgtacaaggccaagtccgtgccccgcaagatgcccgactggcacttcatccagcacaagctgacccgcgaggaccgcagcgacgccaagaaccagaagtggcacctgaccgagcacgccatcgcctccggctccgccttgccctccggactcagatctcgatagggtaccaatggccagttaacagatccagctgctgctgttctagggttcacaagtctgcctatttgtcttccccaatggagctatggttgtctggtctggtccttggtcgtgtcccgtttcattgtgtactatttacctgtaatgtgtatccttaagtctggtttgatggtgtctgaaacgttttgctgtggtagagcagcatggaagaactataatgaataagtgatccctaatcattgtgtccaaattttgcttctgctatacccttttgtgctgtttcttatgttttgcttaaaaatttgatctgacaaacaaatttgtctaaattatgctcttgttctgactgtgtactgtacacatttgtattgctaccggtttggcacatagttttctctttgattgcagatcaaacccttctgattgcagattgcttggctatggctgatgtgctcactgttcttctttagcttgtatattgctgatggtggcttggctacggctgaaaaagttgctgctgcgccgacttggcaactgttgctccagtaatgctttgtcctctcttcctagccgccgacttggcacttggcagctgttgctcctgtaatgcgttgttatctcttatctcttgagatgtactatgattttgaggctgtttgacttgtgccagattgccagtgctgatgctatattatctcaggtttttatgctagtatatgttttactgtgtgctgcctgtgtcgagttacgtaatctattgaaccgctatgcgtgttgatgccctgttgttgcttgccagattgatgcccctgttgcttgcagcttgcaagctgtagtgaaatcctaaaattcgaaaccaaatctattctgaacttttgaagatctgtgatgtccggaagaaaagattcaaacagataaacgggactctccagaatctataaaataaatgatcgacaaacgctttgctttggtaggcttcctagttagttagcggaccgggatccgacggcgtcttcaccgccccgccgccgcccgagccggacttgtcgctgccgccgccgctgctcatcttgcgcgcttgtgtccctccctcagtccctgcgttcgcggatcgcgggcgggtgcgacccgtttggactccggccggtagccttcgtgccgacctcgctcggtccaccggtttgtcggggacccacatgtcagtgaaggtacgcgtccacgtccacagaccctactaccccagacgagtccaaatcgctgttccctcacactctcgtgtaccagcgcgcggcggaaagcacctttccaacaaccgccgacacgtcggtcccacgtcggcatgctccaccggtcagtgtttggcgtgtacggctcccggcgacgaacgagtgtggcctaagctttcctactcccatcccatctgagccacacatctctctcacgccacgcgcacaaaacagccaggctcccacgcgcatcaaccggctctccctttccgtgccactcgcccccaagccccaaaccctcgccgccgcctccgagacagccgccgccacctaggccatggccaccgccgccgccgcgtctaccgcgctcactggcgccactaccgctgcgcccaaggcgaggcgccgggcgcacctcctggccacccgccgcgccctcgccgcgcccatcaggtgctcagcggcgtcacccgccatgccgatggctcccccggccaccccgctccggccgtggggccccaccgagccccgcaagggtgctgacatcctcgtcgagtccctcgagcgctgcggcgtccgcgacgtcttcgcctaccccggcggcgcgtcgatggagatccaccaggcactcacccgctcccccgtcatcgccaaccacctcttccgccacgagcaaggggaggcctttgccgcctccggctacgcgcgctcctcgggccgcgtcggcgtctgcatcgccacctccggccccggcgccaccaacctagtctccgcgctcgccgacgcgctgctcgattccgtcccgatggtcgccatcacgggacaggtggcgcgacgcatgattggcaccgacgccttccaggagacgcccatcgtcgaggtcacgcgctccatcaccaagcacaactacctggtcctcgacgtcgacgacatcccccgcgtcgtgcaggaggctttcttcctcgcctcctctggtcgaccagggccggtgcttgtcgacatccccaaggacatccagcagcagatggcggtgcctgtctgggacaagcccatgagtctgcctgggtacattgcgcgccttcccaagccccctgcgactgagttgcttgagcaggtgctgcgtcttgttggtgaatcgcggcgccctgttctttatgtgggcggtggctgcgcagcatctggtgaggagttgcgacgctttgtggagctgactggaatcccggtcacaactactcttatgggcctcggcaacttccccagcgacgacccactgtctctgcgcatgctaggtatgcatgggacggtgtatgcaaattatgcagtggataaggccgatctgttgcttgcacttggtgtgcggtttgatgatcgcgtgacagggaagattgaggcttttgcaagcagggctaagattgtgcacgttgatattgatccggctgagattggcaagaacaagcagccacatgtgtccatctgtgcagatgttaagcttgctttgcagggcatgaatgctcttcttgaaggaagcacatcaaagaagagctttgactttggctcatggaacgatgagttggatcagcagaagagggaattcccccttgggtataaaacatctaatgaggagatccagccacaatatgctattcaggttcttgatgagctgacgaaaggcgaggccatcatcggcacaggtgttgggcagcaccagatgtgggcggcacagtactacacttacaagcggccaaggcagtggttgtcttcagctggtcttggggctatgggatttggtttgccggctgctgctggtgcttctgtggcaaacccaggtgtcactgttgttgacatcgatggagatggtagctttctcatgaacgttcaggagctagctatgatccgaattgagaacctcccagtgaaggtctttgtgctaaacaaccagcacctggggatggtggtgcagttggaggacaggttctataaggccaacagagcgcacacatacttgggaaacccagagaatgaaagtgagatatatccagatttcgtgacgatcgccaaagggttcaacattccagccgtccgtgtgacaaagaagaacgaagtccgcgcagcgataaagaagatgctcgagactccagggccgtacctcttggatataatcgtcccacaccaggagcatgtgttgcctatgatccctagtggtggggctttcaaggatatgatcctggatggtgatggcaggactgtgtactgacttcgaataggtacccggggatcctctagtgccgtgggtcgtttaagctgccgctgtacctgtgtcgtctggtgccttctggtgtacctgggaggttgtcgtctatcaagtatctgtggttggtgtcatgagtcagtgagtcccaatactgttcgtgtcctgtgtgcattatacccaaaactgttatgggcaaatcatgaataagcttgatgttcgaacttaaaagtctctgctcaatatggtattatggttgtttttgttcgtctcctaatatttgcctgggatcaaattttattggctggtgttcatttgacctccatgttcttgctaggctccattttttactctacagccataatatgtttgattgtttggtttgttctttgttgtacacctggttctgtcgagcttagttttcgacactggcttacagcttaacatgttgctattttattgggttctgattgctattttattgggttctgattgctagtttttgctgaatccaaaaaccatgttatttatttaagcgatccaggttattattatgatggtggctaagtttttttttttccaagggtaaattttctggattctccagtgtttctgtggccgaattcaatcactagagtcgacctgcaaagcttcggtccgggcctagaaggcccgcgccacttacgcttgattccgatgacttcgtaggttcctagctcaagccgctcgtgtccaagcgtcacttacgattagctaatgattacggcatctaggaccgactagctagctagctaagagctcggtaccgagctcgaattcattccgattaatcgtggcctcttgctcttcaggatgaagagctatgtttaaacgtgcaagcgctactagacaattcagtacattaaaaacgtccgcaatgtgttattaagttgtctaagcgtcaatttgtttacaccacaatatatcctgcca

SEQ ID NO: 68 - DNA, 21263 bp, synthetic construct
  misc_feature 1..21263: note = PHP96425
  source 1..21263: mol_type = other DNA
gtttacccgccaatatatcctgtcaaacactgcggccgcacttgaccgcggatggagccggagctgtggtgaggccatcgacgggaggtgggggagaacacagtctcagtgttctttgtgagtccgcaaggtttttagcttttctgtattaattaaggttgctgttggctgtagaatacggtcgtggaagagctgtatcggtagctactacgtaagctattatatactggaagtctggagctcgtcgatctccggtcgtcttcctccatttctcctcgtcttgctttgactgctgctaccatttgcttctgttttctgatgaagcatgccatgtcggccaccagtgtttgtgtggtttttgcagggaatggctttcaagtgctgtgattgaatggccctcgtcgtcctcggctgagctcacatggacgcgtcatgtgagtgagatatatgatcatatgatgagtggggttcgggtgagtgcgtacttgaagtaggatcccgctttcactcattcattcattggcctttaaaccgggaaattttcgcgaggagatggagggaagcaagcagggtgacgagtgcagagtgccgcgagcgctttgtcaaaaggcaccgccgtaggcaaaaaaatcaatggccctgactgactcgatggtagtactactgtagagactagagagggttgctccccatatcttcgtgtgacttttactccagcattgcatttccgtcattgagacgttaattaatagcagctttcgggacagatgactgtggccatgtttcgtcacggccgcttcgtgccagctgggggtactatagtactgtgattttgttagtaaaaactttcattaggccaccattgacgaccgggccttcgcttttgctgcgctaattaaccatttcccggcgaccgaagggaacatgaacatgccccgacacatgagggcatgaggactagtgttctccctgtcgttcgttgacttgactagtgatagtttaaacgctcttcaactggaagagcggttactaccggttcactagctagctgctaatcgagctagttaccctatgaggtgacatgaagcgctcacggttactatgacggttagcttcacgactgttggtggcagtagcgtacgacttagctatagttccggacttacctagctaataacttcgtatagcatacattatacgaagttatggttaccgccctggccgaagctttccggacttacccttaagcgatttaaatcctgaggcctgcaacactgatagtttaaactgaaggcgggaaacgacaatctgatcatgagcggagaattaagggagtcacgttatgacccccgccgatgacgcgggacaagccgttttacgtttggaactgacagaaccgcaacgattgaaggagccactcagccgcgggtttctggagtttaatgagctaagcacatacgtcagaaaccattattgcgcgttcaaaagtcgcctaaggtcactatcagctagcaaatatttcttgtcaaaaatgctccactgacgttccataaattcccctcggtatccaattagagtctcatattcactcccatggcggccaatgcgggcggcggtggagcgggaggaggcagcggcagcggcagcgtggctgcgccggcggtgtgccgccccagcggctcgcggtggacgccgacgccggagcagatcaggatgctgaaggagctctactacggctgcggcatccggtcgcccagctcggagcagatccagcgcatcaccgccatgctgcggcagcacggcaagatcgagggcaagaacgtcttctactggttccagaaccacaaggcccgcgagcgccagaagcgccgcctcaccagcctcgacgtcaacgtgcccgccgccggcgcggccgacgccaccaccagccaactcggcgtcctctcgctgtcgtcgccgccgccttcaggcgcggcgcctccctcgcccaccctcggcttctacgccgccggcaatggcggcggatcggctgtgctgctggacacgagttccgactggggcagcagcggcgctgctatggccaccgagacatgcttcctgcaggactacatgggcgtgacggacacgggcagctcgtcgcagtggccacgcttctcgtcgtcggacacgataatggcggcggccgcggcgcgggcggcgacgacgcgggcgcccgagacgctccctctcttcccgacctgcggcgacgacggcggcagcggtagcagcagctacttgccgttctggggtgccgcgtccacaactgccggcgccacttcttccgttgcgatccaacagcaacaccagctgcaggagcagtacagcttttacagcaacagcaacagcacccagctggccggcaccggcaaccaagacgtatcggcaacagcagcagcagccgccgccctggagctgagcctcagctcatggtgctccccttaccctgctgcagggagtatgtgagagcaacgcgagctgccactgctcttcactgatgtctctggaatggaaggaggaggaagtgagaacagatcattcgacaaagcagcattagtccgttgatcggtggaagaccactcgtcagtgttgagttgaatgtttgatcaataaaatacggcaatgctgtaagggttgttttttatgccattgataatacactgtactgttcagttgttgaactctatttcttagccatgccaagtgcttttcttattttgaataacattacagcaaaaagttgaaagacaaaaaaaaaaacccccgaacagagtgctttgggtcccaagcttctttagactgtgttcggcgttccccctaaatttctccccctatatctcactcacttgtcacatcagcgttctctttccccctatatctccacgctctacagcagttccacctatatcaaacctctataccccaccacaacaatattatatactttcatcttcaactaactcatgtaccttccaatttttttctactaataattatttacgtgcacagaaacttagcaaggagagagagagcgggaatttaaatgctcggcgttaggcttttagtccgctaggtggctagaccgaggttaggacgctagttcactaggggcctagtggtgttttaagacgtcacggtcaccgcggccgcatcgagcagctggcttgtggggaccagacaaaaaaggaatggtgcagaattgttaggcgcacctaccaaaagcatctttgcctttattgcaaagataaagcagattcctctagtacaagtggggaacaaaataacgtggaaaagagctgtcctgacagcccactcactaatgcgtatgacgaacgcagtgacgaccacaaaactcgagcaacgagatcatgagccaatcaaagaggagtgatgtagacctaaagcaataatggagccatgacgtaagggcttacgcccatacgaaataattaaaggctgatgtgacctgtcggtctctcagaacctttactttttatgtttggcgtgtatttttaaatttccacggcaatgacgatgtgaccgtcgacccactaaaacattgctttgtcaaaagctaaaaaagatgatgcccgacagccacttgtgtgaagcatgagaagccggtccctccactaagaaaattagtgaagcatcttccagtggtccctccactcacagctcaatcagtgagcaacaggacgaaggaaatgacgtaagccatgacgtctaatcccattcgaaacgcgtggaccgaagcttgcatgcctgcagtgcagcgtgacccggtcgtgcccctctctagagataatgagcattgcatgtctaagttataaaaaattaccacatattttttttgtcacacttgtttgaagtgcagtttatctatctttatacatatatttaaactttactctacgaataatataatctatagtactacaataatatcagtgttttagagaatcatataaatgaacagttagacatggtctaaaggacaattgagtattttgacaacaggactctacagttttatctttttagtgtgcatgtgttctcctttttttttgcaaatagcttcacctatataatacttcatccattttattagtacatccatttagggtttagggttaatggtttttatagactaatttttttagtacatctattttattctattttagcctctaaattaagaaaactaaaactctattttagtttttttatttaataatttagatataaaatagaataaaataaagtgactaaaaattaaacaaataccctttaagaaattaaaaaaactaaggaaacatttttcttgtttcgagtagataatgccagcctgttaaacgccgtcgacgagtctaacggacaccaaccagcgaaccagcagcgtcgcgtcgggccaagcgaagcagacggcacggcatctctgtcgctgcctctggacccctctcgagagttccgctccaccgttggacttgctccgctgtcggcatccagaaattgcgtggcggagcggcagacgtgagccggcacggcaggcggcctcctcctcctctcacggcaccggcagctacgggggattcctttcccaccgctccttcgctttcccttcctcgcccgccgtaataaatagacaccccctccacaccctctttccccaacctcgtgttgttcggagcgcacacacacacaaccagatctcccccaaatccacccgtcggcacctccgcttcaaggtacgccgctcgtcctcccccccccccctctctaccttctctagatcggcgttccggtccatgcatggttagggcccggtagttctacttctgttcatgtttgtgttagatccgtgtttgtgttagatccgtgctgctagcgttcgtacacggatgcgacctgtacgtcagacacgttctgattgctaacttgccagtgtttctctttggggaatcctgggatggctctagccgttccgcagacgggatcgatttcatgattttttttgtttcgttgcatagggtttggtttgcccttttcctttatttcaatatatgccgtgcacttgtttgtcgggtcatcttttcatgcttttttttgtcttggttgtgatgatgtggtctggttgggcggtcgttctagatcggagtagaattctgtttcaaactacctggtggatttattaattttggatctgtatgtgtgtgccatacatattcatagttacgaattgaagatgatggatggaaatatcgatctaggataggtatacatgttgatgcgggttttactgatgcatatacagagatgctttttgttcgcttggttgtgatgatgtggtgtggttgggcggtcgttcattcgttctagatcggagtagaatactgtttcaaactacctggtgtatttattaattttggaactgtatgtgtgtgtcatacatcttcatagttacgagtttaagatggatggaaatatcgatctaggataggtatacatgttgatgtgggttttactgatgcatatacatgatggcatatgcagcatctattcatatgctctaaccttgagtacctatctattataataaacaagtatgttttataattattttgatcttgatatacttggatgatggcatatgcagcagctatatgtggatttttttagccctgccttcatacgctatttatttgcttggtactgtttcttttgtcgatgctcaccctgttgtttggtgttacttctgcaggtcgactttaacttagcctaggatccatggccactgtgaacaactggctcgctttctccctctccccgcaggagctgccgccctcccagacgacggactccacactcatctcggccgccaccgccgaccatgtctccggcgatgtctgcttcaacatcccccaagattggagcatgaggggatcagagctttcggcgctcgtcgcggagccgaagctggaggacttcctcggcggcatctccttctccgagcagcatcacaaggccaactgcaacatgatacccagcactagcagcacagtttgctacgcgagctcaggtgctagcaccggctaccatcaccagctgtaccaccagcccaccagctcagcgctccacttcgcggactccgtaatggtggcttcctcggccggtgtccacgacggcggtgccatgctcagcgcggccgccgctaacggtgtcgctggcgctgccagtgccaacggcggcggcatcgggctgtccatgattaagaactggctgcggagccaaccggcgcccatgcagccgagggtggcggcggctgagggcgcgcaggggctctctttgtccatgaacatggcggggacgacccaaggcgctgctggcatgccacttctcgctggagagcgcgcacgggcgcccgagagtgtatcgacgtcagcacagggtggagccgtcgtcgtcacggcgccgaaggaggatagcggtggcagcggtgttgccggcgctctagtagccgtgagcacggacacgggtggcagcggcggcgcgtcggctgacaacacggcaaggaagacggtggacacgttcgggcagcgcacgtcgatttaccgtggcgtgacaaggcatagatggactgggagatatgaggcacatctttgggataacagttgcagaagggaagggcaaactcgtaagggtcgtcaagtctatttaggtggctatgataaagaggagaaagctgctagggcttatgatcttgctgctctgaagtactggggtgccacaacaacaacaaattttccagtgagtaactacgaaaaggagctcgaggacatgaagcacatgacaaggcaggagtttgtagcgtctctgagaaggaagagcagtggtttctccagaggtgcatccatttacaggggagtgactaggcatcaccaacatggaagatggcaagcacggattggacgagttgcagggaacaaggatctttacttgggcaccttcagcacccaggaggaggcagcggaggcgtacgacatcgcggcgatcaagttccgcggcctcaacgccgtcaccaacttcgacatgagccgctacgacgtgaagagcatcctggacagcagcgccctccccatcggcagcgccgccaagcgcctcaaggaggccgaggccgcagcgtccgcgcagcaccaccacgccggcgtggtgagctacgacgtcggccgcatcgcctcgcagctcggcgacggcggagccctggcggcggcgtacggcgcgcactaccacggcgccgcctggccgaccatcgcgttccagccgggcgccgccagcacaggcctgtaccacccgtacgcgcagcagccaatgcgcggcggcgggtggtgcaagcaggagcaggaccacgcggtgatcgcggccgcgcacagcctgcaggacctccaccacctgaacctgggcgcggccggcgcgcacgactttttctcggcagggcagcaggccgccgccgctgcgatgcacggcctgggtagcatcgacagtgcgtcgctcgagcacagcaccggctccaactccgtcgtctacaacggcggggtcggcgacagcaacggcgccagcgccgtcggcggcagtggcggtggctacatgatgccgatgagcgctgccggagcaaccactacatcggcaatggtgagccacgagcaggtgcatgcacgggcctacgacgaagccaagcaggctgctcagatggggtacgagagctacctggtgaacgcggagaacaatggtggcggaaggatgtctgcatgggggactgtcgtgtctgcagccgcggcggcagcagcaagcagcaacgacaacatggccgccgacgtcgggcatggcggcgcgcagctcttcagtgtctggaacgacacttaagcgtacctagtggtacctgacatcttatagtctgcaacctctcgtgtctgaattcctatctttatcaagtgttattgcttccacgactataggacagctttcgtcgaaagcttttgctcatgtgatctcgaaggattcatctagtctgatttttcgtgacttgtatcggttttattggattcatccaacatatatcaataaaaaatgagttgtgtttcctttcttcctagttcagttaaaattatttccctcctgcgcttgtgctgtaattgtctgtgtacctgttgtttgtgactgtgttagttcccttggatatgatttcgtatttgatatgtacatggagatagcttagcttcattattggagtatgaagttagtatgacatagtcactctcctggaaaattgacactgcaaaccatatttttattctgaaccacaaatcctagtcagtccgctggcatatgccgtccgtttgctgaatccagaacgtgggtttggagatgtacggctgagatgcctctatgcgaaggggatttcgtggtgaaacgagatgggagtagagcaacgcccgtggaagatgcttcaaacttccacacttttgagcaacgatcggcagtagtaaggtagacgatttcaagatcaaagcatatgaagataaacaacatcaacaacaaaatttgttggggttctatagagagaaacagagctacatacatacactgttttgtatctaccatctgagatgatgaaaagatgaaaaactaaagaatgccccggcgccaacgccaggacacgccgcgcgcgcgtcacccgagccatctcttgacccagccggcgctgtatatttacacacgttgcagcatcgatcaccacctgttcgatcgcgtcgccgtcaccggcgcgccgcgacttattgaactagtctagggcgcggctaacaacctagcttagattgccttgtctaaacccttaggctaacgcgccactctagaaggccgatctccccgggtttaccgagctcttcaaagccaatgactgttgttaggtccagtttctaaggacgaatcatccaatcactggttctttctgaacaaaacaaagagctatagagttacgttactgtagccgagacagagcctgcaatctggttatgccacatactaggttctttcttaaagttgactcactctatcctaagttctacttacaaggagctacaacaaattggtcataaccggagagcgttcaaggaggtaatatcccatcttactctgtagcaaggctacaaaaggagagctaaagaactaggctacaaaaagagagctaaagaactaactatctagcaagactacagagctatagtgtagagatttcataaccggtgagcgttcaaggatactttgaagagaagaggtaatatctcaactagcaagactacaaaaaaatggagatataaaactaactgtctaacaagactacagagctatagtagagatagatacgttcgacacttaagcatgatctagaggttcacaaactcaatacaacacacagtggagtagggtattacgctccggcggcccgaaccactctaaatccttgtgtcctcgtgtgctcttccaccattaatgactgtaattgcagggacacgaagagttgtagcgcttttgccaacaagatccgctatatgctagtagagtggaacctgcacagcaacaagcatccaataatctgagaataagaattatgtgtggtgatggttctcatctctgcaactcgccattttcgcgagagaaccaaatccaagttggtgaagatcatgatttgggctcatgggctggcatagtagctattacctttgcaattgtggttcgaatctatccgatattctccttttcagggagagctaatgcttatgcttattgggtattttggtttgacactgcttcacgcccaaaaaaaggcaactatgtctgagttggatatggcccaaaaaaaggcagctatgtctgagttggatatggaagtcttctttcgtttagggtgaagtaagaccaagctcatgagcttattatcttaggtcggaacaaattagttgataggcatggcacatttatcaaattataatgattttaacagaaaagcaacacctctttttcagcagcaccagctttgcaagctgcaattgacactccaagcatagtatttgctccaaactcagcctgcatttcgcacaatatcatatctatttccatttggataaaatatattttccagaaatatgggaacagaatcaagatacagaaaaaagttgtggtagtagtggtaagtggaaacacaagtacagtgaaaagatagcattatttctgaacagtcaaattaaccgaaataagtagtatcacatactgcccctaaattgactacacccaatgtaaagaattgcttgagcatattgagccatcagttgtttgtttgtgtaacggatttgacaatgcagagttcaggagcaaaaaaccgcaaaggagagaaagagggaaaggatctcctagtatcccaccttgtggcgcgccctgtcaagtgcatgatggcctggtcgatctgcgtctgctgctgcggttccatcccaacgagtgcctccgacaccttgtcgttgatcacccgcaccgcgtaggcgacccccctggcgaggaacttccgcctctcggaggccccggccgcgtcggcggcggcgccctcgagcgcgcccacgctagccgtagatgctcggtgcacggccttgttggtgtgcaactcgacctcaacggccggtgcgctacgcccgtcaaggatctggcgcgcccgcaccctcgtgatcacggtgggcgcctcccgcctcatgtggccgacgatgaaaagcgccgggttaggggccttggcgcgcaccgccgtattcagggcctcctcgctcttgcgcgagagcaggtgcttccccaggtactcctgcactgacaaggctgccacagcggtggaatttgtcctcacgacttcgccacgtcgtcctcacctccctggcttcccacgactccgccgtatcgaggtgctcggtgggtcgtcttaatccgaagtccgaactaggaagacgagacagagaggtctgaggaatgggcctcgtttgatgttgagctgaattatttttccagcataagcccaggtcttggtccatgaacaaaattactagaaacccagcccagtactacgatctaaaagagggactgccactggatagctctctctagcattctccacgctccaatacagcggcgtcgtgtctatccgggtctatccgcgaacacgtgagaactctccagaaactgctttctcctccacttcatctctctcgctttccctctataaaaagaccccttctaggaattgagggagacagcaagcaccaagcagcgatccgaagctcaatcaattcactcaaacctcttccccaaatcttcgattagatcttcgttgacaagaagactagaaccgaacctgacatgtccaacctgctcacggttcaccagaaccttccggctcttccagtggacgcgacgtccgatgaagtcaggaagaacctcatggacatgttccgcgacaggcaagcgttcagcgagcacacctggaagatgctgctctccgtctgccgctcctgggctgcatggtgcaagctgaacaacaggaagtggttccccgctgagcccgaggacgtgagggattaccttctgtacctgcaagcgcgaggtttgtttctgcttctacctttgatatatatataataattatcattaattagtagtaatataatatttcaaatatttttttcaaaataaaagaatgtagtatatagcaattgcttttctgtagtttataagtgtgtatattttaatttataacttttctaatatatgaccaaaacatggtgatgcctaggtctggcagtgaagaccatccagcaacaccttggacaactgaacatgcttcacaggcgctccggcctcccgcgccccagcgactcgaacgccgtgagcctcgtcatgcgccgcatcaggaaggaaaacgtcgatgccggcgaaagggcaaagcaggccctcgcgttcgagaggaccgatttcgaccaggtccgcagcctgatggagaacagcgacaggtgccaggacattaggaacctggcgttcctcggaattgcatacaacacgctcctcaggatcgcggaaattgcccgcattcgcgtgaaggacattagccgcaccgacggcggcaggatgcttatccacattggcaggaccaagacgctcgtttccaccgcaggcgtcgaaaaggccctcagcctcggagtgaccaagctcgtcgaacgctggatctccgtgtccggcgtcgcggacgacccaaacaactacctcttctgccgcgtccgcaagaacggggtggctgcccctagcgccaccagccaactcagcacgagggccttggaaggtattttcgaggccacccaccgcctgatctacggcgcgaaggatgacagcggtcaacgctacctcgcatggtccgggcactccgcccgcgttggagctgctagggacatggcccgcgccggtgtttccatccccgaaatcatgcaggcgggtggatggacgaacgtgaacattgtcatgaactacattcgcaaccttgacagcgagacgggcgcaatggttcgcctcctggaagatggtgactgaggtacccaacctagacttgtccatcttctggattggccaacttaattaatgtatgaaataaaaggatgcacacatagtgacatgctaatcactataatgtgggcatcaaagttgtgtgttatgtgtaattactagttatctgaataaaagagaaagagatcatccatatttcttatcctaaatgaatgtcacgtgtctttataattctttgatgaaccagatgcatttcattaaccaaatccatatacatataaatattaatcatatataattaatatcaattgggttagcaaaacaaatctagtctaggtgtgttttgcgatccgataatcgatgggtctaaaaacggcccctaactaacgcttagttgcccgctagattagtcccccgttagtgcctagttagacacacgacgaactaggggctagcacgcgttagataacttcgtatagcatacattatacgaagttattccggaccgggttaccgaattcaattcctgcccttaaggccaattgttcaagattcattcaacaattgaaacatctcccatgattaaatcagtataaggttgctatggtcttgcttgacaaagtttttttttgagggaatttcaactaaatttttgagtgaaactatcaaatactgattttaaaaaatttttataaaaggaagcgcagagataaaaggccatctatgctacaaaagtacccaaaaatgtaatcctaaagtatgaattgcattttttttttgtttggacgaaaggaaaggagtattaccacaagaatgatatcatcttcatatttagatcttttttgggtaaagcttgagattctctaaatatagagaaatcagaagaaaaaaaaaccgtgttttggtggttttgatttctagcctccacaataactttgacggcgtcgacaagtctaacggacaccaagcagcgaaccaccagcgccgagccaagcgaagcagacggccgagacgttgacaccttcggcgcggcatctctcgagagttccgctccggcgctccacctccaccgctggcggtttcttattccgttccgttccgcctcctgctctgctcctctccacaccacacggcacgaaaccgttacggcaccggcagcacccagcacgggagaggggattcctttcccaccgttccttccctttccgccccgccgctataaatagccagccccatccccagcttttttccccaatctcatctcctctctcctgttgttcggagcacacgcacaatccgatcgatccccaaatccccttcgtctctcctcgcgagcctcgtggatcccagcttcaaggtacggcgatcgatcatcccccctccttctctctaccttcttttctctagactacatcggatggcgatccatggttagggcctgctagtttcccttcctgttttgtcgatggctgcgaggcacaatagatctgatggcgttatgacggctaacttgtcatgttgttgcgatttatagtccctttaggagatcagtttaatttctcggatggttcgagatcggtggtccatggttagtaccctaagatccgcgctgttagggttcgtagatggaggcgacctgttctgattgttaacttgtcagtacctgggaaatcctgggatggttctagctcgtccgcagatgagatcgatttcatgatcctctgtatcttgtttcgttgcctaggttccgtctaatctatccgtggtatgatgtagatgttttgatcgtgctaactacgtcttgtaaagttaattgtcaggtcataatttttagcatgcctttttttttgtttggttttgtctaattgggctgtcgttctagatcagagtagaagactgttccaaactacctgctggatttattgaacttggatctgtatgtgtgtcacatatcttcataaattcatgattaagatggattgaaatatcttttatctttttggtatggatagttctatatgttggtgtggctttgttagatgtatacatgcttagatacatgaagcaacgtgctgctactgtttagtaattgctgttcatttgtctaataaacagataaggatatgtatttatgttgctgttggttttgctggtactttgttggatacaaatgcttcaatacagaaaacagcatgctgctacgatttaccatttatctaatcttatcatatgtctaatctaataaacaaacatgcttttaaattatcttcatatgcttggatgatggcatacacagcggctatgtgtggttttttaaatacccagcatcatgggcatgcatgacactgctttaatatgctttttatttgcttgagactgtttcttttgtttatactgaccctttagttcggtgactcttctgcaggtcgactttaacttagcctaggatccatggcccagtccaagcacggcctgaccaaggagatgaccatgaagtaccgcatggagggctgcgtggacggccacaagttcgtgatcaccggcgagggcatcggctaccccttcaagggcaagcaggccatcaacctgtgcgtggtggagggcggccccttgcccttcgccgaggacatcttgtccgccgccttcatgtacggcaaccgcgtgttcaccgagtacccccaggacatcgtcgactacttcaagaactcctgccccgccggctacacctgggaccgctccttcctgttcgaggacggcgccgtgtgcatctgcaacgccgacatcaccgtgagcgtggaggagaactgcatgtaccacgagtccaagttctacggcgtgaacttccccgccgacggccccgtgatgaagaagatgaccgacaactgggagccctcctgcgagaagatcatccccgtgcccaagcagggcatcttgaagggcgacgtgagcatgtacctgctgctgaaggacggtggccgcttgcgctgccagttcgacaccgtgtacaaggccaagtccgtgccccgcaagatgcccgactggcacttcatccagcacaagctgacccgcgaggaccgcagcgacgccaagaaccagaagtggcacctgaccgagcacgccatcgcctccggctccgccttgccctccggactcagatctcgatagggtaccaatggccagttaacagatccagctgctgctgttctagggttcacaagtctgcctatttgtcttccccaatggagctatggttgtctggtctggtccttggtcgtgtcccgtttcattgtgtactatttacctgtaatgtgtatccttaagtctggtttgatggtgtctgaaacgttttgctgtggtagagcagcatggaagaactataatgaataagtgatccctaatcattgtgtccaaattttgcttctgctatacccttttgtgctgtttcttatgttttgcttaaaaatttgatctgacaaacaaatttgtctaaattatgctcttgttctgactgtgtactgtacacatttgtattgctaccggtttggcacatagttttctctttgattgcagatcaaacccttctgattgcagattgcttggctatggctgatgtgctcactgttcttctttagcttgtatattgctgatggtggcttggctacggctgaaaaagttgctgctgcgccgacttggcaactgttgctccagtaatgctttgtcctctcttcctagccgccgacttggcacttggcagctgttgctcctgtaatgcgttgttatctcttatctcttgagatgtactatgattttgaggctgtttgacttgtgccagattgccagtgctgatgctatattatctcaggtttttatgctagtatatgttttactgtgtgctgcctgtgtcgagttacgtaatctattgaaccgctatgcgtgttgatgccctgttgttgcttgccagattgatgcccctgttgcttgcagcttgcaagctgtagtgaaatcctaaaattcgaaaccaaatctattctgaacttttgaagatctgtgatgtccggaagaaaagattcaaacagataaacgggactctccagaatctataaaataaatgatcgacaaacgctttgctttggtaggcttcctagttagttagcggaccgaagcttcggtccgggcctagaaggccagcttcggccgcccctcggtaccctgggatctgcccttactttaacgcctctaaccaacacccctttatctttataaggaacaataaacagaatttgccccactgttctaaatcacctaataatatccccagctaaaaacaataaaggtttcctagaattaagacaagcatgactgttcctccaggagggtttggaacattgttgcagtcttgcagatacgggcgaagggtgagaaacagagcggagggctggaggtgacctcggtagtcgacgccggagttgagcttgacaacgacggggcggcccctgatggacttgaggaagtccgatggcgtcttcaccgtcccgccggcgcccgaggcgggcctgtcgctgccgccgccgccgctgctcatcttgcgcgctgtgcccccggcggtgtccctgtgttgcggatcgcgggtgggccaggtggatgcgagggcgacccgtttggactccggccggagccgccggatccctggtcggtgtcagtgccgtttactctgggccccacgtgtcagtaccgtctgtagatgacaacaacccgtcgtccacagtcatgtccaaaatatcctttcttcttttttttcgattcggatatctatcttccttttttttttccaaaaatcttcttgacgcaccagcgcgcacgtttgtggtaaacgccgacacgtcggtcccacgtcgatagaccccacccaccagtgagtagcgtgtacgtattcgggggtgacggacgtgtcgccgtcgtcttgctagtcccattcccatctgagccacacatctctgaacaaaaaaaaggagggaggcctccacgcacatccccctccgtgccacccgccccaaaccctcgcgccgcctccgagacagccgccgcaaccatggccaccgccgccgccgcgtctaccgcgctcactggcgccactaccgctgcgcccaaggcgaggcgccgggcgcacctcctggccacccgccgcgccctcgccgcgcccatcaggtgctcagcggcgtcacccgccatgccgatggctcccccggccaccccgctccggccgtggggccccaccgagccccgcaagggtgctgacatcctcgtcgagtccctcgagcgctgcggcgtccgcgacgtcttcgcctaccccggcggcgcgtccatggagatccaccaggcactcacccgctcccccgtcatcgccaaccacctcttccgccacgagcaaggggaggcctttgccgcctccggctacgcgcgctcctcgggccgcgtcggcgtctgcatcgccacctccggccccggcgccaccaacctagtctccgcgctcgccgacgcgctgctcgattccgtccccatggtcgccatcacgggacaggtggcgcgacgcatgattggcaccgacgccttccaggagacgcccatcgtcgaggtcacccgctccatcaccaagcacaactacctggtcctcgacgtcgacgacatcccccgcgtcgtgcaggaggctttcttcctcgcctcctctggtcgaccagggccggtgcttgtcgacatccccaaggacatccagcagcagatggcggtgcctgtctgggacaagcccatgagtctgcctgggtacattgcgcgccttcccaagccccctgcgactgagttgcttgagcaggtgctgcgtcttgttggtgaatcgcggcgccctgttctttatgtgggcggtggctgcgcagcatctggtgaggagttgcgacgctttgtggagctgactggaatcccggtcacaactactcttatgggcctcggcaacttccccagcgacgacccactgtctctgcgcatgctaggtatgcatgggacggtgtatgcaaattatgcagtggataaggccgatctgttgcttgcacttggtgtgcggtttgatgatcgcgtgacagggaagattgaggcttttgcaagcagggctaagattgtgcacgttgatattgatccggctgagattggcaagaacaagcagccacatgtgtccatctgtgcagatgttaagcttgctttgcagggcatgaatgctcttcttgaaggaagcacatcaaagaagagctttgactttggctcatggaacgatgagttggatcagcagaagagggaattcccccttgggtataaaacatctaatgaggagatccagccacaatatgctattcaggttcttgatgagctgacgaaaggcgaggccatcatcggcacaggtgttgggcagcaccagatgtgggcggcacagtactacacttacaagcggccaaggcagtggttgtcttcagctggtcttggggctatgggatttggtttgccggctgctgctggtgcttctgtggcaaacccaggtgtcactgttgttgacatcgatggagatggtagctttctcatgaacgttcaggagctagctatgatccgaattgagaacctcccagtgaaggtctttgtgctaaacaaccagcacctggggatggtggtgcagttggaggacaggttctataaggccaacagagcgcacacatacttgggaaacccagagaatgaaagtgagatatatccagatttcgtgacgatcgccaaagggttcaacattccagccgtccgtgtgacaaagaagaacgaagtccgcgcagcgataaagaagatgctcgagactccagggccgtacctcttggatataatcgtcccacaccaggagcatgtgttgcctatgatccctagtggtggggctttcaaggatatgatcctggatggtgatggcaggactgtgtactgacttcgaataggtacccggggatcctctagtgccgtgggtcgtttaagctgccgctgtacctgtgtcgtctggtgccttctggtgtacctgggaggttgtcgtctatcaagtatctgtggttggtgtcatgagtcagtgagtcccaatactgttcgtgtcctgtgtgcattatacccaaaactgttatgggcaaatcatgaataagcttgatgttcgaacttaaaagtctctgctcaatatggtattatggttgtttttgttcgtctcctaatatttgcctgggatcaaattttattggctggtgttcatttgacctccatgttcttgctaggctccattttttactctacagccataatatgtttgattgtttggtttgttctttgttgtacacctggttctgtcgagcttagttttcgacactggcttacagcttaacatgttgctattttattgggttctgattgctattttattgggttctgattgctagtttttgctgaatccaaaaaccatgttatttatttaagcgatccaggttattattatgatggtggctaagtttttttttttccaagggtaaattttctggattctccagtgtttctgtggccgaattcaatcactagagtcgacctgcaaagcttcggtccgggcctagaaggcccgcgccacttacgcttgattccgatgacttcgtaggttcctagctcaagccgctcgtgtccaagcgtcacttacgattagctaatgattacggcatctaggaccgactagttcttatgtgcttctagtctccaaatgtggttgatagttattttgctctaagatcaacagtaatgaagtataaatcatcgttgtggtgtgctactcggttaattgagcattaacacacacaaacatgacgaggatggtataatctccaaaaatgtgtactttgttaggtgggaccctatagccttgattaatgtgctatgttaggcatgcctggaaacgtgtgacgcatatgttttgtgaacctgttgatattatatgtgcttttatattaccatattttattaaaatactaatatttattactagtaagatataacattctatctagcttaaaaactaaccataaatattccataataactagatttaccaaactaatatactaaatatacataataaatacaaaattaacaagacaataatcaatatttatgagcttaatatatttagacattatggttggtcgacgataatcatgctaacttttcgtaattgcttgattgaaatatgcttagaataatgcctctttgttctacatggcaaatagggaccattatggtgtaacaccctgggaaccacaaacaccccgaaatgctactaaactacacaactaaccttcatatataaaatttcgacagcatctcctttgaaaatttgcatagacgtggaagcaacagagtataaacagatctgcgtttaaacgtgcaagcgctactagacaattcagtacattaaaaacgtccgcaatgtgttattaagttgtctaagcgtcaatttgtttacaccacaatatatcctgcca

SEQ ID NO: 69 - DNA, 20132 bp, synthetic construct
  misc_feature 1..20132: note = PHP96664
  source 1..20132: mol_type = other DNA
gtttacccgccaatatatcctgtcaaacactgcggccgcacttgaccgcggatggagccggagctgtggtgaggccatcgacgggaggtgggggagaacacagtctcagtgttctttgtgagtccgcaaggtttttagcttttctgtattaattaaggttgctgttggctgtagaatacggtcgtggaagagctgtatcggtagctactacgtaagctattatatactggaagtctggagctcgtcgatctccggtcgtcttcctccatttctcctcgtcttgctttgactgctgctaccatttgcttctgttttctgatgaagcatgccatgtcggccaccagtgtttgtgtggtttttgcagggaatggctttcaagtgctgtgattgaatggccctcgtcgtcctcggctgagctcacatggacgcgtcatgtgagtgagatatatgatcatatgatgagtggggttcgggtgagtgcgtacttgaagtaggatcccgctttcactcattcattcattggcctttaaaccgggaaattttcgcgaggagatggagggaagcaagcagggtgacgagtgcagagtgccgcgagcgctttgtcaaaaggcaccgccgtaggcaaaaaaatcaatggccctgactgactcgatggtagtactactgtagagactagagagggttgctccccatatcttcgtgtgacttttactccagcattgcatttccgtcattgagacgttaattaatagcagctttcgggacagatgactgtggccatgtttcgtcacggccgcttcgtgccagctgggggtactatagtactgtgattttgttagtaaaaactttcattaggccaccattgacgaccgggccttcgcttttgctgcgctaattaaccatttcccggcgaccgaagggaacatgaacatgccccgacacatgagggcatgaggactagtgttctccctgtcgttcgttgacttgactagtgatagtttaaacgctcttcaactggaagagcggttactaccggttcactagctagctgctaatcgagctagttaccctatgaggtgacatgaagcgctcacggttactatgacggttagcttcacgactgttggtggcagtagcgtacgacttagctatagttccggacttacctagctaataacttcgtatagcatacattatacgaagttatggttaccgaattcgagctcggtaccctggttcacaaactcaatacaacacacagtggagtagggtattacgctccggcggcccgaaccactctaaatccttgtgtcctcgtgtgctcttccaccattaatgactgtaattgcagggacacgaagagttgtagcgcttttgccaacaagatccgctatatgctagtagagtggaacctgcacagcaacaagcatccaataatctgagaataagaattatgtgtggtgatggttctcatctctgcaactcgccattttcgcgagagaaccaaatccaagttggtgaagatcatgatttgggctcatgggctggcatagtagctattacctttgcaattgtggttcgaatctatccgatattctccttttcagggagagctaatgcttatgcttattgggtattttggtttgacactgcttcacgcccaaaaaaaggcaactatgtctgagttggatatggcccaaaaaaaggcagctatgtctgagttggatatggaagtcttctttcgtttagggtgaagtaagaccaagctcatgagcttattatcttaggtcggaacaaattagttgataggcatggcacatttatcaaattataatgattttaacagaaaagcaacacctctttttcagcagcaccagctttgcaagctgcaattgacactccaagcatagtatttgctccaaactcagcctgcatttcgcacaatatcatatctatttccatttggataaaatatattttccagaaatatgggaacagaatcaagatacagaaaaaagttgtggtagtagtggtaagtggaaacacaagtacagtgaaaagatagcattatttctgaacagtcaaattaaccgaaataagtagtatcacatactgcccctaaattgactacacccaatgtaaagaattgcttgagcatattgagccatcagttgtttgtttgtgtaacggatttgacaatgcagagttcaggagcaaaaaaccgcaaaggagagaaagagggaaaggatctcctagtatcccaccttgtggcgcgccctgtcaagtgcatgatggcctggtcgatctgcgtctgctgctgcggttccatcccaacgagtgcctccgacaccttgtcgttgatcacccgcaccgcgtaggcgacccccctggcgaggaacttccgcctctcggaggccccggccgcgtcggcggcggcgccctcgagcgcgcccacgctagccgtagatgctcggtgcacggccttgttggtgtgcaactcgacctcaacggccggtgcgctacgcccgtcaaggatctggcgcgcccgcaccctcgtgatcacggtgggcgcctcccgcctcatgtggccgacgatgaaaagcgccgggttaggggccttggcgcgcaccgccgtattcagggcctcctcgctcttgcgcgagagcaggtgcttccccaggtactcctgcactgacaaggctgccacagcggtggaatttgtcctcacgacttcgccacgtcgtcctcacctccctggcttcccacgactccgccgtatcgaggtgctcggtgggtcgtcttaatccgaagtccgaactaggaagacgagacagagaggtctgaggaatgggcctcgtttgatgttgagctgaattatttttccagcataagcccaggtcttggtccatgaacaaaattactagaaacccagcccagtactacgatctaaaagagggactgccactggatagctctctctagcattctccacgctccaatacagcggcgtcgtgtctatccgggtctatccgcgaacacgtgagaactctccagaaactgctttctcctccacttcatctctctcgctttccctctataaaaagaccccttctaggaattgagggagacagcaagcaccaagcagcgatccgaagctcaatcaattcactcaaacctcttccccaaatcttcgattagatcttcgttgacaagaagactagaaccgaacctgacatgtccaacctgctcacggttcaccagaaccttccggctcttccagtggacgcgacgtccgatgaagtcaggaagaacctcatggacatgttccgcgacaggcaagcgttcagcgagcacacctggaagatgctgctctccgtctgccgctcctgggctgcatggtgcaagctgaacaacaggaagtggttccccgctgagcccgaggacgtgagggattaccttctgtacctgcaagcgcgaggtttgtttctgcttctacctttgatatatatataataattatcattaattagtagtaatataatatttcaaatatttttttcaaaataaaagaatgtagtatatagcaattgcttttctgtagtttataagtgtgtatattttaatttataacttttctaatatatgaccaaaacatggtgatgcctaggtctggcagtgaagaccatccagcaacaccttggacaactgaacatgcttcacaggcgctccggcctcccgcgccccagcgactcgaacgccgtgagcctcgtcatgcgccgcatcaggaaggaaaacgtcgatgccggcgaaagggcaaagcaggccctcgcgttcgagaggaccgatttcgaccaggtccgcagcctgatggagaacagcgacaggtgccaggacattaggaacctggcgttcctcggaattgcatacaacacgctcctcaggatcgcggaaattgcccgcattcgcgtgaaggacattagccgcaccgacggcggcaggatgcttatccacattggcaggaccaagacgctcgtttccaccgcaggcgtcgaaaaggccctcagcctcggagtgaccaagctcgtcgaacgctggatctccgtgtccggcgtcgcggacgacccaaacaactacctcttctgccgcgtccgcaagaacggggtggctgcccctagcgccaccagccaactcagcacgagggccttggaaggtattttcgaggccacccaccgcctgatctacggcgcgaaggatgacagcggtcaacgctacctcgcatggtccgggcactccgcccgcgttggagctgctagggacatggcccgcgccggtgtttccatccccgaaatcatgcaggcgggtggatggacgaacgtgaacattgtcatgaactacattcgcaaccttgacagcgagacgggcgcaatggttcgcctcctggaagatggtgactgaggtacccaacctagacttgtccatcttctggattggccaacttaattaatgtatgaaataaaaggatgcacacatagtgacatgctaatcactataatgtgggcatcaaagttgtgtgttatgtgtaattactagttatctgaataaaagagaaagagatcatccatatttcttatcctaaatgaatgtcacgtgtctttataattctttgatgaaccagatgcatttcattaaccaaatccatatacatataaatattaatcatatataattaatatcaattgggttagcaaaacaaatctagtctaggtgtgttttgcgatccgatcgaggccggccacactgatagtttaaactgaaggcgggaaacgacaatctgatcatgagcggagaattaagggagtcacgttatgacccccgccgatgacgcgggacaagccgttttacgtttggaactgacagaaccgcaacgattgaaggagccactcagccgcgggtttctggagtttaatgagctaagcacatacgtcagaaaccattattgcgcgttcaaaagtcgcctaaggtcactatcagctagcaaatatttcttgtcaaaacgtaagcgcttacgcaccgaacaacgtaagcgcttacgcaccgaacaacgtaagcgcttacgcaatgctccactgacgttccataaattcccctcggtatccaattagagtctcatattcactctcccggcggatctcgactctagaggatcgctcaggaaggccgctgagatagagccatggcggccaatgcgggcggcggtggagcgggaggaggcagcggcagcggcagcgtggctgcgccggcggtgtgccgccccagcggctcgcggtggacgccgacgccggagcagatcaggatgctgaaggagctctactacggctgcggcatccggtcgcccagctcggagcagatccagcgcatcaccgccatgctgcggcagcacggcaagatcgagggcaagaacgtcttctactggttccagaaccacaaggcccgcgagcgccagaagcgccgcctcaccagcctcgacgtcaacgtgcccgccgccggcgcggccgacgccaccaccagccaactcggcgtcctctcgctgtcgtcgccgccgccttcaggcgcggcgcctccctcgcccaccctcggcttctacgccgccggcaatggcggcggatcggctgtgctgctggacacgagttccgactggggcagcagcggcgctgctatggccaccgagacatgcttcctgcaggactacatgggcgtgacggacacgggcagctcgtcgcagtggccacgcttctcgtcgtcggacacgataatggcggcggccgcggcgcgggcggcgacgacgcgggcgcccgagacgctccctctcttcccgacctgcggcgacgacggcggcagcggtagcagcagctacttgccgttctggggtgccgcgtccacaactgccggcgccacttcttccgttgcgatccaacagcaacaccagctgcaggagcagtacagcttttacagcaacagcaacagcacccagctggccggcaccggcaaccaagacgtatcggcaacagcagcagcagccgccgccctggagctgagcctcagctcatggtgctccccttaccctgctgcagggagtatgtgagagcaacgcgagctgccactgctcttcactgatgtctctggaatggaaggaggaggaagtgagaacagatcattcgacaaagcagcattagtccgttgatcggtggaagaccactcgtcagtgttgagttgaatgtttgatcaataaaatacggcaatgctgtaagggttgttttttatgccattgataatacactgtactgttcagttgttgaactctatttcttagccatgccaagtgcttttcttattttgaataacattacagcaaaaagttgaaagacaaaaaaaaaaacccccgaacagagtgctttgggtcccaagcttctttagactgtgttcggcgttccccctaaatttctccccctatatctcactcacttgtcacatcagcgttctctttccccctatatctccacgctctacagcagttccacctatatcaaacctctataccccaccacaacaatattatatactttcatcttcaactaactcatgtaccttccaatttttttctactaataattatttacgtgcacagaaacttagcaaggagagagagagcgggaatttaaatgctcggcgttaggcttttagtccgctaggtggctagaccgaggttaggacgctagttcactaggggcctagtggtgttttaagacgtcacggtcacccggtccgggcctagaaggccagcttcaagtttgtacaaaaaagcaggctccggccagaatggcccggaccgaagcttgcatgcctgcagtgcagcgtgacccggtcgtgcccctctctagagataatgagcattgcatgtctaagttataaaaaattaccacatattttttttgtcacacttgtttgaagtgcagtttatctatctttatacatatatttaaactttactctacgaataatataatctatagtactacaataatatcagtgttttagagaatcatataaatgaacagttagacatggtctaaaggacaattgagtattttgacaacaggactctacagttttatctttttagtgtgcatgtgttctcctttttttttgcaaatagcttcacctatataatacttcatccattttattagtacatccatttagggtttagggttaatggtttttatagactaatttttttagtacatctattttattctattttagcctctaaattaagaaaactaaaactctattttagtttttttatttaataatttagatataaaatagaataaaataaagtgactaaaaattaaacaaataccctttaagaaattaaaaaaactaaggaaacatttttcttgtttcgagtagataatgccagcctgttaaacgccgtcgacgagtctaacggacaccaaccagcgaaccagcagcgtcgcgtcgggccaagcgaagcagacggcacggcatctctgtcgctgcctctggacccctctcgagagttccgctccaccgttggacttgctccgctgtcggcatccagaaattgcgtggcggagcggcagacgtgagccggcacggcaggcggcctcctcctcctctcacggcaccggcagctacgggggattcctttcccaccgctccttcgctttcccttcctcgcccgccgtaataaatagacaccccctccacaccctctttccccaacctcgtgttgttcggagcgcacacacacacaaccagatctcccccaaatccacccgtcggcacctccgcttcaaggtacgccgctcgtcctcccccccccccctctctaccttctctagatcggcgttccggtccatgcatggttagggcccggtagttctacttctgttcatgtttgtgttagatccgtgtttgtgttagatccgtgctgctagcgttcgtacacggatgcgacctgtacgtcagacacgttctgattgctaacttgccagtgtttctctttggggaatcctgggatggctctagccgttccgcagacgggatcgatttcatgattttttttgtttcgttgcatagggtttggtttgcccttttcctttatttcaatatatgccgtgcacttgtttgtcgggtcatcttttcatgcttttttttgtcttggttgtgatgatgtggtctggttgggcggtcgttctagatcggagtagaattctgtttcaaactacctggtggatttattaattttggatctgtatgtgtgtgccatacatattcatagttacgaattgaagatgatggatggaaatatcgatctaggataggtatacatgttgatgcgggttttactgatgcatatacagagatgctttttgttcgcttggttgtgatgatgtggtgtggttgggcggtcgttcattcgttctagatcggagtagaatactgtttcaaactacctggtgtatttattaattttggaactgtatgtgtgtgtcatacatcttcatagttacgagtttaagatggatggaaatatcgatctaggataggtatacatgttgatgtgggttttactgatgcatatacatgatggcatatgcagcatctattcatatgctctaaccttgagtacctatctattataataaacaagtatgttttataattattttgatcttgatatacttggatgatggcatatgcagcagctatatgtggatttttttagcactgccttcatacgctatttatttgcttggtactgtttcttttgtcgatgctcaccctgttgtttggtgttacttctgcaggtcgactttaacttagcctaggatccatggccactgtgaacaactggctcgctttctccctctccccgcaggagctgccgccctcccagacgacggactccacactcatctcggccgccaccgccgaccatgtctccggcgatgtctgcttcaacatcccccaagattggagcatgaggggatcagagctttcggcgctcgtcgcggagccgaagctggaggacttcctcggcggcatctccttctccgagcagcatcacaaggccaactgcaacatgatacccagcactagcagcacagtttgctacgcgagctcaggtgctagcaccggctaccatcaccagctgtaccaccagcccaccagctcagcgctccacttcgcggactccgtaatggtggcttcctcggccggtgtccacgacggcggtgccatgctcagcgcggccgccgctaacggtgtcgctggcgctgccagtgccaacggcggcggcatcgggctgtccatgattaagaactggctgcggagccaaccggcgcccatgcagccgagggtggcggcggctgagggcgcgcaggggctctctttgtccatgaacatggcggggacgacccaaggcgctgctggcatgccacttctcgctggagagcgcgcacgggcgcccgagagtgtatcgacgtcagcacagggtggagccgtcgtcgtcacggcgccgaaggaggatagcggtggcagcggtgttgccggcgctctagtagccgtgagcacggacacgggtggcagcggcggcgcgtcggctgacaacacggcaaggaagacggtggacacgttcgggcagcgcacgtcgatttaccgtggcgtgacaaggcatagatggactgggagatatgaggcacatctttgggataacagttgcagaagggaagggcaaactcgtaagggtcgtcaagtctatttaggtggctatgataaagaggagaaagctgctagggcttatgatcttgctgctctgaagtactggggtgccacaacaacaacaaattttccagtgagtaactacgaaaaggagctcgaggacatgaagcacatgacaaggcaggagtttgtagcgtctctgagaaggaagagcagtggtttctccagaggtgcatccatttacaggggagtgactaggcatcaccaacatggaagatggcaagcacggattggacgagttgcagggaacaaggatctttacttgggcaccttcagcacccaggaggaggcagcggaggcgtacgacatcgcggcgatcaagttccgcggcctcaacgccgtcaccaacttcgacatgagccgctacgacgtgaagagcatcctggacagcagcgccctccccatcggcagcgccgccaagcgcctcaaggaggccgaggccgcagcgtccgcgcagcaccaccacgccggcgtggtgagctacgacgtcggccgcatcgcctcgcagctcggcgacggcggagccctggcggcggcgtacggcgcgcactaccacggcgccgcctggccgaccatcgcgttccagccgggcgccgccagcacaggcctgtaccacccgtacgcgcagcagccaatgcgcggcggcgggtggtgcaagcaggagcaggaccacgcggtgatcgcggccgcgcacagcctgcaggacctccaccacctgaacctgggcgcggccggcgcgcacgactttttctcggcagggcagcaggccgccgccgctgcgatgcacggcctgggtagcatcgacagtgcgtcgctcgagcacagcaccggctccaactccgtcgtctacaacggcggggtcggcgacagcaacggcgccagcgccgtcggcggcagtggcggtggctacatgatgccgatgagcgctgccggagcaaccactacatcggcaatggtgagccacgagcaggtgcatgcacgggcctacgacgaagccaagcaggctgctcagatggggtacgagagctacctggtgaacgcggagaacaatggtggcggaaggatgtctgcatgggggactgtcgtgtctgcagccgcggcggcagcagcaagcagcaacgacaacatggccgccgacgtcgggcatggcggcgcgcagctcttcagtgtctggaacgacacttaagcgtacctagtggtacctgacatcttatagtctgcaacctctcgtgtctgaattcctatctttatcaagtgttattgcttccacgactataggacagctttcgtcgaaagcttttgctcatgtgatctcgaaggattcatctagtctgatttttcgtgacttgtatcggttttattggattcatccaacatatatcaataaaaaatgagttgtgtttcctttcttcctagttcagttaaaattatttccctcctgcgcttgtgctgtaattgtctgtgtacctgttgtttgtgactgtgttagttcccttggatatgatttcgtatttgatatgtacatggagatagcttagcttcattattggagtatgaagttagtatgacatagtcactctcctggaaaattgacactgcaaaccatatttttattctgaaccacaaatcctagtcagtccgctggcatatgccgtccgtttgctgaatccagaacgtgggtttggagatgtacggctgagatgcctctatgcgaaggggatttcgtggtgaaacgagatgggagtagagcaacgcccgtggaagatgcttcaaacttccacacttttgagcaacgatcggcagtagtaaggtagacgatttcaagatcaaagcatatgaagataaacaacatcaacaacaaaatttgttggggttctatagagagaaacagagctacatacatacactgttttgtatctaccatctgagatgatgaaaagatgaaaaactaaagaatgccccggcgccaacgccaggacacgccgcgcgcgcgtcacccgagccatctcttgacccagccggcgctgtatatttacacacgttgcagcatcgatcaccacctgttcgatcgcgtcgccgtcaccggcgcgccgcgacttattgaactagtctagggcgcggctaacaacctagcttagattgccttgtctaaacccttaggctaacgcgccactctagaaggccgatctccccgggtgatcagctgcccttaaggccaattgttcaagattcattcaacaattgaaacatctcccatgattaaatcagtataaggttgctatggtcttgcttgacaaagtttttttttgagggaatttcaactaaatttttgagtgaaactatcaaatactgattttaaaaaatttttataaaaggaagcgcagagataaaaggccatctatgctacaaaagtacccaaaaatgtaatcctaaagtatgaattgcattttttttttgtttggacgaaaggaaaggagtattaccacaagaatgatatcatcttcatatttagatcttttttgggtaaagcttgagattctctaaatatagagaaatcagaagaaaaaaaaaccgtgttttggtggttttgatttctagcctccacaataactttgacggcgtcgacaagtctaacggacaccaagcagcgaaccaccagcgccgagccaagcgaagcagacggccgagacgttgacaccttcggcgcggcatctctcgagagttccgctccggcgctccacctccaccgctggcggtttcttattccgttccgttccgcctcctgctctgctcctctccacaccacacggcacgaaaccgttacggcaccggcagcacccagcacgggagaggggattcctttcccaccgttccttccctttccgccccgccgctataaatagccagccccatccccagcttttttccccaatctcatctcctctctcctgttgttcggagcacacgcacaatccgatcgatccccaaatccccttcgtctctcctcgcgagcctcgtggatcccagcttcaaggtacggcgatcgatcatcccccctccttctctctaccttcttttctctagactacatcggatggcgatccatggttagggcctgctagtttcccttcctgttttgtcgatggctgcgaggcacaatagatctgatggcgttatgacggctaacttgtcatgttgttgcgatttatagtccctttaggagatcagtttaatttctcggatggttcgagatcggtggtccatggttagtaccctaagatccgcgctgttagggttcgtagatggaggcgacctgttctgattgttaacttgtcagtacctgggaaatcctgggatggttctagctcgtccgcagatgagatcgatttcatgatcctctgtatcttgtttcgttgcctaggttccgtctaatctatccgtggtatgatgtagatgttttgatcgtgctaactacgtcttgtaaagttaattgtcaggtcataatttttagcatgcctttttttttgtttggttttgtctaattgggctgtcgttctagatcagagtagaagactgttccaaactacctgctggatttattgaacttggatctgtatgtgtgtcacatatcttcataaattcatgattaagatggattgaaatatcttttatctttttggtatggatagttctatatgttggtgtggctttgttagatgtatacatgcttagatacatgaagcaacgtgctgctactgtttagtaattgctgttcatttgtctaataaacagataaggatatgtatttatgttgctgttggttttgctggtactttgttggatacaaatgcttcaatacagaaaacagcatgctgctacgatttaccatttatctaatcttatcatatgtctaatctaataaacaaacatgcttttaaattatcttcatatgcttggatgatggcatacacagcggctatgtgtggttttttaaatacccagcatcatgggcatgcatgacactgctttaatatgctttttatttgcttgagactgtttcttttgtttatactgaccctttagttcggtgactcttctgcaggtcgactttaacttagcctaggatccatggcccagtccaagcacggcctgaccaaggagatgaccatgaagtaccgcatggagggctgcgtggacggccacaagttcgtgatcaccggcgagggcatcggctaccccttcaagggcaagcaggccatcaacctgtgcgtggtggagggcggccccttgcccttcgccgaggacatcttgtccgccgccttcatgtacggcaaccgcgtgttcaccgagtacccccaggacatcgtcgactacttcaagaactcctgccccgccggctacacctgggaccgctccttcctgttcgaggacggcgccgtgtgcatctgcaacgccgacatcaccgtgagcgtggaggagaactgcatgtaccacgagtccaagttctacggcgtgaacttccccgccgacggccccgtgatgaagaagatgaccgacaactgggagccctcctgcgagaagatcatccccgtgcccaagcagggcatcttgaagggcgacgtgagcatgtacctgctgctgaaggacggtggccgcttgcgctgccagttcgacaccgtgtacaaggccaagtccgtgccccgcaagatgcccgactggcacttcatccagcacaagctgacccgcgaggaccgcagcgacgccaagaaccagaagtggcacctgaccgagcacgccatcgcctccggctccgccttgccctccggactcagatctcgatagggtaccaatggccagttaacagatccagctgctgctgttctagggttcacaagtctgcctatttgtcttccccaatggagctatggttgtctggtctggtccttggtcgtgtcccgtttcattgtgtactatttacctgtaatgtgtatccttaagtctggtttgatggtgtctgaaacgttttgctgtggtagagcagcatggaagaactataatgaataagtgatccctaatcattgtgtccaaattttgcttctgctatacccttttgtgctgtttcttatgttttgcttaaaaatttgatctgacaaacaaatttgtctaaattatgctcttgttctgactgtgtactgtacacatttgtattgctaccggtttggcacatagttttctctttgattgcagatcaaacccttctgattgcagattgcttggctatggctgatgtgctcactgttcttctttagcttgtatattgctgatggtggcttggctacggctgaaaaagttgctgctgcgccgacttggcaactgttgctccagtaatgctttgtcctctcttcctagccgccgacttggcacttggcagctgttgctcctgtaatgcgttgttatctcttatctcttgagatgtactatgattttgaggctgtttgacttgtgccagattgccagtgctgatgctatattatctcaggtttttatgctagtatatgttttactgtgtgctgcctgtgtcgagttacgtaatctattgaaccgctatgcgtgttgatgccctgttgttgcttgccagattgatgcccctgttgcttgcagcttgcaagctgtagtgaaatcctaaaattcgaaaccaaatctattctgaacttttgaagatctgtgatgtccggaagaaaagattcaaacagataaacgggactctccagaatctataaaataaatgatcgacaaacgctttgctttggtaggcttcctagttagttagcggaccgaagcttcggtccgggcctagaaggccagcttcggccgcccctcggtaccctgggatctgcccttactttaacgcctctaaccaacacccctttatctttataaggaacaataaacagaatttgccccactgttctaaatcacctaataatatccccagctaaaaacaataaaggtttcctagaattaagacaagcatgactgttcctccaggagggtttggaacattgttgcagtcttgcagatacgggcgaagggtgagaaacagagcggagggctggaggtgacctcggtagtcgacgccggagttgagcttgacaacgacggggcggcccctgatggacttgaggaagtccgatggcgtcttcaccgtcccgccggcgcccgaggcgggcctgtcgctgccgccgccgccgctgctcatcttgcgcgctgtgcccccggcggtgtccctgtgttgcggatcgcgggtgggccaggtggatgcgagggcgacccgtttggactccggccggagccgccggatccctggtcggtgtcagtgccgtttactctgggccccacgtgtcagtaccgtctgtagatgacaacaacccgtcgtccacagtcatgtccaaaatatcctttcttcttttttttcgattcggatatctatcttccttttttttttccaaaaatcttcttgacgcaccagcgcgcacgtttgtggtaaacgccgacacgtcggtcccacgtcgatagaccccacccaccagtgagtagcgtgtacgtattcgggggtgacggacgtgtcgccgtcgtcttgctagtcccattcccatctgagccacacatctctgaacaaaaaaaaggagggaggcctccacgcacatccccctccgtgccacccgccccaaaccctcgcgccgcctccgagacagccgccgcaaccatggccaccgccgccgccgcgtctaccgcgctcactggcgccactaccgctgcgcccaaggcgaggcgccgggcgcacctcctggccacccgccgcgccctcgccgcgcccatcaggtgctcagcggcgtcacccgccatgccgatggctcccccggccaccccgctccggccgtggggccccaccgagccccgcaagggtgctgacatcctcgtcgagtccctcgagcgctgcggcgtccgcgacgtcttcgcctaccccggcggcgcgtccatggagatccaccaggcactcacccgctcccccgtcatcgccaaccacctcttccgccacgagcaaggggaggcctttgccgcctccggctacgcgcgctcctcgggccgcgtcggcgtctgcatcgccacctccggccccggcgccaccaacctagtctccgcgctcgccgacgcgctgctcgattccgtccccatggtcgccatcacgggacaggtggcgcgacgcatgattggcaccgacgccttccaggagacgcccatcgtcgaggtcacccgctccatcaccaagcacaactacctggtcctcgacgtcgacgacatcccccgcgtcgtgcaggaggctttcttcctcgcctcctctggtcgaccagggccggtgcttgtcgacatccccaaggacatccagcagcagatggcggtgcctgtctgggacaagcccatgagtctgcctgggtacattgcgcgccttcccaagccccctgcgactgagttgcttgagcaggtgctgcgtcttgttggtgaatcgcggcgccctgttctttatgtgggcggtggctgcgcagcatctggtgaggagttgcgacgctttgtggagctgactggaatcccggtcacaactactcttatgggcctcggcaacttccccagcgacgacccactgtctctgcgcatgctaggtatgcatgggacggtgtatgcaaattatgcagtggataaggccgatctgttgcttgcacttggtgtgcggtttgatgatcgcgtgacagggaagattgaggcttttgcaagcagggctaagattgtgcacgttgatattgatccggctgagattggcaagaacaagcagccacatgtgtccatctgtgcagatgttaagcttgctttgcagggcatgaatgctcttcttgaaggaagcacatcaaagaagagctttgactttggctcatggaacgatgagttggatcagcagaagagggaattcccccttgggtataaaacatctaatgaggagatccagccacaatatgctattcaggttcttgatgagctgacgaaaggcgaggccatcatcggcacaggtgttgggcagcaccagatgtgggcggcacagtactacacttacaagcggccaaggcagtggttgtcttcagctggtcttggggctatgggatttggtttgccggctgctgctggtgcttctgtggcaaacccaggtgtcactgttgttgacatcgatggagatggtagctttctcatgaacgttcaggagctagctatgatccgaattgagaacctcccagtgaaggtctttgtgctaaacaaccagcacctggggatggtggtgcagttggaggacaggttctataaggccaacagagcgcacacatacttgggaaacccagagaatgaaagtgagatatatccagatttcgtgacgatcgccaaagggttcaacattccagccgtccgtgtgacaaagaagaacgaagtccgcgcagcgataaagaagatgctcgagactccagggccgtacctcttggatataatcgtcccacaccaggagcatgtgttgcctatgatccctagtggtggggctttcaaggatatgatcctggatggtgatggcaggactgtgtactgacttcgaataggtacccggggatcctctagtgccgtgggtcgtttaagctgccgctgtacctgtgtcgtctggtgccttctggtgtacctgggaggttgtcgtctatcaagtatctgtggttggtgtcatgagtcagtgagtcccaatactgttcgtgtcctgtgtgcattatacccaaaactgttatgggcaaatcatgaataagcttgatgttcgaacttaaaagtctctgctcaatatggtattatggttgtttttgttcgtctcctaatatttgcctgggatcaaattttattggctggtgttcatttgacctccatgttcttgctaggctccattttttactctacagccataatatgtttgattgtttggtttgttctttgttgtacacctggttctgtcgagcttagttttcgacactggcttacagcttaacatgttgctattttattgggttctgattgctattttattgggttctgattgctagtttttgctgaatccaaaaaccatgttatttatttaagcgatccaggttattattatgatggtggctaagtttttttttttccaagggtaaattttctggattctccagtgtttctgtggccgaattcaatcactagagtcgacctgcaaagcttcggtccgggcctagaaggcccgcgccacttacgcttgattccgatgacttcgtaggttcctagctcaagccgctcgtgtccaagcgtcacttacgattagctaatgattacggcatctaggaccgactagttcttatgtgcttctagtctccaaatgtggttgatagttattttgctctaagatcaacagtaatgaagtataaatcatcgttgtggtgtgctactcggttaattgagcattaacacacacaaacatgacgaggatggtataatctccaaaaatgtgtactttgttaggtgggaccctatagccttgattaatgtgctatgttaggcatgcctggaaacgtgtgacgcatatgttttgtgaacctgttgatattatatgtgcttttatattaccatattttattaaaatactaatatttattactagtaagatataacattctatctagcttaaaaactaaccataaatattccataataactagatttaccaaactaatatactaaatatacataataaatacaaaattaacaagacaataatcaatatttatgagcttaatatatttagacattatggttggtcgacgataatcatgctaacttttcgtaattgcttgattgaaatatgcttagaataatgcctctttgttctacatggcaaatagggaccattatggtgtaacaccctgggaaccacaaacaccccgaaatgctactaaactacacaactaaccttcatatataaaatttcgacagcatctcctttgaaaatttgcatagacgtggaagcaacagagtataaacagatctgcgtttaaacgtgcaagcgctactagacaattcagtacattaaaaacgtccgcaatgtgttattaagttgtctaagcgtcaatttgtttacaccacaatatatcctgcca

SEQ ID NO: 70 - DNA, 20329 bp, synthetic construct
  misc_feature 1..20329: note = PHP96695
  source 1..20329: mol_type = other DNA
gtttacccgccaatatatcctgtcaaacactgcggccgcacttgaccgcggatggagccggagctgtggtgaggccatcgacgggaggtgggggagaacacagtctcagtgttctttgtgagtccgcaaggtttttagcttttctgtattaattaaggttgctgttggctgtagaatacggtcgtggaagagctgtatcggtagctactacgtaagctattatatactggaagtctggagctcgtcgatctccggtcgtcttcctccatttctcctcgtcttgctttgactgctgctaccatttgcttctgttttctgatgaagcatgccatgtcggccaccagtgtttgtgtggtttttgcagggaatggctttcaagtgctgtgattgaatggccctcgtcgtcctcggctgagctcacatggacgcgtcatgtgagtgagatatatgatcatatgatgagtggggttcgggtgagtgcgtacttgaagtaggatcccgctttcactcattcattcattggcctttaaaccgggaaattttcgcgaggagatggagggaagcaagcagggtgacgagtgcagagtgccgcgagcgctttgtcaaaaggcaccgccgtaggcaaaaaaatcaatggccctgactgactcgatggtagtactactgtagagactagagagggttgctccccatatcttcgtgtgacttttactccagcattgcatttccgtcattgagacgttaattaatagcagctttcgggacagatgactgtggccatgtttcgtcacggccgcttcgtgccagctgggggtactatagtactgtgattttgttagtaaaaactttcattaggccaccattgacgaccgggccttcgcttttgctgcgctaattaaccatttcccggcgaccgaagggaacatgaacatgccccgacacatgagggcatgaggactagtgttctccctgtcgttcgttgacttgactagtgatagtttaaacgctcttcaactggaagagcggttactaccggttcactagctagctgctaatcgagctagttaccctatgaggtgacatgaagcgctcacggttactatgacggttagcttcacgactgttggtggcagtagcgtacgacttagctatagttccggacttacctagctaataacttcgtatagcatacattatacgaagttatggttaccgagctcccctggccgaagcttacactgatagtttaaactgaaggcgggaaacgacaatctgatcatgagcggagaattaagggagtcacgttatgacccccgccgatgacgcgggacaagccgttttacgtttggaactgacagaaccgcaacgattgaaggagccactcagccgcgggtttctggagtttaatgagctaagcacatacgtcagaaaccattattgcgcgttcaaaagtcgcctaaggtcactatcagctagcaaatatttcttgtcaaaaatgctccactgacgttccataaattcccctcggtatccaattagagtctcatattcactctcccggcggatctcgactctagaggatcgctcaggaaggccgctgagatagagccatggcggccaatgcgggcggcggtggagcgggaggaggcagcggcagcggcagcgtggctgcgccggcggtgtgccgccccagcggctcgcggtggacgccgacgccggagcagatcaggatgctgaaggagctctactacggctgcggcatccggtcgcccagctcggagcagatccagcgcatcaccgccatgctgcggcagcacggcaagatcgagggcaagaacgtcttctactggttccagaaccacaaggcccgcgagcgccagaagcgccgcctcaccagcctcgacgtcaacgtgcccgccgccggcgcggccgacgccaccaccagccaactcggcgtcctctcgctgtcgtcgccgccgccttcaggcgcggcgcctccctcgcccaccctcggcttctacgccgccggcaatggcggcggatcggctgtgctgctggacacgagttccgactggggcagcagcggcgctgctatggccaccgagacatgcttcctgcaggactacatgggcgtgacggacacgggcagctcgtcgcagtggccacgcttctcgtcgtcggacacgataatggcggcggccgcggcgcgggcggcgacgacgcgggcgcccgagacgctccctctcttcccgacctgcggcgacgacggcggcagcggtagcagcagctacttgccgttctggggtgccgcgtccacaactgccggcgccacttcttccgttgcgatccaacagcaacaccagctgcaggagcagtacagcttttacagcaacagcaacagcacccagctggccggcaccggcaaccaagacgtatcggcaacagcagcagcagccgccgccctggagctgagcctcagctcatggtgctccccttaccctgctgcagggagtatgtgagagcaacgcgagctgccactgctcttcactgatgtctctggaatggaaggaggaggaagtgagaacagatcattcgacaaagcagcattagtccgttgatcggtggaagaccactcgtcagtgttgagttgaatgtttgatcaataaaatacggcaatgctgtaagggttgttttttatgccattgataatacactgtactgttcagttgttgaactctatttcttagccatgccaagtgcttttcttattttgaataacattacagcaaaaagttgaaagacaaaaaaaaaaacccccgaacagagtgctttgggtcccaagcttctttagactgtgttcggcgttccccctaaatttctccccctatatctcactcacttgtcacatcagcgttctctttccccctatatctccacgctctacagcagttccacctatatcaaacctctataccccaccacaacaatattatatactttcatcttcaactaactcatgtaccttccaatttttttctactaataattatttacgtgcacagaaacttagcaaggagagagagagcgggaatttaaatgctcggcgttaggcttttagtccgctaggtggctagaccgaggttaggacgctagttcactaggggcctagtggtgttttaagacgtcacggtcacccggtccgggcctagaaggccagcttcaagtttgtacaaaaaagcaggctccggccagaatggcccggaccgaagcttgcatgcctgcagtgcagcgtgacccggtcgtgcccctctctagagataatgagcattgcatgtctaagttataaaaaattaccacatattttttttgtcacacttgtttgaagtgcagtttatctatctttatacatatatttaaactttactctacgaataatataatctatagtactacaataatatcagtgttttagagaatcatataaatgaacagttagacatggtctaaaggacaattgagtattttgacaacaggactctacagttttatctttttagtgtgcatgtgttctcctttttttttgcaaatagcttcacctatataatacttcatccattttattagtacatccatttagggtttagggttaatggtttttatagactaatttttttagtacatctattttattctattttagcctctaaattaagaaaactaaaactctattttagtttttttatttaataatttagatataaaatagaataaaataaagtgactaaaaattaaacaaataccctttaagaaattaaaaaaactaaggaaacatttttcttgtttcgagtagataatgccagcctgttaaacgccgtcgacgagtctaacggacaccaaccagcgaaccagcagcgtcgcgtcgggccaagcgaagcagacggcacggcatctctgtcgctgcctctggacccctctcgagagttccgctccaccgttggacttgctccgctgtcggcatccagaaattgcgtggcggagcggcagacgtgagccggcacggcaggcggcctcctcctcctctcacggcaccggcagctacgggggattcctttcccaccgctccttcgcacgtaagcgcttacgcaccgaacaacgtaagcgcttacgcaccgaacaacgtaagcgcttacgctttcccttcctcgcccgccgtaataaatagacaccccctccacaccctctttccccaacctcgtgttgttcggagcgcacacacacacaaccagatctcccccaaatccacccgtcggcacctccgcttcaaggtacgccgctcgtcctcccccccccccctctctaccttctctagatcggcgttccggtccatgcatggttagggcccggtagttctacttctgttcatgtttgtgttagatccgtgtttgtgttagatccgtgctgctagcgttcgtacacggatgcgacctgtacgtcagacacgttctgattgctaacttgccagtgtttctctttggggaatcctgggatggctctagccgttccgcagacgggatcgatttcatgattttttttgtttcgttgcatagggtttggtttgcccttttcctttatttcaatatatgccgtgcacttgtttgtcgggtcatcttttcatgcttttttttgtcttggttgtgatgatgtggtctggttgggcggtcgttctagatcggagtagaattctgtttcaaactacctggtggatttattaattttggatctgtatgtgtgtgccatacatattcatagttacgaattgaagatgatggatggaaatatcgatctaggataggtatacatgttgatgcgggttttactgatgcatatacagagatgctttttgttcgcttggttgtgatgatgtggtgtggttgggcggtcgttcattcgttctagatcggagtagaatactgtttcaaactacctggtgtatttattaattttggaactgtatgtgtgtgtcatacatcttcatagttacgagtttaagatggatggaaatatcgatctaggataggtatacatgttgatgtgggttttactgatgcatatacatgatggcatatgcagcatctattcatatgctctaaccttgagtacctatctattataataaacaagtatgttttataattattttgatcttgatatacttggatgatggcatatgcagcagctatatgtggatttttttagcactgccttcatacgctatttatttgcttggtactgtttcttttgtcgatgctcaccctgttgtttggtgttacttctgcaggtcgactttaacttagcctaggatccatggccactgtgaacaactggctcgctttctccctctccccgcaggagctgccgccctcccagacgacggactccacactcatctcggccgccaccgccgaccatgtctccggcgatgtctgcttcaacatcccccaagattggagcatgaggggatcagagctttcggcgctcgtcgcggagccgaagctggaggacttcctcggcggcatctccttctccgagcagcatcacaaggccaactgcaacatgatacccagcactagcagcacagtttgctacgcgagctcaggtgctagcaccggctaccatcaccagctgtaccaccagcccaccagctcagcgctccacttcgcggactccgtaatggtggcttcctcggccggtgtccacgacggcggtgccatgctcagcgcggccgccgctaacggtgtcgctggcgctgccagtgccaacggcggcggcatcgggctgtccatgattaagaactggctgcggagccaaccggcgcccatgcagccgagggtggcggcggctgagggcgcgcaggggctctctttgtccatgaacatggcggggacgacccaaggcgctgctggcatgccacttctcgctggagagcgcgcacgggcgcccgagagtgtatcgacgtcagcacagggtggagccgtcgtcgtcacggcgccgaaggaggatagcggtggcagcggtgttgccggcgctctagtagccgtgagcacggacacgggtggcagcggcggcgcgtcggctgacaacacggcaaggaagacggtggacacgttcgggcagcgcacgtcgatttaccgtggcgtgacaaggcatagatggactgggagatatgaggcacatctttgggataacagttgcagaagggaagggcaaactcgtaagggtcgtcaagtctatttaggtggctatgataaagaggagaaagctgctagggcttatgatcttgctgctctgaagtactggggtgccacaacaacaacaaattttccagtgagtaactacgaaaaggagctcgaggacatgaagcacatgacaaggcaggagtttgtagcgtctctgagaaggaagagcagtggtttctccagaggtgcatccatttacaggggagtgactaggcatcaccaacatggaagatggcaagcacggattggacgagttgcagggaacaaggatctttacttgggcaccttcagcacccaggaggaggcagcggaggcgtacgacatcgcggcgatcaagttccgcggcctcaacgccgtcaccaacttcgacatgagccgctacgacgtgaagagcatcctggacagcagcgccctccccatcggcagcgccgccaagcgcctcaaggaggccgaggccgcagcgtccgcgcagcaccaccacgccggcgtggtgagctacgacgtcggccgcatcgcctcgcagctcggcgacggcggagccctggcggcggcgtacggcgcgcactaccacggcgccgcctggccgaccatcgcgttccagccgggcgccgccagcacaggcctgtaccacccgtacgcgcagcagccaatgcgcggcggcgggtggtgcaagcaggagcaggaccacgcggtgatcgcggccgcgcacagcctgcaggacctccaccacctgaacctgggcgcggccggcgcgcacgactttttctcggcagggcagcaggccgccgccgctgcgatgcacggcctgggtagcatcgacagtgcgtcgctcgagcacagcaccggctccaactccgtcgtctacaacggcggggtcggcgacagcaacggcgccagcgccgtcggcggcagtggcggtggctacatgatgccgatgagcgctgccggagcaaccactacatcggcaatggtgagccacgagcaggtgcatgcacgggcctacgacgaagccaagcaggctgctcagatggggtacgagagctacctggtgaacgcggagaacaatggtggcggaaggatgtctgcatgggggactgtcgtgtctgcagccgcggcggcagcagcaagcagcaacgacaacatggccgccgacgtcgggcatggcggcgcgcagctcttcagtgtctggaacgacacttaagcgtacctagtggtacctgacatcttatagtctgcaacctctcgtgtctgaattcctatctttatcaagtgttattgcttccacgactataggacagctttcgtcgaaagcttttgctcatgtgatctcgaaggattcatctagtctgatttttcgtgacttgtatcggttttattggattcatccaacatatatcaataaaaaatgagttgtgtttcctttcttcctagttcagttaaaattatttccctcctgcgcttgtgctgtaattgtctgtgtacctgttgtttgtgactgtgttagttcccttggatatgatttcgtatttgatatgtacatggagatagcttagcttcattattggagtatgaagttagtatgacatagtcactctcctggaaaattgacactgcaaaccatatttttattctgaaccacaaatcctagtcagtccgctggcatatgccgtccgtttgctgaatccagaacgtgggtttggagatgtacggctgagatgcctctatgcgaaggggatttcgtggtgaaacgagatgggagtagagcaacgcccgtggaagatgcttcaaacttccacacttttgagcaacgatcggcagtagtaaggtagacgatttcaagatcaaagcatatgaagataaacaacatcaacaacaaaatttgttggggttctatagagagaaacagagctacatacatacactgttttgtatctaccatctgagatgatgaaaagatgaaaaactaaagaatgccccggcgccaacgccaggacacgccgcgcgcgcgtcacccgagccatctcttgacccagccggcgctgtatatttacacacgttgcagcatcgatcaccacctgttcgatcgcgtcgccgtcaccggcgcgccgcgacttattgaactagtctagggcgcggctaacaacctagcttagattgccttgtctaaacccttaggctaacgcgccactctagaaggccgatctcccccgaacgcgccagatctcccgggttaccgaattcgagctcggtaccctggttcacaaactcaatacaacacacagtggagtagggtattacgctccggcggcccgaaccactctaaatccttgtgtcctcgtgtgctcttccaccattaatgactgtaattgcagggacacgaagagttgtagcgcttttgccaacaagatccgctatatgctagtagagtggaacctgcacagcaacaagcatccaataatctgagaataagaattatgtgtggtgatggttctcatctctgcaactcgccattttcgcgagagaaccaaatccaagttggtgaagatcatgatttgggctcatgggctggcatagtagctattacctttgcaattgtggttcgaatctatccgatattctccttttcagggagagctaatgcttatgcttattgggtattttggtttgacactgcttcacgcccaaaaaaaggcaactatgtctgagttggatatggcccaaaaaaaggcagctatgtctgagttggatatggaagtcttctttcgtttagggtgaagtaagaccaagctcatgagcttattatcttaggtcggaacaaattagttgataggcatggcacatttatcaaattataatgattttaacagaaaagcaacacctctttttcagcagcaccagctttgcaagctgcaattgacactccaagcatagtatttgctccaaactcagcctgcatttcgcacaatatcatatctatttccatttggataaaatatattttccagaaatatgggaacagaatcaagatacagaaaaaagttgtggtagtagtggtaagtggaaacacaagtacagtgaaaagatagcattatttctgaacagtcaaattaaccgaaataagtagtatcacatactgcccctaaattgactacacccaatgtaaagaattgcttgagcatattgagccatcagttgtttgtttgtgtaacggatttgacaatgcagagttcaggagcaaaaaaccgcaaaggagagaaagagggaaaggatctcctagtatcccaccttgtggcgcgccctgtcaagtgcatgatggcctggtcgatctgcgtctgctgctgcggttccatcccaacgagtgcctccgacaccttgtcgttgatcacccgcaccgcgtaggcgacccccctggcgaggaacttccgcctctcggaggccccggccgcgtcggcggcggcgccctcgagcgcgcccacgctagccgtagatgctcggtgcacggccttgttggtgtgcaactcgacctcaacggccggtgcgctacgcccgtcaaggatctggcgcgcccgcaccctcgtgatcacggtgggcgcctcccgcctcatgtggccgacgatgaaaagcgccgggttaggggccttggcgcgcaccgccgtattcagggcctcctcgctcttgcgcgagagcaggtgcttccccaggtactcctgcactgacaaggctgccacagcggtggaatttgtcctcacgacttcgccacgtcgtcctcacctccctggcttcccacgactccgccgtatcgaggtgctcggtgggtcgtcttaatccgaagtccgaactaggaagacgagacagagaggtctgaggaatgggcctcgtttgatgttgagctgaattatttttccagcataagcccaggtcttggtccatgaacaaaattactagaaacccagcccagtactacgatctaaaagagggactgccactggatagctctctctagcattctccacgctccaatacagcggcgtcgtgtctatccgggtctatccgcgaacacgtgagaactctccagaaactgctttctcctccacttcatctctctcgctttccctctataaaaagaccccttctaggaattgagggagacagcaagcaccaagcagcgatccgaagctcaatcaattcactcaaacctcttccccaaatcttcgattagatcttcgttgacaagaagactagaaccgaacctgacatgtccaacctgctcacggttcaccagaaccttccggctcttccagtggacgcgacgtccgatgaagtcaggaagaacctcatggacatgttccgcgacaggcaagcgttcagcgagcacacctggaagatgctgctctccgtctgccgctcctgggctgcatggtgcaagctgaacaacaggaagtggttccccgctgagcccgaggacgtgagggattaccttctgtacctgcaagcgcgaggtttgtttctgcttctacctttgatatatatataataattatcattaattagtagtaatataatatttcaaatatttttttcaaaataaaagaatgtagtatatagcaattgcttttctgtagtttataagtgtgtatattttaatttataacttttctaatatatgaccaaaacatggtgatgcctaggtctggcagtgaagaccatccagcaacaccttggacaactgaacatgcttcacaggcgctccggcctcccgcgccccagcgactcgaacgccgtgagcctcgtcatgcgccgcatcaggaaggaaaacgtcgatgccggcgaaagggcaaagcaggccctcgcgttcgagaggaccgatttcgaccaggtccgcagcctgatggagaacagcgacaggtgccaggacattaggaacctggcgttcctcggaattgcatacaacacgctcctcaggatcgcggaaattgcccgcattcgcgtgaaggacattagccgcaccgacggcggcaggatgcttatccacattggcaggaccaagacgctcgtttccaccgcaggcgtcgaaaaggccctcagcctcggagtgaccaagctcgtcgaacgctggatctccgtgtccggcgtcgcggacgacccaaacaactacctcttctgccgcgtccgcaagaacggggtggctgcccctagcgccaccagccaactcagcacgagggccttggaaggtattttcgaggccacccaccgcctgatctacggcgcgaaggatgacagcggtcaacgctacctcgcatggtccgggcactccgcccgcgttggagctgctagggacatggcccgcgccggtgtttccatccccgaaatcatgcaggcgggtggatggacgaacgtgaacattgtcatgaactacattcgcaaccttgacagcgagacgggcgcaatggttcgcctcctggaagatggtgactgaggtacccaacctagacttgtccatcttctggattggccaacttaattaatgtatgaaataaaaggatgcacacatagtgacatgctaatcactataatgtgggcatcaaagttgtgtgttatgtgtaattactagttatctgaataaaagagaaagagatcatccatatttcttatcctaaatgaatgtcacgtgtctttataattctttgatgaaccagatgcatttcattaaccaaatccatatacatataaatattaatcatatataattaatatcaattgggttagcaaaacaaatctagtctaggtgtgttttgcgatccgatatcgatgacgtctaaaaacggcccctaactaacgcttagttgcccgctagattagtcccccgttagtgcctagttagacacacgacgaactaggggctagccgtgcgcacgataacttcgtatagcatacattatacgaagttataacagcggaccgggttaccgaattcctgcccttaaggccaattgttcaagattcattcaacaattgaaacatctcccatgattaaatcagtataaggttgctatggtcttgcttgacaaagtttttttttgagggaatttcaactaaatttttgagtgaaactatcaaatactgattttaaaaaatttttataaaaggaagcgcagagataaaaggccatctatgctacaaaagtacccaaaaatgtaatcctaaagtatgaattgcattttttttttgtttggacgaaaggaaaggagtattaccacaagaatgatatcatcttcatatttagatcttttttgggtaaagcttgagattctctaaatatagagaaatcagaagaaaaaaaaaccgtgttttggtggttttgatttctagcctccacaataactttgacggcgtcgacaagtctaacggacaccaagcagcgaaccaccagcgccgagccaagcgaagcagacggccgagacgttgacaccttcggcgcggcatctctcgagagttccgctccggcgctccacctccaccgctggcggtttcttattccgttccgttccgcctcctgctctgctcctctccacaccacacggcacgaaaccgttacggcaccggcagcacccagcacgggagaggggattcctttcccaccgttccttccctttccgccccgccgctataaatagccagccccatccccagcttttttccccaatctcatctcctctctcctgttgttcggagcacacgcacaatccgatcgatccccaaatccccttcgtctctcctcgcgagcctcgtggatcccagcttcaaggtacggcgatcgatcatcccccctccttctctctaccttcttttctctagactacatcggatggcgatccatggttagggcctgctagtttcccttcctgttttgtcgatggctgcgaggcacaatagatctgatggcgttatgacggctaacttgtcatgttgttgcgatttatagtccctttaggagatcagtttaatttctcggatggttcgagatcggtggtccatggttagtaccctaagatccgcgctgttagggttcgtagatggaggcgacctgttctgattgttaacttgtcagtacctgggaaatcctgggatggttctagctcgtccgcagatgagatcgatttcatgatcctctgtatcttgtttcgttgcctaggttccgtctaatctatccgtggtatgatgtagatgttttgatcgtgctaactacgtcttgtaaagttaattgtcaggtcataatttttagcatgcctttttttttgtttggttttgtctaattgggctgtcgttctagatcagagtagaagactgttccaaactacctgctggatttattgaacttggatctgtatgtgtgtcacatatcttcataaattcatgattaagatggattgaaatatcttttatctttttggtatggatagttctatatgttggtgtggctttgttagatgtatacatgcttagatacatgaagcaacgtgctgctactgtttagtaattgctgttcatttgtctaataaacagataaggatatgtatttatgttgctgttggttttgctggtactttgttggatacaaatgcttcaatacagaaaacagcatgctgctacgatttaccatttatctaatcttatcatatgtctaatctaataaacaaacatgcttttaaattatcttcatatgcttggatgatggcatacacagcggctatgtgtggttttttaaatacccagcatcatgggcatgcatgacactgctttaatatgctttttatttgcttgagactgtttcttttgtttatactgaccctttagttcggtgactcttctgcaggtcgactttaacttagcctaggatccatggcccagtccaagcacggcctgaccaaggagatgaccatgaagtaccgcatggagggctgcgtggacggccacaagttcgtgatcaccggcgagggcatcggctaccccttcaagggcaagcaggccatcaacctgtgcgtggtggagggcggccccttgcccttcgccgaggacatcttgtccgccgccttcatgtacggcaaccgcgtgttcaccgagtacccccaggacatcgtcgactacttcaagaactcctgccccgccggctacacctgggaccgctccttcctgttcgaggacggcgccgtgtgcatctgcaacgccgacatcaccgtgagcgtggaggagaactgcatgtaccacgagtccaagttctacggcgtgaacttccccgccgacggccccgtgatgaagaagatgaccgacaactgggagccctcctgcgagaagatcatccccgtgcccaagcagggcatcttgaagggcgacgtgagcatgtacctgctgctgaaggacggtggccgcttgcgctgccagttcgacaccgtgtacaaggccaagtccgtgccccgcaagatgcccgactggcacttcatccagcacaagctgacccgcgaggaccgcagcgacgccaagaaccagaagtggcacctgaccgagcacgccatcgcctccggctccgccttgccctccggactcagatctcgatagggtaccaatggccagttaacagatccagctgctgctgttctagggttcacaagtctgcctatttgtcttccccaatggagctatggttgtctggtctggtccttggtcgtgtcccgtttcattgtgtactatttacctgtaatgtgtatccttaagtctggtttgatggtgtctgaaacgttttgctgtggtagagcagcatggaagaactataatgaataagtgatccctaatcattgtgtccaaattttgcttctgctatacccttttgtgctgtttcttatgttttgcttaaaaatttgatctgacaaacaaatttgtctaaattatgctcttgttctgactgtgtactgtacacatttgtattgctaccggtttggcacatagttttctctttgattgcagatcaaacccttctgattgcagattgcttggctatggctgatgtgctcactgttcttctttagcttgtatattgctgatggtggcttggctacggctgaaaaagttgctgctgcgccgacttggcaactgttgctccagtaatgctttgtcctctcttcctagccgccgacttggcacttggcagctgttgctcctgtaatgcgttgttatctcttatctcttgagatgtactatgattttgaggctgtttgacttgtgccagattgccagtgctgatgctatattatctcaggtttttatgctagtatatgttttactgtgtgctgcctgtgtcgagttacgtaatctattgaaccgctatgcgtgttgatgccctgttgttgcttgccagattgatgcccctgttgcttgcagcttgcaagctgtagtgaaatcctaaaattcgaaaccaaatctattctgaacttttgaagatctgtgatgtccggaagaaaagattcaaacagataaacgggactctccagaatctataaaataaatgatcgacaaacgctttgctttggtaggcttcctagttagttagcggaccgaagcttcggtccgggcctagaaggccagcttcggccgcccctcggtaccctgggatctgcccttactttaacgcctctaaccaacacccctttatctttataaggaacaataaacagaatttgccccactgttctaaatcacctaataatatccccagctaaaaacaataaaggtttcctagaattaagacaagcatgactgttcctccaggagggtttggaacattgttgcagtcttgcagatacgggcgaagggtgagaaacagagcggagggctggaggtgacctcggtagtcgacgccggagttgagcttgacaacgacggggcggcccctgatggacttgaggaagtccgatggcgtcttcaccgtcccgccggcgcccgaggcgggcctgtcgctgccgccgccgccgctgctcatcttgcgcgctgtgcccccggcggtgtccctgtgttgcggatcgcgggtgggccaggtggatgcgagggcgacccgtttggactccggccggagccgccggatccctggtcggtgtcagtgccgtttactctgggccccacgtgtcagtaccgtctgtagatgacaacaacccgtcgtccacagtcatgtccaaaatatcctttcttcttttttttcgattcggatatctatcttccttttttttttccaaaaatcttcttgacgcaccagcgcgcacgtttgtggtaaacgccgacacgtcggtcccacgtcgatagaccccacccaccagtgagtagcgtgtacgtattcgggggtgacggacgtgtcgccgtcgtcttgctagtcccattcccatctgagccacacatctctgaacaaaaaaaaggagggaggcctccacgcacatccccctccgtgccacccgccccaaaccctcgcgccgcctccgagacagccgccgcaaccatggccaccgccgccgccgcgtctaccgcgctcactggcgccactaccgctgcgcccaaggcgaggcgccgggcgcacctcctggccacccgccgcgccctcgccgcgcccatcaggtgctcagcggcgtcacccgccatgccgatggctcccccggccaccccgctccggccgtggggccccaccgagccccgcaagggtgctgacatcctcgtcgagtccctcgagcgctgcggcgtccgcgacgtcttcgcctaccccggcggcgcgtccatggagatccaccaggcactcacccgctcccccgtcatcgccaaccacctcttccgccacgagcaaggggaggcctttgccgcctccggctacgcgcgctcctcgggccgcgtcggcgtctgcatcgccacctccggccccggcgccaccaacctagtctccgcgctcgccgacgcgctgctcgattccgtccccatggtcgccatcacgggacaggtggcgcgacgcatgattggcaccgacgccttccaggagacgcccatcgtcgaggtcacccgctccatcaccaagcacaactacctggtcctcgacgtcgacgacatcccccgcgtcgtgcaggaggctttcttcctcgcctcctctggtcgaccagggccggtgcttgtcgacatccccaaggacatccagcagcagatggcggtgcctgtctgggacaagcccatgagtctgcctgggtacattgcgcgccttcccaagccccctgcgactgagttgcttgagcaggtgctgcgtcttgttggtgaatcgcggcgccctgttctttatgtgggcggtggctgcgcagcatctggtgaggagttgcgacgctttgtggagctgactggaatcccggtcacaactactcttatgggcctcggcaacttccccagcgacgacccactgtctctgcgcatgctaggtatgcatgggacggtgtatgcaaattatgcagtggataaggccgatctgttgcttgcacttggtgtgcggtttgatgatcgcgtgacagggaagattgaggcttttgcaagcagggctaagattgtgcacgttgatattgatccggctgagattggcaagaacaagcagccacatgtgtccatctgtgcagatgttaagcttgctttgcagggcatgaatgctcttcttgaaggaagcacatcaaagaagagctttgactttggctcatggaacgatgagttggatcagcagaagagggaattcccccttgggtataaaacatctaatgaggagatccagccacaatatgctattcaggttcttgatgagctgacgaaaggcgaggccatcatcggcacaggtgttgggcagcaccagatgtgggcggcacagtactacacttacaagcggccaaggcagtggttgtcttcagctggtcttggggctatgggatttggtttgccggctgctgctggtgcttctgtggcaaacccaggtgtcactgttgttgacatcgatggagatggtagctttctcatgaacgttcaggagctagctatgatccgaattgagaacctcccagtgaaggtctttgtgctaaacaaccagcacctggggatggtggtgcagttggaggacaggttctataaggccaacagagcgcacacatacttgggaaacccagagaatgaaagtgagatatatccagatttcgtgacgatcgccaaagggttcaacattccagccgtccgtgtgacaaagaagaacgaagtccgcgcagcgataaagaagatgctcgagactccagggccgtacctcttggatataatcgtcccacaccaggagcatgtgttgcctatgatccctagtggtggggctttcaaggatatgatcctggatggtgatggcaggactgtgtactgacttcgaataggtacccggggatcctctagtgccgtgggtcgtttaagctgccgctgtacctgtgtcgtctggtgccttctggtgtacctgggaggttgtcgtctatcaagtatctgtggttggtgtcatgagtcagtgagtcccaatactgttcgtgtcctgtgtgcattatacccaaaactgttatgggcaaatcatgaataagcttgatgttcgaacttaaaagtctctgctcaatatggtattatggttgtttttgttcgtctcctaatatttgcctgggatcaaattttattggctggtgttcatttgacctccatgttcttgctaggctccattttttactctacagccataatatgtttgattgtttggtttgttctttgttgtacacctggttctgtcgagcttagttttcgacactggcttacagcttaacatgttgctattttattgggttctgattgctattttattgggttctgattgctagtttttgctgaatccaaaaaccatgttatttatttaagcgatccaggttattattatgatggtggctaagtttttttttttccaagggtaaattttctggattctccagtgtttctgtggccgaattcaatcactagagtcgacctgcaaagcttcggtccgggcctagaaggcccgcgccacttacgcttgattccgatgacttcgtaggttcctagctcaagccgctcgtgtccaagcgtcacttacgattagctaatgattacggcatctaggaccgactagttcttatgtgcttctagtctccaaatgtggttgatagttattttgctctaagatcaacagtaatgaagtataaatcatcgttgtggtgtgctactcggttaattgagcattaacacacacaaacatgacgaggatggtataatctccaaaaatgtgtactttgttaggtgggaccctatagccttgattaatgtgctatgttaggcatgcctggaaacgtgtgacgcatatgttttgtgaacctgttgatattatatgtgcttttatattaccatattttattaaaatactaatatttattactagtaagatataacattctatctagcttaaaaactaaccataaatattccataataactagatttaccaaactaatatactaaatatacataataaatacaaaattaacaagacaataatcaatatttatgagcttaatatatttagacattatggttggtcgacgataatcatgctaacttttcgtaattgcttgattgaaatatgcttagaataatgcctctttgttctacatggcaaatagggaccattatggtgtaacaccctgggaaccacaaacaccccgaaatgctactaaactacacaactaaccttcatatataaaatttcgacagcatctcctttgaaaatttgcatagacgtggaagcaacagagtataaacagatctgcgtttaaacgtgcaagcgctactagacaattcagtacattaaaaacgtccgcaatgtgttattaagttgtctaagcgtcaatttgtttacaccacaatatatcctgcca

SEQ ID NO: 71 - DNA, 25839 bp, synthetic construct
  misc_feature 1..25839: note = PHP96716
  source 1..25839: mol_type = other DNA
gtttacccgccaatatatcctgtcaaacactgatagtttaaactgaaggcgggaaacgacaatctgatcatgagcggagaattaagggagtcacgttatgacccccgccgatgacgcgggacaagccgttttacgtttggaactgacagaaccgcaacgttgaaggagccactcagcaagctggtacgattgtaatacgactcactatagggcgaattgagcgctgtttaaacgctcttcaactggaagagcggttacgctgtttaaacgctcttcaactggaagagcggttactaccggttcactagctagctgctaatcgagctagttaccctatgaggtgacatgaagcgctcacggttactatgacggttagcttcacgactgttggtggcagtagcgtacgacttagctatagttccggacttacccttaagcgatttaaatctgcggttaccgaattcgagctcggtacctagtacccttgtacttttggtttcacctgcatagagaaaacccacaagaatatgacagtctgatttgtcagtctcattctcaagcaacatttctctatccgttactttcatggtgaataacacaatccatcatcaatactttgtgttactcagaaactgaaagttattccgagtcttgcatatctttggacctactcgtttttctaccattattgctgattgttaagctctcgctacttgaatcggcattgttggagtgggaaggttcaaaaaattggagttatgactagttgtctctttctatgtacgatggagaaaatgaataaacaactgagaaaatggctcttgtttagttgatgatgctcttaagctttccactggttgccatatatgatttgggcatttcactttgatcttaatgggccttgtaaagcccaagactcatgattatctttagttgatgctcttaattaggtgtgggcaaataattcaaactgtatgtacccgaccaaaaccaaagcaaaaataatcgaaccaaaccgaaaatttaaaaataaccgaatgaaaactaaatcctataactgaaagaactgaaaccgaatcaaaatatttaatgtaaccaaaaatatccgaaatataattatattgtcaaaaatattaataatttctagattaaataattaaaaatacttaaaaatttatataaaatagtaaaaatactcgaaaataaccacaaatattcaaaaacaaccgaaatatcccaaaatattcaaagcaaaataaccgaatggataccaaattttaaaaccgaaaaaactggaacaaaaccaaaatcgaaccaaaatttcaaaaatcgaataaatactaaactttagaacaaaaaaaaacgataaccgaatgtatacgaaccaaagccgaattagataaccgaacgtccaggactactcttaatctttccgccacttatgatttgggctattactttgtttataatgagccttttcaagctcaagttcatgattgtccgtgagatgagaaactgacttgttggattcgaaaccctagctagtattggttaatacttaatacataaatgacctgcattgacatcatcatccaagaaaataaaaattgtatgcttgagatatttagttttcctagctaggttttctttattttagtaccgaatctttaggtgtgccacgttaatttagacccattttttcatacttaccaactgagtctagtttaatcatgactataatcgtataaaatgattcagtcgacgtcattgcgaacgtatataaaatcatccaaattgacgtcattccaaagaggtaagcatgcttatctaagagtccgagcatactaaacaagacgacattttatttgcactccaaatcaaattttgtattgcctaaagaaaaacaatcaaactcaagtttcttaaaattaatttcattcaaactaatcactttcaatatctcacatattattcatgccatttctatttgtctaaacatgatttaaaaaaaaaagtaaaatacaaagattactatgcaaaaactctataaaaaaaaattcaaatttcttatttatttgtgacatcaaattttcaaaataatttttttaattatcggttgatccggtcagtcgataaaaacataaactttcagcgaccgttaaaactttcctactaccgatttagagaaaatcttagcttgaaacgtaattgtaacctgccttcatgcaagtcgcaagatatgtcatcctaagttgtatatgttttctcaaaagatgtatttacttgagaaaatacgtttcaacgttgatggacaaccaattaagaatcaagcacctttcgtaatcaatttaggcttatcgtctaaggtatactgatttacgacagttgactagacttataaggaacaaaataatagaatagtttctaaacacttcacctaatcatagagactaagatggtaattcgtaaacgacaaagcctagtgacactgtccattgtaaaattccacatcatattagtattaaacatatacatgtagtttcctgaacacatgtagtatcaaacacacttcgtggcttcttcctcgaaacctgcggccgcgctatagttccggacttacccttaagataacttcgtatagcatacattatacgaagttatgggcccacgcgtgaagagcggttaccagagctggtcacctttgtccaccaagatggaactgtcttcggccagaatggccatctggattcagcaggcctagaaggccatttatcgctatcaactttgtatagaaaagttgggccgagctcggtacggccagaatggcccggaccgggttaccaagcggccgcacactgatagtttaaactgaaggcgggaaacgacaatctgatcatgagcggagaattaagggagtcacgttatgacccccgccgatgacgcgggacaagccgttttacgtttggaactgacagaaccgcaacgattgaaggagccactcagccgcgggtttctggagtttaatgagctaagcacatacgtcagaaaccattattgcgcgttcaaaagtcgcctaaggtcactatcagctagcaaatatttcttgtcaaaaatgctccactgacgttccataaattcccctcggtatccaattagagtctcatattcactcccatggcggccaatgcgggcggcggtggagcgggaggaggcagcggcagcggcagcgtggctgcgccggcggtgtgccgccccagcggctcgcggtggacgccgacgccggagcagatcaggatgctgaaggagctctactacggctgcggcatccggtcgcccagctcggagcagatccagcgcatcaccgccatgctgcggcagcacggcaagatcgagggcaagaacgtcttctactggttccagaaccacaaggcccgcgagcgccagaagcgccgcctcaccagcctcgacgtcaacgtgcccgccgccggcgcggccgacgccaccaccagccaactcggcgtcctctcgctgtcgtcgccgccgccttcaggcgcggcgcctccctcgcccaccctcggcttctacgccgccggcaatggcggcggatcggctgtgctgctggacacgagttccgactggggcagcagcggcgctgctatggccaccgagacatgcttcctgcaggactacatgggcgtgacggacacgggcagctcgtcgcagtggccacgcttctcgtcgtcggacacgataatggcggcggccgcggcgcgggcggcgacgacgcgggcgcccgagacgctccctctcttcccgacctgcggcgacgacggcggcagcggtagcagcagctacttgccgttctggggtgccgcgtccacaactgccggcgccacttcttccgttgcgatccaacagcaacaccagctgcaggagcagtacagcttttacagcaacagcaacagcacccagctggccggcaccggcaaccaagacgtatcggcaacagcagcagcagccgccgccctggagctgagcctcagctcatggtgctccccttaccctgctgcagggagtatgtgagagcaacgcgagctgccactgctcttcactgatgtctctggaatggaaggaggaggaagtgagaacagatcattcgacaaagcagcattagtccgttgatcggtggaagaccactcgtcagtgttgagttgaatgtttgatcaataaaatacggcaatgctgtaagggttgttttttatgccattgataatacactgtactgttcagttgttgaactctatttcttagccatgccaagtgcttttcttattttgaataacattacagcaaaaagttgaaagacaaaaaaaaaaacccccgaacagagtgctttgggtcccaagcttctttagactgtgttcggcgttccccctaaatttctccccctatatctcactcacttgtcacatcagcgttctctttccccctatatctccacgctctacagcagttccacctatatcaaacctctataccccaccacaacaatattatatactttcatcttcaactaactcatgtaccttccaatttttttctactaataattatttacgtgcacagaaacttagcaaggagagagagagcgggaatttaaatgctcggcgttaggcttttagtccgctaggtggctagaccgaggttaggacgctagttcactaggggcctagtggtgttttaagacgtcacggtcaccacgcgtggaccgaagcttgcatgcctgcagtgcagcgtgacccggtcgtgcccctctctagagataatgagcattgcatgtctaagttataaaaaattaccacatattttttttgtcacacttgtttgaagtgcagtttatctatctttatacatatatttaaactttactctacgaataatataatctatagtactacaataatatcagtgttttagagaatcatataaatgaacagttagacatggtctaaaggacaattgagtattttgacaacaggactctacagttttatctttttagtgtgcatgtgttctcctttttttttgcaaatagcttcacctatataatacttcatccattttattagtacatccatttagggtttagggttaatggtttttatagactaatttttttagtacatctattttattctattttagcctctaaattaagaaaactaaaactctattttagtttttttatttaataatttagatataaaatagaataaaataaagtgactaaaaattaaacaaataccctttaagaaattaaaaaaactaaggaaacatttttcttgtttcgagtagataatgccagcctgttaaacgccgtcgacgagtctaacggacaccaaccagcgaaccagcagcgtcgcgtcgggccaagcgaagcagacggcacggcatctctgtcgctgcctctggacccctctcgagagttccgctccaccgttggacttgctccgctgtcggcatccagaaattgcgtggcggagcggcagacgtgagccggcacggcaggcggcctcctcctcctctcacggcaccggcagctacgggggattcctttcccaccgctccttcgctttcccttcctcgcccgccgtaataaatagacaccccctccacaccctctttccccaacctcgtgttgttcggagcgcacacacacacaaccagatctcccccaaatccacccgtcggcacctccgcttcaaggtacgccgctcgtcctcccccccccccctctctaccttctctagatcggcgttccggtccatgcatggttagggcccggtagttctacttctgttcatgtttgtgttagatccgtgtttgtgttagatccgtgctgctagcgttcgtacacggatgcgacctgtacgtcagacacgttctgattgctaacttgccagtgtttctctttggggaatcctgggatggctctagccgttccgcagacgggatcgatttcatgattttttttgtttcgttgcatagggtttggtttgcccttttcctttatttcaatatatgccgtgcacttgtttgtcgggtcatcttttcatgcttttttttgtcttggttgtgatgatgtggtctggttgggcggtcgttctagatcggagtagaattctgtttcaaactacctggtggatttattaattttggatctgtatgtgtgtgccatacatattcatagttacgaattgaagatgatggatggaaatatcgatctaggataggtatacatgttgatgcgggttttactgatgcatatacagagatgctttttgttcgcttggttgtgatgatgtggtgtggttgggcggtcgttcattcgttctagatcggagtagaatactgtttcaaactacctggtgtatttattaattttggaactgtatgtgtgtgtcatacatcttcatagttacgagtttaagatggatggaaatatcgatctaggataggtatacatgttgatgtgggttttactgatgcatatacatgatggcatatgcagcatctattcatatgctctaaccttgagtacctatctattataataaacaagtatgttttataattattttgatcttgatatacttggatgatggcatatgcagcagctatatgtggatttttttagcactgccttcatacgctatttatttgcttggtactgtttcttttgtcgatgctcaccctgttgtttggtgttacttctgcaggtcgactttaacttagcctaggatccatggccactgtgaacaactggctcgctttctccctctccccgcaggagctgccgccctcccagacgacggactccacactcatctcggccgccaccgccgaccatgtctccggcgatgtctgcttcaacatcccccaagattggagcatgaggggatcagagctttcggcgctcgtcgcggagccgaagctggaggacttcctcggcggcatctccttctccgagcagcatcacaaggccaactgcaacatgatacccagcactagcagcacagtttgctacgcgagctcaggtgctagcaccggctaccatcaccagctgtaccaccagcccaccagctcagcgctccacttcgcggactccgtaatggtggcttcctcggccggtgtccacgacggcggtgccatgctcagcgcggccgccgctaacggtgtcgctggcgctgccagtgccaacggcggcggcatcgggctgtccatgattaagaactggctgcggagccaaccggcgcccatgcagccgagggtggcggcggctgagggcgcgcaggggctctctttgtccatgaacatggcggggacgacccaaggcgctgctggcatgccacttctcgctggagagcgcgcacgggcgcccgagagtgtatcgacgtcagcacagggtggagccgtcgtcgtcacggcgccgaaggaggatagcggtggcagcggtgttgccggcgctctagtagccgtgagcacggacacgggtggcagcggcggcgcgtcggctgacaacacggcaaggaagacggtggacacgttcgggcagcgcacgtcgatttaccgtggcgtgacaaggcatagatggactgggagatatgaggcacatctttgggataacagttgcagaagggaagggcaaactcgtaagggtcgtcaagtctatttaggtggctatgataaagaggagaaagctgctagggcttatgatcttgctgctctgaagtactggggtgccacaacaacaacaaattttccagtgagtaactacgaaaaggagctcgaggacatgaagcacatgacaaggcaggagtttgtagcgtctctgagaaggaagagcagtggtttctccagaggtgcatccatttacaggggagtgactaggcatcaccaacatggaagatggcaagcacggattggacgagttgcagggaacaaggatctttacttgggcaccttcagcacccaggaggaggcagcggaggcgtacgacatcgcggcgatcaagttccgcggcctcaacgccgtcaccaacttcgacatgagccgctacgacgtgaagagcatcctggacagcagcgccctccccatcggcagcgccgccaagcgcctcaaggaggccgaggccgcagcgtccgcgcagcaccaccacgccggcgtggtgagctacgacgtcggccgcatcgcctcgcagctcggcgacggcggagccctggcggcggcgtacggcgcgcactaccacggcgccgcctggccgaccatcgcgttccagccgggcgccgccagcacaggcctgtaccacccgtacgcgcagcagccaatgcgcggcggcgggtggtgcaagcaggagcaggaccacgcggtgatcgcggccgcgcacagcctgcaggacctccaccacctgaacctgggcgcggccggcgcgcacgactttttctcggcagggcagcaggccgccgccgctgcgatgcacggcctgggtagcatcgacagtgcgtcgctcgagcacagcaccggctccaactccgtcgtctacaacggcggggtcggcgacagcaacggcgccagcgccgtcggcggcagtggcggtggctacatgatgccgatgagcgctgccggagcaaccactacatcggcaatggtgagccacgagcaggtgcatgcacgggcctacgacgaagccaagcaggctgctcagatggggtacgagagctacctggtgaacgcggagaacaatggtggcggaaggatgtctgcatgggggactgtcgtgtctgcagccgcggcggcagcagcaagcagcaacgacaacatggccgccgacgtcgggcatggcggcgcgcagctcttcagtgtctggaacgacacttaagcgtacctagtggtacctgacatcttatagtctgcaacctctcgtgtctgaattcctatctttatcaagtgttattgcttccacgactataggacagctttcgtcgaaagcttttgctcatgtgatctcgaaggattcatctagtctgatttttcgtgacttgtatcggttttattggattcatccaacatatatcaataaaaaatgagttgtgtttcctttcttcctagttcagttaaaattatttccctcctgcgcttgtgctgtaattgtctgtgtacctgttgtttgtgactgtgttagttcccttggatatgatttcgtatttgatatgtacatggagatagcttagcttcattattggagtatgaagttagtatgacatagtcactctcctggaaaattgacactgcaaaccatatttttattctgaaccacaaatcctagtcagtccgctggcatatgccgtccgtttgctgaatccagaacgtgggtttggagatgtacggctgagatgcctctatgcgaaggggatttcgtggtgaaacgagatgggagtagagcaacgcccgtggaagatgcttcaaacttccacacttttgagcaacgatcggcagtagtaaggtagacgatttcaagatcaaagcatatgaagataaacaacatcaacaacaaaatttgttggggttctatagagagaaacagagctacatacatacactgttttgtatctaccatctgagatgatgaaaagatgaaaaactaaagaatgccccggcgccaacgccaggacacgccgcgcgcgcgtcacccgagccatctcttgacccagccggcgctgtatatttacacacgttgcagcatcgatcaccacctgttcgatcgcgtcgccgtcaccggcgcgccgcgacttattgaactagtctagggcgcggctaacaacctagcttagattgccttgtctaaacccttaggctaacgcgccacggtaacccggtccgggcctagaaggccccagagctggtcaccccatacgattggaagcttcaagtttgtacaaaaaagcaggctccggccagaatggcccggaccgggttaccgaattcgagctcggtaccctgggatccgatatcgatgggccctggccgaagcttgcatgcctgcagtgcagcgtgacccggtcgtgcccctctctagagataatgagcattgcatgtctaagttataaaaaattaccacatattttttttgtcacacttgtttgaagtgcagtttatctatctttatacatatatttaaactttactctacgaataatataatctatagtactacaataatatcagtgttttagagaatcatataaatgaacagttagacatggtctaaaggacaattgagtattttgacaacaggactctacagttttatctttttagtgtgcatgtgttctcctttttttttgcaaatagcttcacctatataatacttcatccattttattagtacatccatttagggtttagggttaatggtttttatagactaatttttttagtacatctattttattctattttagcctctaaattaagaaaactaaaactctattttagtttttttatttaataatttagatataaaatagaataaaataaagtgactaaaaattaaacaaataccctttaagaaattaaaaaaactaaggaaacatttttcttgtttcgagtagataatgccagcctgttaaacgccgtcgacgagtctaacggacaccaaccagcgaaccagcagcgtcgcgtcgggccaagcgaagcagacggcacggcatctctgtcgctgcctctggacccctctcgagagttccgctccaccgttggacttgctccgctgtcggcatccagaaattgcgtggcggagcggcagacgtgagccggcacggcaggcggcctcctcctcctctcacggcaccggcagctacgggggattcctttcccaccgctccttcgctttcccttcctcgcccgccgtaataaatagacaccccctccacaccctctttccccaacctcgtgttgttcggagcgcacacacacacaaccagatctcccccaaatccacccgtcggcacctccgcttcaaggtacgccgctcgtcctccccccccccccctctctaccttctctagatcggcgttccggtccatggttagggcccggtagttctacttctgttcatgtttgtgttagatccgtgtttgtgttagatccgtgctgctagcgttcgtacacggatgcgacctgtacgtcagacacgttctgattgctaacttgccagtgtttctctttggggaatcctgggatggctctagccgttccgcagacgggatcgatttcatgattttttttgtttcgttgcatagggtttggtttgcccttttcctttatttcaatatatgccgtgcacttgtttgtcgggtcatcttttcatgcttttttttgtcttggttgtgatgatgtggtctggttgggcggtcgttctagatcggagtagaattctgtttcaaactacctggtggatttattaattttggatctgtatgtgtgtgccatacatattcatagttacgaattgaagatgatggatggaaatatcgatctaggataggtatacatgttgatgcgggttttactgatgcatatacagagatgctttttgttcgcttggttgtgatgatgtggtgtggttgggcggtcgttcattcgttctagatcggagtagaatactgtttcaaactacctggtgtatttattaattttggaactgtatgtgtgtgtcatacatcttcatagttacgagtttaagatggatggaaatatcgatctaggataggtatacatgttgatgtgggttttactgatgcatatacatgatggcatatgcagcatctattcatatgctctaaccttgagtacctatctattataataaacaagtatgttttataattattttgatcttgatatacttggatgatggcatatgcagcagctatatgtggatttttttagccctgccttcatacgctatttatttgcttggtactgtttcttttgtcgatgctcaccctgttgtttggtgttacttctgcaggtcgactctagaggatccatggaggagatcacccaacactttggagttggcgcaagcagccacggccatggccacggccagcaccaccatcatcaccaccaccaccacccgtgggcatcctccctcagcgccgtcgtagcgccgctgccgccgcaaccgccaagcgcaggcctgccgctgaccctgaacacggtggcggccactgggaacagcggcggtagcggcaacccggtgctgcagcttgccaacggtggcggcctcctcgacgcatgcgtcaaggcgaaggagccctcgtcgtcgtctccctacgcaggcgacgtcgaggccatcaaggccaagatcatctcgcacccacactactactcgctcctcactgcctacctcgagtgcaacaaggtgggggcaccaccggaggtgtcggcgaggctgacggagatagcgcaggaggtggaggcgcggcagcgcacggcgctcggcggcctggccgctgcgacggagccggagctggaccagttcatggaggcgtaccacgagatgctggtgaagttcagggaggagctgacgaggccgctgcaggaggcgatggagttcatgcgaagggtggagtcgcagctgaactcgctttccatctccggaaggtcgctgcgcaacatcctttcatctggctcttctgaggaggatcaagaaggtagcggaggagagaccgagctccctgaagttgatgcacatggtgtggaccaagagctgaagcaccatctcctgaagaaatacagtggctatctaagctcgctcaagcaagaactgtcaaagaagaagaagaaagggaagctccccaaggaggctcgccagcagctccttagctggtgggatcagcactacaaatggccttacccctcagagactcagaaggtggcactggctgagtctaccgggcttgacctgaagcagatcaacaactggttcatcaaccagcggaagcggcactggaagccatccgaggagatgcaccacctgatgatggacgggtaccacaccaccaatgccttctacatggacggccacttcatcaacgacggcgggctgtaccggctcggctagccaccggtatctcgcttccattgttaacctagacttgtccatcttctggattggccaacttaattaatgtatgaaataaaaggatgcacacatagtgacatgctaatcactataatgtgggcatcaaagttgtgtgttatgtgtaattactagttatctgaataaaagagaaagagatcatccatatttcttatcctaaatgaatgtcacgtgtctttataattctttgatgaaccagatgcatttcattaaccaaatccatatacatataaatattaatcatatataattaatatcaattgggttagcaaaacaaatctagtctaggtgtgttttgcgaattgcaatgatcatcatgacagatctgcgcgcgatcgatgggcacccagctttcttgtacaaagtggccgttaacggatcggccagaatggcccggaccgggttaccgaattcgagctcggtaccctggttcacaaactcaatacaacacacagtggagtagggtattacgctccggcggcccgaaccactctaaatccttgtgtcctcgtgtgctcttccaccattaatgactgtaattgcagggacacgaagagttgtagcgcttttgccaacaagatccgctatatgctagtagagtggaacctgcacagcaacaagcatccaataatctgagaataagaattatgtgtggtgatggttctcatctctgcaactcgccattttcgcgagagaaccaaatccaagttggtgaagatcatgatttgggctcatgggctggcatagtagctattacctttgcaattgtggttcgaatctatccgatattctccttttcagggagagctaatgcttatgcttattgggtattttggtttgacactgcttcacgcccaaaaaaaggcaactatgtctgagttggatatggcccaaaaaaaggcagctatgtctgagttggatatggaagtcttctttcgtttagggtgaagtaagaccaagctcatgagcttattatcttaggtcggaacaaattagttgataggcatggcacatttatcaaattataatgattttaacagaaaagcaacacctctttttcagcagcaccagctttgcaagctgcaattgacactccaagcatagtatttgctccaaactcagcctgcatttcgcacaatatcatatctatttccatttggataaaatatattttccagaaatatgggaacagaatcaagatacagaaaaaagttgtggtagtagtggtaagtggaaacacaagtacagtgaaaagatagcattatttctgaacagtcaaattaaccgaaataagtagtatcacatactgcccctaaattgactacacccaatgtaaagaattgcttgagcatattgagccatcagttgtttgtttgtgtaacggatttgacaatgcagagttcaggagcaaaaaaccgcaaaggagagaaagagggaaaggatctcctagtatcccaccttgtggcgcgccctgtcaagtgcatgatggcctggtcgatctgcgtctgctgctgcggttccatcccaacgagtgcctccgacaccttgtcgttgatcacccgcaccgcgtaggcgacccccctggcgaggaacttccgcctctcggaggccccggccgcgtcggcggcggcgccctcgagcgcgcccacgctagccgtagatgctcggtgcacggccttgttggtgtgcaactcgacctcaacggccggtgcgctacgcccgtcaaggatctggcgcgcccgcaccctcgtgatcacggtgggcgcctcccgcctcatgtggccgacgatgaaaagcgccgggttaggggccttggcgcgcaccgccgtattcagggcctcctcgctcttgcgcgagagcaggtgcttccccaggtactcctgcactgacaaggctgccacagcggtggaatttgtcctcacgacttcgccacgtcgtcctcacctccctggcttcccacgactccgccgtatcgaggtgctcggtgggtcgtcttaatccgaagtccgaactaggaagacgagacagagaggtctgaggaatgggcctcgtttgatgttgagctgaattatttttccagcataagcccaggtcttggtccatgaacaaaattactagaaacccagcccagtactacgatctaaaagagggactgccactggatagctctctctagcattctccacgctccaatacagcggcgtcgtgtctatccgggtctatccgcgaacacgtgagaactctccagaaactgctttctcctccacttcatctctctcgctttccctctataaaaagaccccttctaggaattgagggagacagcaagcaccaagcagcgatccgaagctcaatcaattcactcaaacctcttccccaaatcttcgattagatcttcgttgacaagaagactagaaccgaacctgacatgtccaacctgctcacggttcaccagaaccttccggctcttccagtggacgcgacgtccgatgaagtcaggaagaacctcatggacatgttccgcgacaggcaagcgttcagcgagcacacctggaagatgctgctctccgtctgccgctcctgggctgcatggtgcaagctgaacaacaggaagtggttccccgctgagcccgaggacgtgagggattaccttctgtacctgcaagcgcgaggtttgtttctgcttctacctttgatatatatataataattatcattaattagtagtaatataatatttcaaatatttttttcaaaataaaagaatgtagtatatagcaattgcttttctgtagtttataagtgtgtatattttaatttataacttttctaatatatgaccaaaacatggtgatgcctaggtctggcagtgaagaccatccagcaacaccttggacaactgaacatgcttcacaggcgctccggcctcccgcgccccagcgactcgaacgccgtgagcctcgtcatgcgccgcatcaggaaggaaaacgtcgatgccggcgaaagggcaaagcaggccctcgcgttcgagaggaccgatttcgaccaggtccgcagcctgatggagaacagcgacaggtgccaggacattaggaacctggcgttcctcggaattgcatacaacacgctcctcaggatcgcggaaattgcccgcattcgcgtgaaggacattagccgcaccgacggcggcaggatgcttatccacattggcaggaccaagacgctcgtttccaccgcaggcgtcgaaaaggccctcagcctcggagtgaccaagctcgtcgaacgctggatctccgtgtccggcgtcgcggacgacccaaacaactacctcttctgccgcgtccgcaagaacggggtggctgcccctagcgccaccagccaactcagcacgagggccttggaaggtattttcgaggccacccaccgcctgatctacggcgcgaaggatgacagcggtcaacgctacctcgcatggtccgggcactccgcccgcgttggagctgctagggacatggcccgcgccggtgtttccatccccgaaatcatgcaggcgggtggatggacgaacgtgaacattgtcatgaactacattcgcaaccttgacagcgagacgggcgcaatggttcgcctcctggaagatggtgactgaggtacccaacctagacttgtccatcttctggattggccaacttaattaatgtatgaaataaaaggatgcacacatagtgacatgctaatcactataatgtgggcatcaaagttgtgtgttatgtgtaattactagttatctgaataaaagagaaagagatcatccatatttcttatcctaaatgaatgtcacgtgtctttataattctttgatgaaccagatgcatttcattaaccaaatccatatacatataaatattaatcatatataattaatatcaattgggttagcaaaacaaatctagtctaggtgtgttttgcgatccgatatcgaattggccacggtaccagctgctgctgttctagggttcacaagtctgcctatttgtcttccccaatggagctatggttgtctggtctggtccttggtcgtgtcccgtttcattgtgtactatttacctgtaatgtgtatccttaagtctggtttgatggtgtctgaaacgttttgctgtggtagagcagcatggaagaactataatgaataagtgatccctaatcattgtgtccaaattttgcttctgctatacccttttgtgctgtttcttatgttttgcttaaaaatttgatctgacaaacaaatttgtctaaattatgctcttgttctgactgtgtactgtacacatttgtattgctaccggtttggcacatagttttctctttgattgcagatcaaacccttctgattgcagattgcttggctatggctgatgtgctcactgttcttctttagcttgtatattgctgatggtggcttggctacggctgaaaaagttgctgctgcgccgacttggcaactgttgctccagtaatgctttgtcctctcttcctagccgccgacttggcacttggcagctgttgctcctgtaatgcgttgttatctcttatctcttgagatgtactatgattttgaggctgtttgacttgtgccagattgccagtgctgatgctatattatctcaggtttttatgctagtatatgttttactgtgtgctgcctgtgtcgagttacgtaatctattgaaccgctatgcgtgttgatgccctgttgttgcttgccagattgatgcccctgttgcttgcagcttgcaagctgtagtgaaatcctaaaattccaaaccaaatctattctgaacttttgaagatctgtgatgtccggaagaaaagattcaaacagataaacgggactctccagaatctataaaataaatgatcgacaaacgctttgctttggtaggcttcaagcttggtcacccggtccgggcctagaaggccagcttcggccgccccgggcaactttattatacaaagttgatagataaatcagatatctggttcctaaggacccggcggaccgattaaactgattcggtccgacgcgttacctaataacttcgtatagcatacattatacgaagttattagctaactaactagtaagcttaagccatgggtcgacggatccgttaactagcgtggcatttggcaccgccgcacactatgcgagctaggagtgctagtttacagatgaaactatgaaaccaagaaaacacaattgtccgtagctagcgcgtggcgtcgtgtcaagcttcacacagtatcttcgttcttcactataaatcgcgcctgttgttcgtgagacccaccaccgtggataacagtcccctaataataagcgatcaacagcactgctgatggctgaacaccgaggcgccgccgcgcgtaaccatccgccggagcagcccgtcgtgccggcgaacgacgccttccccgaccgcgcccagcagctctgcctcgacgccgggcgcgcgctcgcgatgtgcggcgtgctcgtcgccgtccctcccgcattttacgcgtcgacgtcgcggacgacaccgcacttgccttcgtcggcttcgtcctctggatcatcggtgcgtggctgtgcctcctggcgctcacgcccttggctccacgggcggtgagggcgggcggggccgccgccagcaccttgctgatcaggtgcctgtccctttcatgaactactagcgcccgcgcccgcggccgccgggcacaagagaacacatcgatgttcgctgcgtacgtcagcaataaggcactctttgtcagtagtcgagtgcatatgttgggtgtttgccctgggagatttcaagtgttgtggccattatcccgcaggataaaaaatcggcggcttttggattgatacggaaaataacgatgtttcatgctcgtgttgtgtgtgtgacatcttgtcagccaagtttttaaccgttgctactccccctctgtgggctcagtgtgtggaccggaatacgtcgtacataggccgtagcctaagcccaatatgccgtttttcaggttggcctgtgtgacgacaagcgggtctcaaaagcccatcacgcaactggcctgcaattattggaggagagcgcgtcgagttggttccagaggctgcgtggtggggccggactctgcgacgacctctcgttcgcgtccgatttggttgccgtgagccgtgacgtaacgcctccttccgttcctccctatataagttccacccccgggtccggtttccccaagccccagtgacccccgatcccgatcgcgaaatctccgcacccgccggcaagggaccgaagcaagcctctctcccgaccgtcgcatcaaggtacgcgtccgctcgatctgtcctcttccttctcgatttgacttgctgtggtgcccgatcacgggatcagaatcgcaccagtgtagatttcgcatgttctaagatgtgttagtttccaggctaatccagttctcttgacgcccgatccgatcgagctccgtgtttatttcagcctaatcgtagtattcccctaaaatttcctcattagggggttcgcaagattgttggtcgacaggttcacttatgctcgatcgcttacttttagtcgattcatgctgcgtactattgttgccccccgtggttttatcttttctcgtgtgaaatccagtagatatagtagatatcgtagcattaggttttaattcaatcgattgattattgtatcatcaaaattgagaagttcgaatcatgcctatcatgctgcctcaaccgaaatcctgtatattgaagtttcaattcaattgattgatcattcattagattcaaccaaaatctagaaggttagatgacgcatgtcatgctgcctgcgtagtttacctttgatctgtttatgattaccttatcagtaggatatttgtgattttgggaagtagcactaactgattcatgctgacatgatgttccctttcagattatactgttgagtcctatctaattgatgctttgtatgctatatgaatacgtcatggtaaattagcagttaattagcatattagcaattgggcgtacctcatcaggattgctcttgtagatgtgtgtggtgatgtttcttgttcaattcatgttctgctttaaaagtatgtgttctctgtttgttaattaagattcatggttataatgatttggacctaattaatcagggttgcccttttagatgcgtggttacttgttgagttcatttttttcctgctatagttgtatgcgtttgttcattcatggttagatttgatttgtttcttctctattccatgccttccatatacttcaattgtagcttaacatgagatttctgtatatgcaggtcgaccgccggggatccacacgacaccatggcccagtccaagcacggcctgaccaaggagatgaccatgaagtaccgcatggagggctgcgtggacggccacaagttcgtgatcaccggcgagggcatcggctaccccttcaagggcaagcaggccatcaacctgtgcgtggtggagggcggccccttgcccttcgccgaggacatcttgtccgccgccttcatgtacggcaaccgcgtgttcaccgagtacccccaggacatcgtcgactacttcaagaactcctgccccgccggctacacctgggaccgctccttcctgttcgaggacggcgccgtgtgcatctgcaacgccgacatcaccgtgagcgtggaggagaactgcatgtaccacgagtccaagttctacggcgtgaacttccccgccgacggccccgtgatgaagaagatgaccgacaactgggagccctcctgcgagaagatcatccccgtgcccaagcagggcatcttgaagggcgacgtgagcatgtacctgctgctgaaggacggtggccgcttgcgctgccagttcgacaccgtgtacaaggccaagtccgtgccccgcaagatgcccgactggcacttcatccagcacaagctgacccgcgaggaccgcagcgacgccaagaaccagaagtggcacctgaccgagcacgccatcgcctccggctccgccttgccctccggactcagatctcgatagagtcaacctagacttgtccatcttctggattggccaacttaattaatgtatgaaataaaaggatgcacacatagtgacatgctaatcactataatgtgggcatcaaagttgtgtgttatgtgtaattactagttatctgaataaaagagaaagagatcatccatatttcttatcctaaatgaatgtcacgtgtctttataattctttgatgaaccagatgcatttcattaaccaaatccatatacatataaatattaatcatatataattaatatcaattgggttagcaaaacaaatctagtctaggtgtgttttgcgaattgcggcgcccttactttaacgcctctaaccaacacccctttatctttataaggaacaataaacagaatttgccccactgttctaaatcacctaataatatccccagctaaaaacaataaaggtttcctagaattaagacaagcatgactgttcctccaggagggtttggaacattgttgcagtcttgcagatacgggcgaagggtgagaaacagagcggagggctggaggtgacctcggtagtcgacgccggagttgagcttgacaacgacggggcggcccctgatggacttgaggaagtccgatggcgtcttcaccgtcccgccggcgcccgaggcgggcctgtcgctgccgccgccgccgctgctcatcttgcgcgctgtgcccccggcggtgtccctgtgttgcggatcgcgggtgggccaggtggatgcgagggcgacccgtttggactccggccggagccgccggatccctggtcggtgtcagtgccgtttactctgggccccacgtgtcagtaccgtctgtagatgacaacaacccgtcgtccacagtcatgtccaaaatatcctttcttcttttttttcgattcggatatctatcttccttttttttttccaaaaatcttcttgacgcaccagcgcgcacgtttgtggtaaacgccgacacgtcggtcccacgtcgatagaccccacccaccagtgagtagcgtgtacgtattcgggggtgacggacgtgtcgccgtcgtcttgctagtcccattcccatctgagccacacatctctgaacaaaaaaaaggagggaggcctccacgcacatccccctccgtgccacccgccccaaaccctcgcgccgcctccgagacagccgccgcaaccatggccaccgccgccgccgcgtctaccgcgctcactggcgccactaccgctgcgcccaaggcgaggcgccgggcgcacctcctggccacccgccgcgccctcgccgcgcccatcaggtgctcagcggcgtcacccgccatgccgatggctcccccggccaccccgctccggccgtggggccccaccgagccccgcaagggtgctgacatcctcgtcgagtccctcgagcgctgcggcgtccgcgacgtcttcgcctaccccggcggcgcgtccatggagatccaccaggcactcacccgctcccccgtcatcgccaaccacctcttccgccacgagcaaggggaggcctttgccgcctccggctacgcgcgctcctcgggccgcgtcggcgtctgcatcgccacctccggccccggcgccaccaacctagtctccgcgctcgccgacgcgctgctcgattccgtccccatggtcgccatcacgggacaggtggcgcgacgcatgattggcaccgacgccttccaggagacgcccatcgtcgaggtcacccgctccatcaccaagcacaactacctggtcctcgacgtcgacgacatcccccgcgtcgtgcaggaggctttcttcctcgcctcctctggtcgaccagggccggtgcttgtcgacatccccaaggacatccagcagcagatggcggtgcctgtctgggacaagcccatgagtctgcctgggtacattgcgcgccttcccaagccccctgcgactgagttgcttgagcaggtgctgcgtcttgttggtgaatcgcggcgccctgttctttatgtgggcggtggctgcgcagcatctggtgaggagttgcgacgctttgtggagctgactggaatcccggtcacaactactcttatgggcctcggcaacttccccagcgacgacccactgtctctgcgcatgctaggtatgcatgggacggtgtatgcaaattatgcagtggataaggccgatctgttgcttgcacttggtgtgcggtttgatgatcgcgtgacagggaagattgaggcttttgcaagcagggctaagattgtgcacgttgatattgatccggctgagattggcaagaacaagcagccacatgtgtccatctgtgcagatgttaagcttgctttgcagggcatgaatgctcttcttgaaggaagcacatcaaagaagagctttgactttggctcatggaacgatgagttggatcagcagaagagggaattcccccttgggtataaaacatctaatgaggagatccagccacaatatgctattcaggttcttgatgagctgacgaaaggcgaggccatcatcggcacaggtgttgggcagcaccagatgtgggcggcacagtactacacttacaagcggccaaggcagtggttgtcttcagctggtcttggggctatgggatttggtttgccggctgctgctggtgcttctgtggcaaacccaggtgtcactgttgttgacatcgatggagatggtagctttctcatgaacgttcaggagctagctatgatccgaattgagaacctcccagtgaaggtctttgtgctaaacaaccagcacctggggatggtggtgcagttggaggacaggttctataaggccaacagagcgcacacatacttgggaaacccagagaatgaaagtgagatatatccagatttcgtgacgatcgccaaagggttcaacattccagcggtccgtgtgacaaagaagaacgaagtccgcgcagcgataaagaagatgctcgagactccagggccgtacctcttggatataatcgtcccacaccaggagcatgtgttgcctatgatccctagtggtggggctttcaaggatatgatcctggatggtgatggcaggactgtgtactgactagctagtcagttaacagatctgccagatcctcggtgtacaaataacccgtcttatcctatgagacgggccggcgtcagtgtgttctggaggaatttttatgtcagagcctttttctttgtgtgcttgatgtagatgccaagggaagcttattggctgttgaagcttgatgcaaaataaattatggaactctgttttttgtttatctaataataactagcaaatatgcttccattgcattgaaactaacagccttttgtgtttccaagttttattttgtgacaatgtcatctatttcaattagttgtggaatcggaaacttgcaggactaacttggaaactccaatccctcagcatcctggactttttcctggtgtaatccatgtagatattattttaatcatcattttagttctggaggtttttccatctccggttttgctcccctttcttcaaaaaaaaaaaaaaaatgccgtaggcgccgcaacgcccacctgttgttcaaactcatgggcacgagtggctcgaagattttatacaacaattgctgtagtttcaccgttgctggtgaagaagcatttttttaaaaaaatatagtggtattcattttaattagtttagttgtgcagcgagcaaaatttggacatgctctgctcggaatctgatcgacctagacacagattagcagcagtagctttgtcatctgttccaagagttgcgatctgatagaagaaaaaaaaaccttcccttcaatgtaaaaccgaaactaacaagaaagaagcacagtgccgtttaggcaagtatggagtacgtattaagcatgtagaaggccatgcatgaaccactaacaagaaagaagcgcagtgccattcaggcaagcataagcatgtagattggcatgcatgaacaactaacagtagatcgtctctggtctgattagaagttttttgggaagccaagaaatcatgtacaactggttccatctcaaattccgtggcaaaaagaggcctaagcaacatacctcgagtagatcacattcaagcttggtcacccggtccgtcaatattctgattccgatgacttcgtaggttcctagctcaagccgctcgtgtccaagcgtcacttacgattagctaatgattacggcatctaggaccgactagtggcgcgccgactagctagctaaggtaccgagctcgaattcattccgattaatcgtggcctcttgctcttcaggatgaagagctatgtttaaacgtgcaagcgctactagacaattcagtacattaaaaacgtccgcaatgtgttattaagttgtctaagcgtcaatttgtttacaccacaatatatcctgcca

SEQ ID NO: 72 - DNA, 22767 bp, synthetic construct
  misc_feature 1..22767: note = PHP96730
  source 1..22767: mol_type = other DNA
gtttacccgccaatatatcctgtcaaacactgatagtttaaactgaaggcgggaaacgacaatctgatcatgagcggagaattaagggagtcacgttatgacccccgccgatgacgcgggacaagccgttttacgtttggaactgacagaaccgcaacgttgaaggagccactcagcaagctggtacgattgtaatacgactcactatagggcgaattgagcgctgtttaaacgctcttcaactggaagagcggttacgctgtttaaacgctcttcaactggaagagcggttactaccggttcactagctagctgctaatcgagctagttaccctatgaggtgacatgaagcgctcacggttactatgacggttagcttcacgactgttggtggcagtagcgtacgacttagctatagttccggacttacccttaagcgatttaaatctgcggttaccgaattcgagctcggtacctagtacccttgtacttttggtttcacctgcatagagaaaacccacaagaatatgacagtctgatttgtcagtctcattctcaagcaacatttctctatccgttactttcatggtgaataacacaatccatcatcaatactttgtgttactcagaaactgaaagttattccgagtcttgcatatctttggacctactcgtttttctaccattattgctgattgttaagctctcgctacttgaatcggcattgttggagtgggaaggttcaaaaaattggagttatgactagttgtctctttctatgtacgatggagaaaatgaataaacaactgagaaaatggctcttgtttagttgatgatgctcttaagctttccactggttgccatatatgatttgggcatttcactttgatcttaatgggccttgtaaagcccaagactcatgattatctttagttgatgctcttaattaggtgtgggcaaataattcaaactgtatgtacccgaccaaaaccaaagcaaaaataatcgaaccaaaccgaaaatttaaaaataaccgaatgaaaactaaatcctataactgaaagaactgaaaccgaatcaaaatatttaatgtaaccaaaaatatccgaaatataattatattgtcaaaaatattaataatttctagattaaataattaaaaatacttaaaaatttatataaaatagtaaaaatactcgaaaataaccacaaatattcaaaaacaaccgaaatatcccaaaatattcaaagcaaaataaccgaatggataccaaattttaaaaccgaaaaaactggaacaaaaccaaaatcgaaccaaaatttcaaaaatcgaataaatactaaactttagaacaaaaaaaaacgataaccgaatgtatacgaaccaaagccgaattagataaccgaacgtccaggactactcttaatctttccgccacttatgatttgggctattactttgtttataatgagccttttcaagctcaagttcatgattgtccgtgagatgagaaactgacttgttggattcgaaaccctagctagtattggttaatacttaatacataaatgacctgcattgacatcatcatccaagaaaataaaaattgtatgcttgagatatttagttttcctagctaggttttctttattttagtaccgaatctttaggtgtgccacgttaatttagacccattttttcatacttaccaactgagtctagtttaatcatgactataatcgtataaaatgattcagtcgacgtcattgcgaacgtatataaaatcatccaaattgacgtcattccaaagaggtaagcatgcttatctaagagtccgagcatactaaacaagacgacattttatttgcactccaaatcaaattttgtattgcctaaagaaaaacaatcaaactcaagtttcttaaaattaatttcattcaaactaatcactttcaatatctcacatattattcatgccatttctatttgtctaaacatgatttaaaaaaaaaagtaaaatacaaagattactatgcaaaaactctataaaaaaaaattcaaatttcttatttatttgtgacatcaaattttcaaaataatttttttaattatcggttgatccggtcagtcgataaaaacataaactttcagcgaccgttaaaactttcctactaccgatttagagaaaatcttagcttgaaacgtaattgtaacctgccttcatgcaagtcgcaagatatgtcatcctaagttgtatatgttttctcaaaagatgtatttacttgagaaaatacgtttcaacgttgatggacaaccaattaagaatcaagcacctttcgtaatcaatttaggcttatcgtctaaggtatactgatttacgacagttgactagacttataaggaacaaaataatagaatagtttctaaacacttcacctaatcatagagactaagatggtaattcgtaaacgacaaagcctagtgacactgtccattgtaaaattccacatcatattagtattaaacatatacatgtagtttcctgaacacatgtagtatcaaacacacttcgtggcttcttcctcgaaacctgcggccgcgctatagttccggacttacccttaagataacttcgtatagcatacattatacgaagttatgggcccacgcgtgaagagcggttaccagagctggtcacctttgtccaccaagatggaactgtcttcggccagaatggccatctggattcagcaggcctagaaggccatttatcgctatcaactttgtatagaaaagttgggccgaattcgagctcggtacggccagaatggcccggaccgaagcttaacgcttacgcttatgaatcagcttgattcgtaattggttctaacgagccttaatgcatggatgttggagagaaccaatatttatggaggaaataaagcatttaaatcagatttttttccatacatgttttccttatgaaatagatcgatgatttacactaaagttcatacccatttacgatgttttgcttaacgttttatgctgaaatccgcctgagctcacacgcacgatcggttccatatcttttgttccgatatatacggtaacttctagcttcatgggcgagctaatcacggtggtgtatggacccacctgaacgaaccaatgaaaaatttgttgccgctctcatgttatgcaagtctgaaccattaaatatgctagcataaacacgagtaggaaccaactacccgaccagcgaacacgacgttggcccaccttcgtccatcccaactcgaccccaccacgtgcgcaccttctgtttacgtaaaacataacatatgtttacacatgtataaacgtgccccacaatcgcgcggacgcacgtgccccactgacccgacctgaccacgcgtgtgaccactaccctggctaggacttcccatgcctatcggaagccctgagcttccattatcaacgcctatatatattattcaattgaagcaaaacatagtggttttttgtaagctgtataaaaatatttcattgttaaatcctgaggtataccaaaaaaaaggtgtttaaccaatggtttgaacaactttttttcatctttaaattacatttccaaaaatgatatttatttaatttattattattagattccactgaggagcaaaaacacatattcaagttaagaatgctgtattgagtcccccgttgtcggaaattaaaattatacttcatgtgatttataatttgctgtagtgcggcgcgcggctcttacgactgagctgaggccaaaataaagcagcaggttcgttgggggcgataatcccaggcggtgcactacaatttgaagtgtactaccctggcactctaaaagcatacacgcatgcaaaagcagctcccgctttttttgaatggagaagattatctcaatcgacaaatatatacgcgtaggacaatttatacactttagttatatatacatggccagaaaattgtcatctctaaagcaactacactgaaaaagaactttgcattttcacagtcccacaaaaaaaaaacaaaaaaaagttaaagagacatgtgcttgaagagcccctgcgcacttgtacacggtgacacaacatgcatgtacaccaaggcctgcctgcgcgccacctcgtcgtgctcgtgcctatataaagccactcgcatcccagcctatcattgcaagagtttgagacagcagaggacactcctcctcagaactctcccttccctcttgtaggggccaaaagggtcagagaactaggaagaagagaactagtccccaagcctaacaagaaagcaagatcttctgcaactgttggcattcgccttaatttgtatccatatccccccgggggatctcgactctagaggatcgctcaggaaggccgctgagatagaggcatggcggccaatgcgggcggcggtggagcgggaggaggcagcggcagcggcagcgtggctgcgccggcggtgtgccgccccagcggctcgcggtggacgccgacgccggagcagatcaggatgctgaaggagctctactacggctgcggcatccggtcgcccagctcggagcagatccagcgcatcaccgccatgctgcggcagcacggcaagatcgagggcaagaacgtcttctactggttccagaaccacaaggcccgcgagcgccagaagcgccgcctcaccagcctcgacgtcaacgtgcccgccgccggcgcggccgacgccaccaccagccaactcggcgtcctctcgctgtcgtcgccgccgccttcaggcgcggcgcctccctcgcccaccctcggcttctacgccgccggcaatggcggcggatcggctgtgctgctggacacgagttccgactggggcagcagcggcgctgccatggccaccgagacatgcttcctgcaggactacatgggcgtgacggacacgggcagctcgtcgcagtggccacgcttctcgtcgtcggacacgataatggcggcggccgcggcgcgggcggcgacgacgcgggcgcccgagacgctccctctcttcccgacctgcggcgacgacggcggcagcggtagcagcagctacttgccgttctggggtgccgcgtccacaactgccggcgccacttcttccgttgcgatccagcagcaacaccagctgcaggagcagtacagcttttacagcaacagcaacagcacccagctggccggcaccggcaaccaagacgtatcggcaacagcagcagcagccgccgccctggagctgagcctcagctcatggtgctccccttaccctgctgcagggagtatgtgagagcaacgcgagctgccactgctcttcactgatgtctctggaatggaaggaggaggaagtgagcatagcgttggtgcgttgctgtcaagggcgaattcacatggttaacctagacttgtccatcttctggattggccaacttaattaatgtatgaaataaaaggatgcacacatagtgacatgctaatcactataatgtgggcatcaaagttgtgtgttatgtgtaattactagttatctgaataaaagagaaagagatcatccatatttcttatcctaaatgaatgtcacgtgtctttataattctttgatgaaccagatgcatttcattaaccaaatccatatacatataaatattaatcatatataattaatatcaattgggttagcaaaacaaatctagtctaggtgtgttttgcgaatgcggccgccaccgcggtggagctcgaattccggtccgggcctagaaggccagcttcaagtttgtacaaaaaagcaggctccggccagaatggcccggaccgggttaccgaattcgagctcggtaccatttaaattgcgcccgccacggccgtggaggtcgtattccggtcagcttgcatccctgcagtgcagcgtgacccggtcgtgcccctctctagagataatgagcattgcatgtctaagttataaaaaattaccacatattttttttgtcacacttgtttgaagtgcagtttatctatctttatacatatatttaaactttactctacgaataatataatctatagtactacaataatatcagtgttttagagaatcatataaatgaacagttagacatggtctaaaggacaattgagtattttgacaacaggactctacagttttatctttttagtgtgcatgtgttctcctttttttttgcaaatagcttcacctatataatacttcatccattttattagtacatccatttagggtttagggttaatggtttttatagactaatttttttagtacatctattttattctattttagcctctaaattaagaaaactaaaactctattttagtttttttatttaataatttagatataaaatagaataaaataaagtgactaaaaattaaacaaataccctttaagaaattaaaaaaactaaggaaacatttttcttgtttcgagtagataatgccagcctgttaaacgccgtcgacgagtctaacggacaccaaccagcgaaccagcagcgtcgcgtcgggccaagcgaagcagacggcacggcatctctgtcgctgcctctggacccctctcgagagttccgctccaccgttggacttgctccgctgtcggcatccagaaattgcgtggcggagcggcagacgtgagccggcacggcaggcggcctcctcctcctctcacggcaccggcagctacgggggattcctttcccaccgctccttcgctttcccttcctcgcccgccgtaataaatagacaccccctccacaccctctttccccaacctcgtgttgttcggagcgcacacacacacaaccagatctcccccaaatccacccgtcggcacctccgcttcaaggtacgccgctcgtcctcccccccccccctctctaccttctctagatcggcgttccggtccatgcatggttagggcccggtagttctacttctgttcatgtttgtgttagatccgtgtttgtgttagatccgtgctgctagcgttcgtacacggatgcgacctgtacgtcagacacgttctgattgctaacttgccagtgtttctctttggggaatcctgggatggctctagccgttccgcagacgggatcgatttcatgattttttttgtttcgttgcatagggtttggtttgcccttttcctttatttcaatatatgccgtgcacttgtttgtcgggtcatcttttcatgcttttttttgtcttggttgtgatgatgtggtctggttgggcggtcgttctagatcggagtagaattctgtttcaaactacctggtggatttattaattttggatctgtatgtgtgtgccatacatattcatagttacgaattgaagatgatggatggaaatatcgatctaggataggtatacatgttgatgcgggttttactgatgcatatacagagatgctttttgttcgcttggttgtgatgatgtggtgtggttgggcggtcgttcattcgttctagatcggagtagaatactgtttcaaactacctggtgtatttattaattttggaactgtatgtgtgtgtcatacatcttcatagttacgagtttaagatggatggaaatatcgatctaggataggtatacatgttgatgtgggttttactgatgcatatacatgatggcatatgcagcatctattcatatgctctaaccttgagtacctatctattataataaacaagtatgttttataattattttgatcttgatatacttggatgatggcatatgcagcagctatatgtggatttttttagccctgccttcatacgctatttatttgcttggtactgtttcttttgtcgatgctcaccctgttgtttggtgttacttctgcaggtcgactctagaggatccatggccactgtgaacaactggctcgctttctccctctccccgcaggagctgccgccctcccagacgacggactccacactcatctcggccgccaccgccgaccatgtctccggcgatgtctgcttcaacatcccccaagattggagcatgaggggatcagagctttcggcgctcgtcgcggagccgaagctggaggacttcctcggcggcatctccttctccgagcagcatcacaaggccaactgcaacatgatacccagcactagcagcacagtttgctacgcgagctcaggtgctagcaccggctaccatcaccagctgtaccaccagcccaccagctcagcgctccacttcgcggactccgtaatggtggcttcctcggccggtgtccacgacggcggtgccatgctcagcgcggccgccgctaacggtgtcgctggcgctgccagtgccaacggcggcggcatcgggctgtccatgattaagaactggctgcggagccaaccggcgcccatgcagccgagggtggcggcggctgagggcgcgcaggggctctctttgtccatgaacatggcggggacgacccaaggcgctgctggcatgccacttctcgctggagagcgcgcacgggcgcccgagagtgtatcgacgtcagcacagggtggagccgtcgtcgtcacggcgccgaaggaggatagcggtggcagcggtgttgccggcgctctagtagccgtgagcacggacacgggtggcagcggcggcgcgtcggctgacaacacggcaaggaagacggtggacacgttcgggcagcgcacgtcgatttaccgtggcgtgacaaggcatagatggactgggagatatgaggcacatctttgggataacagttgcagaagggaagggcaaactcgtaagggtcgtcaagtctatttaggtggctatgataaagaggagaaagctgctagggcttatgatcttgctgctctgaagtactggggtgccacaacaacaacaaattttccagtgagtaactacgaaaaggagctcgaggacatgaagcacatgacaaggcaggagtttgtagcgtctctgagaaggaagagcagtggtttctccagaggtgcatccatttacaggggagtgactaggcatcaccaacatggaagatggcaagcacggattggacgagttgcagggaacaaggatctttacttgggcaccttcagcacccaggaggaggcagcggaggcgtacgacatcgcggcgatcaagttccgcggcctcaacgccgtcaccaacttcgacatgagccgctacgacgtgaagagcatcctggacagcagcgccctccccatcggcagcgccgccaagcgcctcaaggaggccgaggccgcagcgtccgcgcagcaccaccacgccggcgtggtgagctacgacgtcggccgcatcgcctcgcagctcggcgacggcggagccctggcggcggcgtacggcgcgcactaccacggcgccgcctggccgaccatcgcgttccagccgggcgccgccagcacaggcctgtaccacccgtacgcgcagcagccaatgcgcggcggcgggtggtgcaagcaggagcaggaccacgcggtgatcgcggccgcgcacagcctgcaggacctccaccacctgaacctgggcgcggccggcgcgcacgactttttctcggcagggcagcaggccgccgccgctgcgatgcacggcctgggtagcatcgacagtgcgtcgctcgagcacagcaccggctccaactccgtcgtctacaacggcggggtcggcgacagcaacggcgccagcgccgtcggcggcagtggcggtggctacatgatgccgatgagcgctgccggagcaaccactacatcggcaatggtgagccacgagcaggtgcatgcacgggcctacgacgaagccaagcaggctgctcagatggggtacgagagctacctggtgaacgcggagaacaatggtggcggaaggatgtctgcatgggggactgtcgtgtctgcagccgcggcggcagcagcaagcagcaacgacaacatggccgccgacgtcgggcatggcggcgcgcagctcttcagtgtctggaacgacacttaagcgtacgtgccggcctggctctccgaaagggcgtattccagcacactggcggccgttactagacccaacctagacttgtccatcttctggattggccaacttaattaatgtatgaaataaaaggatgcacacatagtgacatgctaatcactataatgtgggcatcaaagttgtgtgttatgtgtaattactagttatctgaataaaagagaaagagatcatccatatttcttatcctaaatgaatgtcacgtgtctttataattctttgatgaaccagatgcatttcattaaccaaatccatatacatataaatattaatcatatataattaatatcaattgggttagcaaaacaaatctagtctaggtgtgttttgcgaatgcggcctccgggcacccagctttcttgtacaaagtggccgttaacggatcggccagaatggcccggaccgggttaccgaattcgagctcggtaccctggttcacaaactcaatacaacacacagtggagtagggtattacgctccggcggcccgaaccactctaaatccttgtgtcctcgtgtgctcttccaccattaatgactgtaattgcagggacacgaagagttgtagcgcttttgccaacaagatccgctatatgctagtagagtggaacctgcacagcaacaagcatccaataatctgagaataagaattatgtgtggtgatggttctcatctctgcaactcgccattttcgcgagagaaccaaatccaagttggtgaagatcatgatttgggctcatgggctggcatagtagctattacctttgcaattgtggttcgaatctatccgatattctccttttcagggagagctaatgcttatgcttattgggtattttggtttgacactgcttcacgcccaaaaaaaggcaactatgtctgagttggatatggcccaaaaaaaggcagctatgtctgagttggatatggaagtcttctttcgtttagggtgaagtaagaccaagctcatgagcttattatcttaggtcggaacaaattagttgataggcatggcacatttatcaaattataatgattttaacagaaaagcaacacctctttttcagcagcaccagctttgcaagctgcaattgacactccaagcatagtatttgctccaaactcagcctgcatttcgcacaatatcatatctatttccatttggataaaatatattttccagaaatatgggaacagaatcaagatacagaaaaaagttgtggtagtagtggtaagtggaaacacaagtacagtgaaaagatagcattatttctgaacagtcaaattaaccgaaataagtagtatcacatactgcccctaaattgactacacccaatgtaaagaattgcttgagcatattgagccatcagttgtttgtttgtgtaacggatttgacaatgcagagttcaggagcaaaaaaccgcaaaggagagaaagagggaaaggatctcctagtatcccaccttgtggcgcgccctgtcaagtgcatgatggcctggtcgatctgcgtctgctgctgcggttccatcccaacgagtgcctccgacaccttgtcgttgatcacccgcaccgcgtaggcgacccccctggcgaggaacttccgcctctcggaggccccggccgcgtcggcggcggcgccctcgagcgcgcccacgctagccgtagatgctcggtgcacggccttgttggtgtgcaactcgacctcaacggccggtgcgctacgcccgtcaaggatctggcgcgcccgcaccctcgtgatcacggtgggcgcctcccgcctcatgtggccgacgatgaaaagcgccgggttaggggccttggcgcgcaccgccgtattcagggcctcctcgctcttgcgcgagagcaggtgcttccccaggtactcctgcactgacaaggctgccacagcggtggaatttgtcctcacgacttcgccacgtcgtcctcacctccctggcttcccacgactccgccgtatcgaggtgctcggtgggtcgtcttaatccgaagtccgaactaggaagacgagacagagaggtctgaggaatgggcctcgtttgatgttgagctgaattatttttccagcataagcccaggtcttggtccatgaacaaaattactagaaacccagcccagtactacgatctaaaagagggactgccactggatagctctctctagcattctccacgctccaatacagcggcgtcgtgtctatccgggtctatccgcgaacacgtgagaactctccagaaactgctttctcctccacttcatctctctcgctttccctctataaaaagaccccttctaggaattgagggagacagcaagcaccaagcagcgatccgaagctcaatcaattcactcaaacctcttccccaaatcttcgattagatcttcgttgacaagaagactagaaccgaacctgacatgtccaacctgctcacggttcaccagaaccttccggctcttccagtggacgcgacgtccgatgaagtcaggaagaacctcatggacatgttccgcgacaggcaagcgttcagcgagcacacctggaagatgctgctctccgtctgccgctcctgggctgcatggtgcaagctgaacaacaggaagtggttccccgctgagcccgaggacgtgagggattaccttctgtacctgcaagcgcgaggtttgtttctgcttctacctttgatatatatataataattatcattaattagtagtaatataatatttcaaatatttttttcaaaataaaagaatgtagtatatagcaattgcttttctgtagtttataagtgtgtatattttaatttataacttttctaatatatgaccaaaacatggtgatgcctaggtctggcagtgaagaccatccagcaacaccttggacaactgaacatgcttcacaggcgctccggcctcccgcgccccagcgactcgaacgccgtgagcctcgtcatgcgccgcatcaggaaggaaaacgtcgatgccggcgaaagggcaaagcaggccctcgcgttcgagaggaccgatttcgaccaggtccgcagcctgatggagaacagcgacaggtgccaggacattaggaacctggcgttcctcggaattgcatacaacacgctcctcaggatcgcggaaattgcccgcattcgcgtgaaggacattagccgcaccgacggcggcaggatgcttatccacattggcaggaccaagacgctcgtttccaccgcaggcgtcgaaaaggccctcagcctcggagtgaccaagctcgtcgaacgctggatctccgtgtccggcgtcgcggacgacccaaacaactacctcttctgccgcgtccgcaagaacggggtggctgcccctagcgccaccagccaactcagcacgagggccttggaaggtattttcgaggccacccaccgcctgatctacggcgcgaaggatgacagcggtcaacgctacctcgcatggtccgggcactccgcccgcgttggagctgctagggacatggcccgcgccggtgtttccatccccgaaatcatgcaggcgggtggatggacgaacgtgaacattgtcatgaactacattcgcaaccttgacagcgagacgggcgcaatggttcgcctcctggaagatggtgactgaggtacccaacctagacttgtccatcttctggattggccaacttaattaatgtatgaaataaaaggatgcacacatagtgacatgctaatcactataatgtgggcatcaaagttgtgtgttatgtgtaattactagttatctgaataaaagagaaagagatcatccatatttcttatcctaaatgaatgtcacgtgtctttataattctttgatgaaccagatgcatttcattaaccaaatccatatacatataaatattaatcatatataattaatatcaattgggttagcaaaacaaatctagtctaggtgtgttttgcgatccgatatcgaattggccacggtaccagctgctgctgttctagggttcacaagtctgcctatttgtcttccccaatggagctatggttgtctggtctggtccttggtcgtgtcccgtttcattgtgtactatttacctgtaatgtgtatccttaagtctggtttgatggtgtctgaaacgttttgctgtggtagagcagcatggaagaactataatgaataagtgatccctaatcattgtgtccaaattttgcttctgctatacccttttgtgctgtttcttatgttttgcttaaaaatttgatctgacaaacaaatttgtctaaattatgctcttgttctgactgtgtactgtacacatttgtattgctaccggtttggcacatagttttctctttgattgcagatcaaacccttctgattgcagattgcttggctatggctgatgtgctcactgttcttctttagcttgtatattgctgatggtggcttggctacggctgaaaaagttgctgctgcgccgacttggcaactgttgctccagtaatgctttgtcctctcttcctagccgccgacttggcacttggcagctgttgctcctgtaatgcgttgttatctcttatctcttgagatgtactatgattttgaggctgtttgacttgtgccagattgccagtgctgatgctatattatctcaggtttttatgctagtatatgttttactgtgtgctgcctgtgtcgagttacgtaatctattgaaccgctatgcgtgttgatgccctgttgttgcttgccagattgatgcccctgttgcttgcagcttgcaagctgtagtgaaatcctaaaattccaaaccaaatctattctgaacttttgaagatctgtgatgtccggaagaaaagattcaaacagataaacgggactctccagaatctataaaataaatgatcgacaaacgctttgctttggtaggcttcaagcttggtcacccggtccgggcctagaaggccagcttcggccgccccgggcaactttattatacaaagttgatagataaatcagatatctggttcctaaggacccggcggaccgattaaactgattcggtccgacgcgttacctaataacttcgtatagcatacattatacgaagttattagctaactaactagtaagcttaagccatgggtcgacggatccgttaactagcgtggcatttggcaccgccgcacactatgcgagctaggagtgctagtttacagatgaaactatgaaaccaagaaaacacaattgtccgtagctagcgcgtggcgtcgtgtcaagcttcacacagtatcttcgttcttcactataaatcgcgcctgttgttcgtgagacccaccaccgtggataacagtcccctaataataagcgatcaacagcactgctgatggctgaacaccgaggcgccgccgcgcgtaaccatccgccggagcagcccgtcgtgccggcgaacgacgccttccccgaccgcgcccagcagctctgcctcgacgccgggcgcgcgctcgcgatgtgcggcgtgctcgtcgccgtccctcccgcattttacgcgtcgacgtcgcggacgacaccgcacttgccttcgtcggcttcgtcctctggatcatcggtgcgtggctgtgcctcctggcgctcacgcccttggctccacgggcggtgagggcgggcggggccgccgccagcaccttgctgatcaggtgcctgtccctttcatgaactactagcgcccgcgcccgcggccgccgggcacaagagaacacatcgatgttcgctgcgtacgtcagcaataaggcactctttgtcagtagtcgagtgcatatgttgggtgtttgccctgggagatttcaagtgttgtggccattatcccgcaggataaaaaatcggcggcttttggattgatacggaaaataacgatgtttcatgctcgtgttgtgtgtgtgacatcttgtcagccaagtttttaaccgttgctactccccctctgtgggctcagtgtgtggaccggaatacgtcgtacataggccgtagcctaagcccaatatgccgtttttcaggttggcctgtgtgacgacaagcgggtctcaaaagcccatcacgcaactggcctgcaattattggaggagagcgcgtcgagttggttccagaggctgcgtggtggggccggactctgcgacgacctctcgttcgcgtccgatttggttgccgtgagccgtgacgtaacgcctccttccgttcctccctatataagttccacccccgggtccggtttccccaagccccagtgacccccgatcccgatcgcgaaatctccgcacccgccggcaagggaccgaagcaagcctctctcccgaccgtcgcatcaaggtacgcgtccgctcgatctgtcctcttccttctcgatttgacttgctgtggtgcccgatcacgggatcagaatcgcaccagtgtagatttcgcatgttctaagatgtgttagtttccaggctaatccagttctcttgacgcccgatccgatcgagctccgtgtttatttcagcctaatcgtagtattcccctaaaatttcctcattagggggttcgcaagattgttggtcgacaggttcacttatgctcgatcgcttacttttagtcgattcatgctgcgtactattgttgccccccgtggttttatcttttctcgtgtgaaatccagtagatatagtagatatcgtagcattaggttttaattcaatcgattgattattgtatcatcaaaattgagaagttcgaatcatgcctatcatgctgcctcaaccgaaatcctgtatattgaagtttcaattcaattgattgatcattcattagattcaaccaaaatctagaaggttagatgacgcatgtcatgctgcctgcgtagtttacctttgatctgtttatgattaccttatcagtaggatatttgtgattttgggaagtagcactaactgattcatgctgacatgatgttccctttcagattatactgttgagtcctatctaattgatgctttgtatgctatatgaatacgtcatggtaaattagcagttaattagcatattagcaattgggcgtacctcatcaggattgctcttgtagatgtgtgtggtgatgtttcttgttcaattcatgttctgctttaaaagtatgtgttctctgtttgttaattaagattcatggttataatgatttggacctaattaatcagggttgcccttttagatgcgtggttacttgttgagttcatttttttcctgctatagttgtatgcgtttgttcattcatggttagatttgatttgtttcttctctattccatgccttccatatacttcaattgtagcttaacatgagatttctgtatatgcaggtcgaccgccggggatccacacgacaccatggcccagtccaagcacggcctgaccaaggagatgaccatgaagtaccgcatggagggctgcgtggacggccacaagttcgtgatcaccggcgagggcatcggctaccccttcaagggcaagcaggccatcaacctgtgcgtggtggagggcggccccttgcccttcgccgaggacatcttgtccgccgccttcatgtacggcaaccgcgtgttcaccgagtacccccaggacatcgtcgactacttcaagaactcctgccccgccggctacacctgggaccgctccttcctgttcgaggacggcgccgtgtgcatctgcaacgccgacatcaccgtgagcgtggaggagaactgcatgtaccacgagtccaagttctacggcgtgaacttccccgccgacggccccgtgatgaagaagatgaccgacaactgggagccctcctgcgagaagatcatccccgtgcccaagcagggcatcttgaagggcgacgtgagcatgtacctgctgctgaaggacggtggccgcttgcgctgccagttcgacaccgtgtacaaggccaagtccgtgccccgcaagatgcccgactggcacttcatccagcacaagctgacccgcgaggaccgcagcgacgccaagaaccagaagtggcacctgaccgagcacgccatcgcctccggctccgccttgccctccggactcagatctcgatagagtcaacctagacttgtccatcttctggattggccaacttaattaatgtatgaaataaaaggatgcacacatagtgacatgctaatcactataatgtgggcatcaaagttgtgtgttatgtgtaattactagttatctgaataaaagagaaagagatcatccatatttcttatcctaaatgaatgtcacgtgtctttataattctttgatgaaccagatgcatttcattaaccaaatccatatacatataaatattaatcatatataattaatatcaattgggttagcaaaacaaatctagtctaggtgtgttttgcgaattgcggcgcccttactttaacgcctctaaccaacacccctttatctttataaggaacaataaacagaatttgccccactgttctaaatcacctaataatatccccagctaaaaacaataaaggtttcctagaattaagacaagcatgactgttcctccaggagggtttggaacattgttgcagtcttgcagatacgggcgaagggtgagaaacagagcggagggctggaggtgacctcggtagtcgacgccggagttgagcttgacaacgacggggcggcccctgatggacttgaggaagtccgatggcgtcttcaccgtcccgccggcgcccgaggcgggcctgtcgctgccgccgccgccgctgctcatcttgcgcgctgtgcccccggcggtgtccctgtgttgcggatcgcgggtgggccaggtggatgcgagggcgacccgtttggactccggccggagccgccggatccctggtcggtgtcagtgccgtttactctgggccccacgtgtcagtaccgtctgtagatgacaacaacccgtcgtccacagtcatgtccaaaatatcctttcttcttttttttcgattcggatatctatcttccttttttttttccaaaaatcttcttgacgcaccagcgcgcacgtttgtggtaaacgccgacacgtcggtcccacgtcgatagaccccacccaccagtgagtagcgtgtacgtattcgggggtgacggacgtgtcgccgtcgtcttgctagtcccattcccatctgagccacacatctctgaacaaaaaaaaggagggaggcctccacgcacatccccctccgtgccacccgccccaaaccctcgcgccgcctccgagacagccgccgcaaccatggccaccgccgccgccgcgtctaccgcgctcactggcgccactaccgctgcgcccaaggcgaggcgccgggcgcacctcctggccacccgccgcgccctcgccgcgcccatcaggtgctcagcggcgtcacccgccatgccgatggctcccccggccaccccgctccggccgtggggccccaccgagccccgcaagggtgctgacatcctcgtcgagtccctcgagcgctgcggcgtccgcgacgtcttcgcctaccccggcggcgcgtccatggagatccaccaggcactcacccgctcccccgtcatcgccaaccacctcttccgccacgagcaaggggaggcctttgccgcctccggctacgcgcgctcctcgggccgcgtcggcgtctgcatcgccacctccggccccggcgccaccaacctagtctccgcgctcgccgacgcgctgctcgattccgtccccatggtcgccatcacgggacaggtggcgcgacgcatgattggcaccgacgccttccaggagacgcccatcgtcgaggtcacccgctccatcaccaagcacaactacctggtcctcgacgtcgacgacatcccccgcgtcgtgcaggaggctttcttcctcgcctcctctggtcgaccagggccggtgcttgtcgacatccccaaggacatccagcagcagatggcggtgcctgtctgggacaagcccatgagtctgcctgggtacattgcgcgccttcccaagccccctgcgactgagttgcttgagcaggtgctgcgtcttgttggtgaatcgcggcgccctgttctttatgtgggcggtggctgcgcagcatctggtgaggagttgcgacgctttgtggagctgactggaatcccggtcacaactactcttatgggcctcggcaacttccccagcgacgacccactgtctctgcgcatgctaggtatgcatgggacggtgtatgcaaattatgcagtggataaggccgatctgttgcttgcacttggtgtgcggtttgatgatcgcgtgacagggaagattgaggcttttgcaagcagggctaagattgtgcacgttgatattgatccggctgagattggcaagaacaagcagccacatgtgtccatctgtgcagatgttaagcttgctttgcagggcatgaatgctcttcttgaaggaagcacatcaaagaagagctttgactttggctcatggaacgatgagttggatcagcagaagagggaattcccccttgggtataaaacatctaatgaggagatccagccacaatatgctattcaggttcttgatgagctgacgaaaggcgaggccatcatcggcacaggtgttgggcagcaccagatgtgggcggcacagtactacacttacaagcggccaaggcagtggttgtcttcagctggtcttggggctatgggatttggtttgccggctgctgctggtgcttctgtggcaaacccaggtgtcactgttgttgacatcgatggagatggtagctttctcatgaacgttcaggagctagctatgatccgaattgagaacctcccagtgaaggtctttgtgctaaacaaccagcacctggggatggtggtgcagttggaggacaggttctataaggccaacagagcgcacacatacttgggaaacccagagaatgaaagtgagatatatccagatttcgtgacgatcgccaaagggttcaacattccagcggtccgtgtgacaaagaagaacgaagtccgcgcagcgataaagaagatgctcgagactccagggccgtacctcttggatataatcgtcccacaccaggagcatgtgttgcctatgatccctagtggtggggctttcaaggatatgatcctggatggtgatggcaggactgtgtactgactagctagtcagttaacagatctgccagatcctcggtgtacaaataacccgtcttatcctatgagacgggccggcgtcagtgtgttctggaggaatttttatgtcagagcctttttctttgtgtgcttgatgtagatgccaagggaagcttattggctgttgaagcttgatgcaaaataaattatggaactctgttttttgtttatctaataataactagcaaatatgcttccattgcattgaaactaacagccttttgtgtttccaagttttattttgtgacaatgtcatctatttcaattagttgtggaatcggaaacttgcaggactaacttggaaactccaatccctcagcatcctggactttttcctggtgtaatccatgtagatattattttaatcatcattttagttctggaggtttttccatctccggttttgctcccctttcttcaaaaaaaaaaaaaaaatgccgtaggcgccgcaacgcccacctgttgttcaaactcatgggcacgagtggctcgaagattttatacaacaattgctgtagtttcaccgttgctggtgaagaagcatttttttaaaaaaatatagtggtattcattttaattagtttagttgtgcagcgagcaaaatttggacatgctctgctcggaatctgatcgacctagacacagattagcagcagtagctttgtcatctgttccaagagttgcgatctgatagaagaaaaaaaaaccttcccttcaatgtaaaaccgaaactaacaagaaagaagcacagtgccgtttaggcaagtatggagtacgtattaagcatgtagaaggccatgcatgaaccactaacaagaaagaagcgcagtgccattcaggcaagcataagcatgtagattggcatgcatgaacaactaacagtagatcgtctctggtctgattagaagttttttgggaagccaagaaatcatgtacaactggttccatctcaaattccgtggcaaaaagaggcctaagcaacatacctcgagtagatcacattcaagcttggtcacccggtccgtcaatattctgattccgatgacttcgtaggttcctagctcaagccgctcgtgtccaagcgtcacttacgattagctaatgattacggcatctaggaccgactagtggcgcgccgactagctagctaaggtaccgagctcgaattcattccgattaatcgtggcctcttgctcttcaggatgaagagctatgtttaaacgtgcaagcgctactagacaattcagtacattaaaaacgtccgcaatgtgttattaagttgtctaagcgtcaatttgtttacaccacaatatatcctgcca

SEQ ID NO: 73 - DNA, 23240 bp, synthetic construct
  misc_feature 1..23240: note = PHP96731
  source 1..23240: mol_type = other DNA
gtttacccgccaatatatcctgtcaaacactgatagtttaaactgaaggcgggaaacgacaatctgatcatgagcggagaattaagggagtcacgttatgacccccgccgatgacgcgggacaagccgttttacgtttggaactgacagaaccgcaacgttgaaggagccactcagcaagctggtacgattgtaatacgactcactatagggcgaattgagcgctgtttaaacgctcttcaactggaagagcggttacgctgtttaaacgctcttcaactggaagagcggttactaccggttcactagctagctgctaatcgagctagttaccctatgaggtgacatgaagcgctcacggttactatgacggttagcttcacgactgttggtggcagtagcgtacgacttagctatagttccggacttacccttaagcgatttaaatctgcggttaccgaattcgagctcggtacctagtacccttgtacttttggtttcacctgcatagagaaaacccacaagaatatgacagtctgatttgtcagtctcattctcaagcaacatttctctatccgttactttcatggtgaataacacaatccatcatcaatactttgtgttactcagaaactgaaagttattccgagtcttgcatatctttggacctactcgtttttctaccattattgctgattgttaagctctcgctacttgaatcggcattgttggagtgggaaggttcaaaaaattggagttatgactagttgtctctttctatgtacgatggagaaaatgaataaacaactgagaaaatggctcttgtttagttgatgatgctcttaagctttccactggttgccatatatgatttgggcatttcactttgatcttaatgggccttgtaaagcccaagactcatgattatctttagttgatgctcttaattaggtgtgggcaaataattcaaactgtatgtacccgaccaaaaccaaagcaaaaataatcgaaccaaaccgaaaatttaaaaataaccgaatgaaaactaaatcctataactgaaagaactgaaaccgaatcaaaatatttaatgtaaccaaaaatatccgaaatataattatattgtcaaaaatattaataatttctagattaaataattaaaaatacttaaaaatttatataaaatagtaaaaatactcgaaaataaccacaaatattcaaaaacaaccgaaatatcccaaaatattcaaagcaaaataaccgaatggataccaaattttaaaaccgaaaaaactggaacaaaaccaaaatcgaaccaaaatttcaaaaatcgaataaatactaaactttagaacaaaaaaaaacgataaccgaatgtatacgaaccaaagccgaattagataaccgaacgtccaggactactcttaatctttccgccacttatgatttgggctattactttgtttataatgagccttttcaagctcaagttcatgattgtccgtgagatgagaaactgacttgttggattcgaaaccctagctagtattggttaatacttaatacataaatgacctgcattgacatcatcatccaagaaaataaaaattgtatgcttgagatatttagttttcctagctaggttttctttattttagtaccgaatctttaggtgtgccacgttaatttagacccattttttcatacttaccaactgagtctagtttaatcatgactataatcgtataaaatgattcagtcgacgtcattgcgaacgtatataaaatcatccaaattgacgtcattccaaagaggtaagcatgcttatctaagagtccgagcatactaaacaagacgacattttatttgcactccaaatcaaattttgtattgcctaaagaaaaacaatcaaactcaagtttcttaaaattaatttcattcaaactaatcactttcaatatctcacatattattcatgccatttctatttgtctaaacatgatttaaaaaaaaaagtaaaatacaaagattactatgcaaaaactctataaaaaaaaattcaaatttcttatttatttgtgacatcaaattttcaaaataatttttttaattatcggttgatccggtcagtcgataaaaacataaactttcagcgaccgttaaaactttcctactaccgatttagagaaaatcttagcttgaaacgtaattgtaacctgccttcatgcaagtcgcaagatatgtcatcctaagttgtatatgttttctcaaaagatgtatttacttgagaaaatacgtttcaacgttgatggacaaccaattaagaatcaagcacctttcgtaatcaatttaggcttatcgtctaaggtatactgatttacgacagttgactagacttataaggaacaaaataatagaatagtttctaaacacttcacctaatcatagagactaagatggtaattcgtaaacgacaaagcctagtgacactgtccattgtaaaattccacatcatattagtattaaacatatacatgtagtttcctgaacacatgtagtatcaaacacacttcgtggcttcttcctcgaaacctgcggccgcgctatagttccggacttacccttaagataacttcgtatagcatacattatacgaagttatgggcccacgcgtgaagagcggttaccagagctggtcacctttgtccaccaagatggaactgtcttcggccagaatggccatctggattcagcaggcctagaaggccatttatcgctatcaactttgtatagaaaagttgggccgaattcgagctcggtacggccagaatggcccggaccgaagcttctaactaactagctagagtctacgtgtaagccaaacactctttaaacccgctttaccaatatattggagttgtttaatgataaaggtggaaaaccgaagctacaatttctgaagtgaatccttccaaacatggccttaattaaattgtttgggagtacggttttttttacgatttctagacaatgtcatgttttttagtaatattatagtattttatgttataaaaggtttcgttcaattcctaaaaactatgtttttaaaatcaagatattatagataccatgatatttttacagtattgaaaattttgctctactctaaagtcttcatgacatgactaacctttgccgaatactatggcctacaattttacatataaataattacagagaacaatattgtaaaaccgtatttttgagaaatattggtgccaaacagagccttgagttgagaagctgatacattcggttcggccctgcaattccagacagatggttctggttgcagctcaaattctttggctggaagaagggcgcacgtcgctgtctctgatgagcaggctttagttggatcaaggtcgctgttgctcggtttatatggtccagtctaaatccgtctactgcttctatgcccaaaaaaagatcgatccactctctcgtaggatttgtttttgggaaggaaaaaaaaacaattcatatgccttgagtggaaaaaaatcgaaatggaaatgaaaggcttgctaattatcaaaggacattagctaagctctgcacatcactctaagtctttacccctactagtactacctaaggtattaaaaaaggagaataaaaaccaaaagcaaaaaaagaagaagaagaaaacttgtggccagggttgctttggcagcgtaacgttaacgacggccacaagttggggtggggtgggtggtgtgggccccgccgcaggatctttctgggcctcgaagctggccgcgtgacgtggcgccgaaaaagcgcagcgagaaatacttgtggccacgctttttgcggccacggatattcttcttttctttccctgcacaagcacagcacagcacggtgcacttcctatattattttacttttctgttacaaaaaaagagaggaaatgctcttggaatttcttgtggacacgacacagctaggaatttatccttctttcttgttcgtttcctttttcttatctagtaacgagaaaaccgtccgggtttatccgcggaaaaaatatctgctatttgaacggccgcagatatttgcggtgttttctcttttattttctctacgctgcttcgtgccctattgtcaacacgtggaaaccttcctatccactccaatcacttcactccacttctcaaattttcagaacaaacttctaaatttataatgaggctcaatgaaatatttaatttcgatacaatgctatagataaacaaaaccaccctgagaaattggggaaaaaaaagagaaagagaccctctatctcaaaagggaaaacagaggggtcagaacgtaaaatatccgcagagggcggaggtgggccctcccctcccggggcctccccagccactcgatccctggcccttctcgaaatttccagccctgacaggcggggcccacggccgacgtggcccgcctcccctcccctcccttcgcccccagaaatctcgccgctcccacccctctccttcctctcgccatttccatttccttgcccttgccagccagagcgagactccaccgcttcctctccgccgcgtcctcctcccctccctccgttcctcacggctctccggactcgccccgcggctggccgtgctgagtttcgttctctggccggcaaagaagcgatttttttgtgctttctggacggatcccggccggagaagggaccgaatttccacgacctcgaccgccggctgctcctctgctgggctctccgtgcgcaagaagagcctaccaaggtgaatccggagatttcagctccgggcccgcccctcccgggggatctcgactctagaggatcgctcaggaaggccgctgagatagaggcatggcggccaatgcgggcggcggtggagcgggaggaggcagcggcagcggcagcgtggctgcgccggcggtgtgccgccccagcggctcgcggtggacgccgacgccggagcagatcaggatgctgaaggagctctactacggctgcggcatccggtcgcccagctcggagcagatccagcgcatcaccgccatgctgcggcagcacggcaagatcgagggcaagaacgtcttctactggttccagaaccacaaggcccgcgagcgccagaagcgccgcctcaccagcctcgacgtcaacgtgcccgccgccggcgcggccgacgccaccaccagccaactcggcgtcctctcgctgtcgtcgccgccgccttcaggcgcggcgcctccctcgcccaccctcggcttctacgccgccggcaatggcggcggatcggctgtgctgctggacacgagttccgactggggcagcagcggcgctgccatggccaccgagacatgcttcctgcaggactacatgggcgtgacggacacgggcagctcgtcgcagtggccacgcttctcgtcgtcggacacgataatggcggcggccgcggcgcgggcggcgacgacgcgggcgcccgagacgctccctctcttcccgacctgcggcgacgacggcggcagcggtagcagcagctacttgccgttctggggtgccgcgtccacaactgccggcgccacttcttccgttgcgatccagcagcaacaccagctgcaggagcagtacagcttttacagcaacagcaacagcacccagctggccggcaccggcaaccaagacgtatcggcaacagcagcagcagccgccgccctggagctgagcctcagctcatggtgctccccttaccctgctgcagggagtatgtgagagcaacgcgagctgccactgctcttcactgatgtctctggaatggaaggaggaggaagtgagcatagcgttggtgcgttgctgtcaagggcgaattcacatggttaacctagacttgtccatcttctggattggccaacttaattaatgtatgaaataaaaggatgcacacatagtgacatgctaatcactataatgtgggcatcaaagttgtgtgttatgtgtaattactagttatctgaataaaagagaaagagatcatccatatttcttatcctaaatgaatgtcacgtgtctttataattctttgatgaaccagatgcatttcattaaccaaatccatatacatataaatattaatcatatataattaatatcaattgggttagcaaaacaaatctagtctaggtgtgttttgcgaatgcggccgccaccgcggtggagctcgaattccggtccgggcctagaaggccagcttcaagtttgtacaaaaaagcaggctccggccagaatggcccggaccgggttaccgaattcgagctcggtaccatttaaattgcgcccgccacggccgtggaggtcgtattccggtcagcttgcatccctgcagtgcagcgtgacccggtcgtgcccctctctagagataatgagcattgcatgtctaagttataaaaaattaccacatattttttttgtcacacttgtttgaagtgcagtttatctatctttatacatatatttaaactttactctacgaataatataatctatagtactacaataatatcagtgttttagagaatcatataaatgaacagttagacatggtctaaaggacaattgagtattttgacaacaggactctacagttttatctttttagtgtgcatgtgttctcctttttttttgcaaatagcttcacctatataatacttcatccattttattagtacatccatttagggtttagggttaatggtttttatagactaatttttttagtacatctattttattctattttagcctctaaattaagaaaactaaaactctattttagtttttttatttaataatttagatataaaatagaataaaataaagtgactaaaaattaaacaaataccctttaagaaattaaaaaaactaaggaaacatttttcttgtttcgagtagataatgccagcctgttaaacgccgtcgacgagtctaacggacaccaaccagcgaaccagcagcgtcgcgtcgggccaagcgaagcagacggcacggcatctctgtcgctgcctctggacccctctcgagagttccgctccaccgttggacttgctccgctgtcggcatccagaaattgcgtggcggagcggcagacgtgagccggcacggcaggcggcctcctcctcctctcacggcaccggcagctacgggggattcctttcccaccgctccttcgctttcccttcctcgcccgccgtaataaatagacaccccctccacaccctctttccccaacctcgtgttgttcggagcgcacacacacacaaccagatctcccccaaatccacccgtcggcacctccgcttcaaggtacgccgctcgtcctcccccccccccctctctaccttctctagatcggcgttccggtccatgcatggttagggcccggtagttctacttctgttcatgtttgtgttagatccgtgtttgtgttagatccgtgctgctagcgttcgtacacggatgcgacctgtacgtcagacacgttctgattgctaacttgccagtgtttctctttggggaatcctgggatggctctagccgttccgcagacgggatcgatttcatgattttttttgtttcgttgcatagggtttggtttgcccttttcctttatttcaatatatgccgtgcacttgtttgtcgggtcatcttttcatgcttttttttgtcttggttgtgatgatgtggtctggttgggcggtcgttctagatcggagtagaattctgtttcaaactacctggtggatttattaattttggatctgtatgtgtgtgccatacatattcatagttacgaattgaagatgatggatggaaatatcgatctaggataggtatacatgttgatgcgggttttactgatgcatatacagagatgctttttgttcgcttggttgtgatgatgtggtgtggttgggcggtcgttcattcgttctagatcggagtagaatactgtttcaaactacctggtgtatttattaattttggaactgtatgtgtgtgtcatacatcttcatagttacgagtttaagatggatggaaatatcgatctaggataggtatacatgttgatgtgggttttactgatgcatatacatgatggcatatgcagcatctattcatatgctctaaccttgagtacctatctattataataaacaagtatgttttataattattttgatcttgatatacttggatgatggcatatgcagcagctatatgtggatttttttagccctgccttcatacgctatttatttgcttggtactgtttcttttgtcgatgctcaccctgttgtttggtgttacttctgcaggtcgactctagaggatccatggccactgtgaacaactggctcgctttctccctctccccgcaggagctgccgccctcccagacgacggactccacactcatctcggccgccaccgccgaccatgtctccggcgatgtctgcttcaacatcccccaagattggagcatgaggggatcagagctttcggcgctcgtcgcggagccgaagctggaggacttcctcggcggcatctccttctccgagcagcatcacaaggccaactgcaacatgatacccagcactagcagcacagtttgctacgcgagctcaggtgctagcaccggctaccatcaccagctgtaccaccagcccaccagctcagcgctccacttcgcggactccgtaatggtggcttcctcggccggtgtccacgacggcggtgccatgctcagcgcggccgccgctaacggtgtcgctggcgctgccagtgccaacggcggcggcatcgggctgtccatgattaagaactggctgcggagccaaccggcgcccatgcagccgagggtggcggcggctgagggcgcgcaggggctctctttgtccatgaacatggcggggacgacccaaggcgctgctggcatgccacttctcgctggagagcgcgcacgggcgcccgagagtgtatcgacgtcagcacagggtggagccgtcgtcgtcacggcgccgaaggaggatagcggtggcagcggtgttgccggcgctctagtagccgtgagcacggacacgggtggcagcggcggcgcgtcggctgacaacacggcaaggaagacggtggacacgttcgggcagcgcacgtcgatttaccgtggcgtgacaaggcatagatggactgggagatatgaggcacatctttgggataacagttgcagaagggaagggcaaactcgtaagggtcgtcaagtctatttaggtggctatgataaagaggagaaagctgctagggcttatgatcttgctgctctgaagtactggggtgccacaacaacaacaaattttccagtgagtaactacgaaaaggagctcgaggacatgaagcacatgacaaggcaggagtttgtagcgtctctgagaaggaagagcagtggtttctccagaggtgcatccatttacaggggagtgactaggcatcaccaacatggaagatggcaagcacggattggacgagttgcagggaacaaggatctttacttgggcaccttcagcacccaggaggaggcagcggaggcgtacgacatcgcggcgatcaagttccgcggcctcaacgccgtcaccaacttcgacatgagccgctacgacgtgaagagcatcctggacagcagcgccctccccatcggcagcgccgccaagcgcctcaaggaggccgaggccgcagcgtccgcgcagcaccaccacgccggcgtggtgagctacgacgtcggccgcatcgcctcgcagctcggcgacggcggagccctggcggcggcgtacggcgcgcactaccacggcgccgcctggccgaccatcgcgttccagccgggcgccgccagcacaggcctgtaccacccgtacgcgcagcagccaatgcgcggcggcgggtggtgcaagcaggagcaggaccacgcggtgatcgcggccgcgcacagcctgcaggacctccaccacctgaacctgggcgcggccggcgcgcacgactttttctcggcagggcagcaggccgccgccgctgcgatgcacggcctgggtagcatcgacagtgcgtcgctcgagcacagcaccggctccaactccgtcgtctacaacggcggggtcggcgacagcaacggcgccagcgccgtcggcggcagtggcggtggctacatgatgccgatgagcgctgccggagcaaccactacatcggcaatggtgagccacgagcaggtgcatgcacgggcctacgacgaagccaagcaggctgctcagatggggtacgagagctacctggtgaacgcggagaacaatggtggcggaaggatgtctgcatgggggactgtcgtgtctgcagccgcggcggcagcagcaagcagcaacgacaacatggccgccgacgtcgggcatggcggcgcgcagctcttcagtgtctggaacgacacttaagcgtacgtgccggcctggctctccgaaagggcgtattccagcacactggcggccgttactagacccaacctagacttgtccatcttctggattggccaacttaattaatgtatgaaataaaaggatgcacacatagtgacatgctaatcactataatgtgggcatcaaagttgtgtgttatgtgtaattactagttatctgaataaaagagaaagagatcatccatatttcttatcctaaatgaatgtcacgtgtctttataattctttgatgaaccagatgcatttcattaaccaaatccatatacatataaatattaatcatatataattaatatcaattgggttagcaaaacaaatctagtctaggtgtgttttgcgaatgcggcctccgggcacccagctttcttgtacaaagtggccgttaacggatcggccagaatggcccggaccgggttaccgaattcgagctcggtaccctggttcacaaactcaatacaacacacagtggagtagggtattacgctccggcggcccgaaccactctaaatccttgtgtcctcgtgtgctcttccaccattaatgactgtaattgcagggacacgaagagttgtagcgcttttgccaacaagatccgctatatgctagtagagtggaacctgcacagcaacaagcatccaataatctgagaataagaattatgtgtggtgatggttctcatctctgcaactcgccattttcgcgagagaaccaaatccaagttggtgaagatcatgatttgggctcatgggctggcatagtagctattacctttgcaattgtggttcgaatctatccgatattctccttttcagggagagctaatgcttatgcttattgggtattttggtttgacactgcttcacgcccaaaaaaaggcaactatgtctgagttggatatggcccaaaaaaaggcagctatgtctgagttggatatggaagtcttctttcgtttagggtgaagtaagaccaagctcatgagcttattatcttaggtcggaacaaattagttgataggcatggcacatttatcaaattataatgattttaacagaaaagcaacacctctttttcagcagcaccagctttgcaagctgcaattgacactccaagcatagtatttgctccaaactcagcctgcatttcgcacaatatcatatctatttccatttggataaaatatattttccagaaatatgggaacagaatcaagatacagaaaaaagttgtggtagtagtggtaagtggaaacacaagtacagtgaaaagatagcattatttctgaacagtcaaattaaccgaaataagtagtatcacatactgcccctaaattgactacacccaatgtaaagaattgcttgagcatattgagccatcagttgtttgtttgtgtaacggatttgacaatgcagagttcaggagcaaaaaaccgcaaaggagagaaagagggaaaggatctcctagtatcccaccttgtggcgcgccctgtcaagtgcatgatggcctggtcgatctgcgtctgctgctgcggttccatcccaacgagtgcctccgacaccttgtcgttgatcacccgcaccgcgtaggcgacccccctggcgaggaacttccgcctctcggaggccccggccgcgtcggcggcggcgccctcgagcgcgcccacgctagccgtagatgctcggtgcacggccttgttggtgtgcaactcgacctcaacggccggtgcgctacgcccgtcaaggatctggcgcgcccgcaccctcgtgatcacggtgggcgcctcccgcctcatgtggccgacgatgaaaagcgccgggttaggggccttggcgcgcaccgccgtattcagggcctcctcgctcttgcgcgagagcaggtgcttccccaggtactcctgcactgacaaggctgccacagcggtggaatttgtcctcacgacttcgccacgtcgtcctcacctccctggcttcccacgactccgccgtatcgaggtgctcggtgggtcgtcttaatccgaagtccgaactaggaagacgagacagagaggtctgaggaatgggcctcgtttgatgttgagctgaattatttttccagcataagcccaggtcttggtccatgaacaaaattactagaaacccagcccagtactacgatctaaaagagggactgccactggatagctctctctagcattctccacgctccaatacagcggcgtcgtgtctatccgggtctatccgcgaacacgtgagaactctccagaaactgctttctcctccacttcatctctctcgctttccctctataaaaagaccccttctaggaattgagggagacagcaagcaccaagcagcgatccgaagctcaatcaattcactcaaacctcttccccaaatcttcgattagatcttcgttgacaagaagactagaaccgaacctgacatgtccaacctgctcacggttcaccagaaccttccggctcttccagtggacgcgacgtccgatgaagtcaggaagaacctcatggacatgttccgcgacaggcaagcgttcagcgagcacacctggaagatgctgctctccgtctgccgctcctgggctgcatggtgcaagctgaacaacaggaagtggttccccgctgagcccgaggacgtgagggattaccttctgtacctgcaagcgcgaggtttgtttctgcttctacctttgatatatatataataattatcattaattagtagtaatataatatttcaaatatttttttcaaaataaaagaatgtagtatatagcaattgcttttctgtagtttataagtgtgtatattttaatttataacttttctaatatatgaccaaaacatggtgatgcctaggtctggcagtgaagaccatccagcaacaccttggacaactgaacatgcttcacaggcgctccggcctcccgcgccccagcgactcgaacgccgtgagcctcgtcatgcgccgcatcaggaaggaaaacgtcgatgccggcgaaagggcaaagcaggccctcgcgttcgagaggaccgatttcgaccaggtccgcagcctgatggagaacagcgacaggtgccaggacattaggaacctggcgttcctcggaattgcatacaacacgctcctcaggatcgcggaaattgcccgcattcgcgtgaaggacattagccgcaccgacggcggcaggatgcttatccacattggcaggaccaagacgctcgtttccaccgcaggcgtcgaaaaggccctcagcctcggagtgaccaagctcgtcgaacgctggatctccgtgtccggcgtcgcggacgacccaaacaactacctcttctgccgcgtccgcaagaacggggtggctgcccctagcgccaccagccaactcagcacgagggccttggaaggtattttcgaggccacccaccgcctgatctacggcgcgaaggatgacagcggtcaacgctacctcgcatggtccgggcactccgcccgcgttggagctgctagggacatggcccgcgccggtgtttccatccccgaaatcatgcaggcgggtggatggacgaacgtgaacattgtcatgaactacattcgcaaccttgacagcgagacgggcgcaatggttcgcctcctggaagatggtgactgaggtacccaacctagacttgtccatcttctggattggccaacttaattaatgtatgaaataaaaggatgcacacatagtgacatgctaatcactataatgtgggcatcaaagttgtgtgttatgtgtaattactagttatctgaataaaagagaaagagatcatccatatttcttatcctaaatgaatgtcacgtgtctttataattctttgatgaaccagatgcatttcattaaccaaatccatatacatataaatattaatcatatataattaatatcaattgggttagcaaaacaaatctagtctaggtgtgttttgcgatccgatatcgaattggccacggtaccagctgctgctgttctagggttcacaagtctgcctatttgtcttccccaatggagctatggttgtctggtctggtccttggtcgtgtcccgtttcattgtgtactatttacctgtaatgtgtatccttaagtctggtttgatggtgtctgaaacgttttgctgtggtagagcagcatggaagaactataatgaataagtgatccctaatcattgtgtccaaattttgcttctgctatacccttttgtgctgtttcttatgttttgcttaaaaatttgatctgacaaacaaatttgtctaaattatgctcttgttctgactgtgtactgtacacatttgtattgctaccggtttggcacatagttttctctttgattgcagatcaaacccttctgattgcagattgcttggctatggctgatgtgctcactgttcttctttagcttgtatattgctgatggtggcttggctacggctgaaaaagttgctgctgcgccgacttggcaactgttgctccagtaatgctttgtcctctcttcctagccgccgacttggcacttggcagctgttgctcctgtaatgcgttgttatctcttatctcttgagatgtactatgattttgaggctgtttgacttgtgccagattgccagtgctgatgctatattatctcaggtttttatgctagtatatgttttactgtgtgctgcctgtgtcgagttacgtaatctattgaaccgctatgcgtgttgatgccctgttgttgcttgccagattgatgcccctgttgcttgcagcttgcaagctgtagtgaaatcctaaaattccaaaccaaatctattctgaacttttgaagatctgtgatgtccggaagaaaagattcaaacagataaacgggactctccagaatctataaaataaatgatcgacaaacgctttgctttggtaggcttcaagcttggtcacccggtccgggcctagaaggccagcttcggccgccccgggcaactttattatacaaagttgatagataaatcagatatctggttcctaaggacccggcggaccgattaaactgattcggtccgacgcgttacctaataacttcgtatagcatacattatacgaagttattagctaactaactagtaagcttaagccatgggtcgacggatccgttaactagcgtggcatttggcaccgccgcacactatgcgagctaggagtgctagtttacagatgaaactatgaaaccaagaaaacacaattgtccgtagctagcgcgtggcgtcgtgtcaagcttcacacagtatcttcgttcttcactataaatcgcgcctgttgttcgtgagacccaccaccgtggataacagtcccctaataataagcgatcaacagcactgctgatggctgaacaccgaggcgccgccgcgcgtaaccatccgccggagcagcccgtcgtgccggcgaacgacgccttccccgaccgcgcccagcagctctgcctcgacgccgggcgcgcgctcgcgatgtgcggcgtgctcgtcgccgtccctcccgcattttacgcgtcgacgtcgcggacgacaccgcacttgccttcgtcggcttcgtcctctggatcatcggtgcgtggctgtgcctcctggcgctcacgcccttggctccacgggcggtgagggcgggcggggccgccgccagcaccttgctgatcaggtgcctgtccctttcatgaactactagcgcccgcgcccgcggccgccgggcacaagagaacacatcgatgttcgctgcgtacgtcagcaataaggcactctttgtcagtagtcgagtgcatatgttgggtgtttgccctgggagatttcaagtgttgtggccattatcccgcaggataaaaaatcggcggcttttggattgatacggaaaataacgatgtttcatgctcgtgttgtgtgtgtgacatcttgtcagccaagtttttaaccgttgctactccccctctgtgggctcagtgtgtggaccggaatacgtcgtacataggccgtagcctaagcccaatatgccgtttttcaggttggcctgtgtgacgacaagcgggtctcaaaagcccatcacgcaactggcctgcaattattggaggagagcgcgtcgagttggttccagaggctgcgtggtggggccggactctgcgacgacctctcgttcgcgtccgatttggttgccgtgagccgtgacgtaacgcctccttccgttcctccctatataagttccacccccgggtccggtttccccaagccccagtgacccccgatcccgatcgcgaaatctccgcacccgccggcaagggaccgaagcaagcctctctcccgaccgtcgcatcaaggtacgcgtccgctcgatctgtcctcttccttctcgatttgacttgctgtggtgcccgatcacgggatcagaatcgcaccagtgtagatttcgcatgttctaagatgtgttagtttccaggctaatccagttctcttgacgcccgatccgatcgagctccgtgtttatttcagcctaatcgtagtattcccctaaaatttcctcattagggggttcgcaagattgttggtcgacaggttcacttatgctcgatcgcttacttttagtcgattcatgctgcgtactattgttgccccccgtggttttatcttttctcgtgtgaaatccagtagatatagtagatatcgtagcattaggttttaattcaatcgattgattattgtatcatcaaaattgagaagttcgaatcatgcctatcatgctgcctcaaccgaaatcctgtatattgaagtttcaattcaattgattgatcattcattagattcaaccaaaatctagaaggttagatgacgcatgtcatgctgcctgcgtagtttacctttgatctgtttatgattaccttatcagtaggatatttgtgattttgggaagtagcactaactgattcatgctgacatgatgttccctttcagattatactgttgagtcctatctaattgatgctttgtatgctatatgaatacgtcatggtaaattagcagttaattagcatattagcaattgggcgtacctcatcaggattgctcttgtagatgtgtgtggtgatgtttcttgttcaattcatgttctgctttaaaagtatgtgttctctgtttgttaattaagattcatggttataatgatttggacctaattaatcagggttgcccttttagatgcgtggttacttgttgagttcatttttttcctgctatagttgtatgcgtttgttcattcatggttagatttgatttgtttcttctctattccatgccttccatatacttcaattgtagcttaacatgagatttctgtatatgcaggtcgaccgccggggatccacacgacaccatggcccagtccaagcacggcctgaccaaggagatgaccatgaagtaccgcatggagggctgcgtggacggccacaagttcgtgatcaccggcgagggcatcggctaccccttcaagggcaagcaggccatcaacctgtgcgtggtggagggcggccccttgcccttcgccgaggacatcttgtccgccgccttcatgtacggcaaccgcgtgttcaccgagtacccccaggacatcgtcgactacttcaagaactcctgccccgccggctacacctgggaccgctccttcctgttcgaggacggcgccgtgtgcatctgcaacgccgacatcaccgtgagcgtggaggagaactgcatgtaccacgagtccaagttctacggcgtgaacttccccgccgacggccccgtgatgaagaagatgaccgacaactgggagccctcctgcgagaagatcatccccgtgcccaagcagggcatcttgaagggcgacgtgagcatgtacctgctgctgaaggacggtggccgcttgcgctgccagttcgacaccgtgtacaaggccaagtccgtgccccgcaagatgcccgactggcacttcatccagcacaagctgacccgcgaggaccgcagcgacgccaagaaccagaagtggcacctgaccgagcacgccatcgcctccggctccgccttgccctccggactcagatctcgatagagtcaacctagacttgtccatcttctggattggccaacttaattaatgtatgaaataaaaggatgcacacatagtgacatgctaatcactataatgtgggcatcaaagttgtgtgttatgtgtaattactagttatctgaataaaagagaaagagatcatccatatttcttatcctaaatgaatgtcacgtgtctttataattctttgatgaaccagatgcatttcattaaccaaatccatatacatataaatattaatcatatataattaatatcaattgggttagcaaaacaaatctagtctaggtgtgttttgcgaattgcggcgcccttactttaacgcctctaaccaacacccctttatctttataaggaacaataaacagaatttgccccactgttctaaatcacctaataatatccccagctaaaaacaataaaggtttcctagaattaagacaagcatgactgttcctccaggagggtttggaacattgttgcagtcttgcagatacgggcgaagggtgagaaacagagcggagggctggaggtgacctcggtagtcgacgccggagttgagcttgacaacgacggggcggcccctgatggacttgaggaagtccgatggcgtcttcaccgtcccgccggcgcccgaggcgggcctgtcgctgccgccgccgccgctgctcatcttgcgcgctgtgcccccggcggtgtccctgtgttgcggatcgcgggtgggccaggtggatgcgagggcgacccgtttggactccggccggagccgccggatccctggtcggtgtcagtgccgtttactctgggccccacgtgtcagtaccgtctgtagatgacaacaacccgtcgtccacagtcatgtccaaaatatcctttcttcttttttttcgattcggatatctatcttccttttttttttccaaaaatcttcttgacgcaccagcgcgcacgtttgtggtaaacgccgacacgtcggtcccacgtcgatagaccccacccaccagtgagtagcgtgtacgtattcgggggtgacggacgtgtcgccgtcgtcttgctagtcccattcccatctgagccacacatctctgaacaaaaaaaaggagggaggcctccacgcacatccccctccgtgccacccgccccaaaccctcgcgccgcctccgagacagccgccgcaaccatggccaccgccgccgccgcgtctaccgcgctcactggcgccactaccgctgcgcccaaggcgaggcgccgggcgcacctcctggccacccgccgcgccctcgccgcgcccatcaggtgctcagcggcgtcacccgccatgccgatggctcccccggccaccccgctccggccgtggggccccaccgagccccgcaagggtgctgacatcctcgtcgagtccctcgagcgctgcggcgtccgcgacgtcttcgcctaccccggcggcgcgtccatggagatccaccaggcactcacccgctcccccgtcatcgccaaccacctcttccgccacgagcaaggggaggcctttgccgcctccggctacgcgcgctcctcgggccgcgtcggcgtctgcatcgccacctccggccccggcgccaccaacctagtctccgcgctcgccgacgcgctgctcgattccgtccccatggtcgccatcacgggacaggtggcgcgacgcatgattggcaccgacgccttccaggagacgcccatcgtcgaggtcacccgctccatcaccaagcacaactacctggtcctcgacgtcgacgacatcccccgcgtcgtgcaggaggctttcttcctcgcctcctctggtcgaccagggccggtgcttgtcgacatccccaaggacatccagcagcagatggcggtgcctgtctgggacaagcccatgagtctgcctgggtacattgcgcgccttcccaagccccctgcgactgagttgcttgagcaggtgctgcgtcttgttggtgaatcgcggcgccctgttctttatgtgggcggtggctgcgcagcatctggtgaggagttgcgacgctttgtggagctgactggaatcccggtcacaactactcttatgggcctcggcaacttccccagcgacgacccactgtctctgcgcatgctaggtatgcatgggacggtgtatgcaaattatgcagtggataaggccgatctgttgcttgcacttggtgtgcggtttgatgatcgcgtgacagggaagattgaggcttttgcaagcagggctaagattgtgcacgttgatattgatccggctgagattggcaagaacaagcagccacatgtgtccatctgtgcagatgttaagcttgctttgcagggcatgaatgctcttcttgaaggaagcacatcaaagaagagctttgactttggctcatggaacgatgagttggatcagcagaagagggaattcccccttgggtataaaacatctaatgaggagatccagccacaatatgctattcaggttcttgatgagctgacgaaaggcgaggccatcatcggcacaggtgttgggcagcaccagatgtgggcggcacagtactacacttacaagcggccaaggcagtggttgtcttcagctggtcttggggctatgggatttggtttgccggctgctgctggtgcttctgtggcaaacccaggtgtcactgttgttgacatcgatggagatggtagctttctcatgaacgttcaggagctagctatgatccgaattgagaacctcccagtgaaggtctttgtgctaaacaaccagcacctggggatggtggtgcagttggaggacaggttctataaggccaacagagcgcacacatacttgggaaacccagagaatgaaagtgagatatatccagatttcgtgacgatcgccaaagggttcaacattccagcggtccgtgtgacaaagaagaacgaagtccgcgcagcgataaagaagatgctcgagactccagggccgtacctcttggatataatcgtcccacaccaggagcatgtgttgcctatgatccctagtggtggggctttcaaggatatgatcctggatggtgatggcaggactgtgtactgactagctagtcagttaacagatctgccagatcctcggtgtacaaataacccgtcttatcctatgagacgggccggcgtcagtgtgttctggaggaatttttatgtcagagcctttttctttgtgtgcttgatgtagatgccaagggaagcttattggctgttgaagcttgatgcaaaataaattatggaactctgttttttgtttatctaataataactagcaaatatgcttccattgcattgaaactaacagccttttgtgtttccaagttttattttgtgacaatgtcatctatttcaattagttgtggaatcggaaacttgcaggactaacttggaaactccaatccctcagcatcctggactttttcctggtgtaatccatgtagatattattttaatcatcattttagttctggaggtttttccatctccggttttgctcccctttcttcaaaaaaaaaaaaaaaatgccgtaggcgccgcaacgcccacctgttgttcaaactcatgggcacgagtggctcgaagattttatacaacaattgctgtagtttcaccgttgctggtgaagaagcatttttttaaaaaaatatagtggtattcattttaattagtttagttgtgcagcgagcaaaatttggacatgctctgctcggaatctgatcgacctagacacagattagcagcagtagctttgtcatctgttccaagagttgcgatctgatagaagaaaaaaaaaccttcccttcaatgtaaaaccgaaactaacaagaaagaagcacagtgccgtttaggcaagtatggagtacgtattaagcatgtagaaggccatgcatgaaccactaacaagaaagaagcgcagtgccattcaggcaagcataagcatgtagattggcatgcatgaacaactaacagtagatcgtctctggtctgattagaagttttttgggaagccaagaaatcatgtacaactggttccatctcaaattccgtggcaaaaagaggcctaagcaacatacctcgagtagatcacattcaagcttggtcacccggtccgtcaatattctgattccgatgacttcgtaggttcctagctcaagccgctcgtgtccaagcgtcacttacgattagctaatgattacggcatctaggaccgactagtggcgcgccgactagctagctaaggtaccgagctcgaattcattccgattaatcgtggcctcttgctcttcaggatgaagagctatgtttaaacgtgcaagcgctactagacaattcagtacattaaaaacgtccgcaatgtgttattaagttgtctaagcgtcaatttgtttacaccacaatatatcctgcca

SEQ ID NO: 74 - DNA, 20874 bp, synthetic construct
  misc_feature 1..20874: note = PHP96751
  source 1..20874: mol_type = other DNA
gtttacccgccaatatatcctgtcaaacactgcggccgcacttgaccgcggatggagccggagctgtggtgaggccatcgacgggaggtgggggagaacacagtctcagtgttctttgtgagtccgcaaggtttttagcttttctgtattaattaaggttgctgttggctgtagaatacggtcgtggaagagctgtatcggtagctactacgtaagctattatatactggaagtctggagctcgtcgatctccggtcgtcttcctccatttctcctcgtcttgctttgactgctgctaccatttgcttctgttttctgatgaagcatgccatgtcggccaccagtgtttgtgtggtttttgcagggaatggctttcaagtgctgtgattgaatggccctcgtcgtcctcggctgagctcacatggacgcgtcatgtgagtgagatatatgatcatatgatgagtggggttcgggtgagtgcgtacttgaagtaggatcccgctttcactcattcattcattggcctttaaaccgggaaattttcgcgaggagatggagggaagcaagcagggtgacgagtgcagagtgccgcgagcgctttgtcaaaaggcaccgccgtaggcaaaaaaatcaatggccctgactgactcgatggtagtactactgtagagactagagagggttgctccccatatcttcgtgtgacttttactccagcattgcatttccgtcattgagacgttaattaatagcagctttcgggacagatgactgtggccatgtttcgtcacggccgcttcgtgccagctgggggtactatagtactgtgattttgttagtaaaaactttcattaggccaccattgacgaccgggccttcgcttttgctgcgctaattaaccatttcccggcgaccgaagggaacatgaacatgccccgacacatgagggcatgaggactagtgttctccctgtcgttcgttgacttgactagtgatagtttaaacgctcttcaactggaagagcggttactaccggttcactagctagctgctaatcgagctagttaccctatgaggtgacatgaagcgctcacggttactatgacggttagcttcacgactgttggtggcagtagcgtacgacttagctatagttccggacttacctagctaataacttcgtatagcatacattatacgaagttatggttaccgccctggccgaagctttccggacttacccttaagcgatttaaatcctgaggcctgcaacactgatagtttaaactgaaggcgggaaacgacaatctgatcatgagcggagaattaagggagtcacgttatgacccccgccgatgacgcgggacaagccgttttacgtttggaactgacagaaccgcaacgattgaaggagccactcagccgcgggtttctggagtttaatgagctaagcacatacgtcagaaaccattattgcgcgttcaaaagtcgcctaaggtcactatcagctagcaaatatttcttgtcaaaaatgctccactgacgttccataaattcccctcggtatccaattagagtctcatattcactcccatggcggccaatgcgggcggcggtggagcgggaggaggcagcggcagcggcagcgtggctgcgccggcggtgtgccgccccagcggctcgcggtggacgccgacgccggagcagatcaggatgctgaaggagctctactacggctgcggcatccggtcgcccagctcggagcagatccagcgcatcaccgccatgctgcggcagcacggcaagatcgagggcaagaacgtcttctactggttccagaaccacaaggcccgcgagcgccagaagcgccgcctcaccagcctcgacgtcaacgtgcccgccgccggcgcggccgacgccaccaccagccaactcggcgtcctctcgctgtcgtcgccgccgccttcaggcgcggcgcctccctcgcccaccctcggcttctacgccgccggcaatggcggcggatcggctgtgctgctggacacgagttccgactggggcagcagcggcgctgctatggccaccgagacatgcttcctgcaggactacatgggcgtgacggacacgggcagctcgtcgcagtggccacgcttctcgtcgtcggacacgataatggcggcggccgcggcgcgggcggcgacgacgcgggcgcccgagacgctccctctcttcccgacctgcggcgacgacggcggcagcggtagcagcagctacttgccgttctggggtgccgcgtccacaactgccggcgccacttcttccgttgcgatccaacagcaacaccagctgcaggagcagtacagcttttacagcaacagcaacagcacccagctggccggcaccggcaaccaagacgtatcggcaacagcagcagcagccgccgccctggagctgagcctcagctcatggtgctccccttaccctgctgcagggagtatgtgagagcaacgcgagctgccactgctcttcactgatgtctctggaatggaaggaggaggaagtgagaacagatcattcgacaaagcagcattagtccgttgatcggtggaagaccactcgtcagtgttgagttgaatgtttgatcaataaaatacggcaatgctgtaagggttgttttttatgccattgataatacactgtactgttcagttgttgaactctatttcttagccatgccaagtgcttttcttattttgaataacattacagcaaaaagttgaaagacaaaaaaaaaaacccccgaacagagtgctttgggtcccaagcttctttagactgtgttcggcgttccccctaaatttctccccctatatctcactcacttgtcacatcagcgttctctttccccctatatctccacgctctacagcagttccacctatatcaaacctctataccccaccacaacaatattatatactttcatcttcaactaactcatgtaccttccaatttttttctactaataattatttacgtgcacagaaacttagcaaggagagagagagcgggaatttaaatgctcggcgttaggcttttagtccgctaggtggctagaccgaggttaggacgctagttcactaggggcctagtggtgttttaagacgtcacggtcaccgcggccgcatcgagcagctggcttgtggggaccagacaaaaaaggaatggtgcagaattgttaggcgcacctaccaaaagcatctttgcctttattgcaaagataaagcagattcctctagtacaagtggggaacaaaataacgtggaaaagagctgtcctgacagcccactcactaatgcgtatgacgaacgcagtgacgaccacaaaactcgagcaacgagatcatgagccaatcaaagaggagtgatgtagacctaaagcaataatggagccatgacgtaagggcttacgcccatacgaaataattaaaggctgatgtgacctgtcggtctctcagaacctttactttttatgtttggcgtgtatttttaaatttccacggcaatgacgatgtgaccgtcgacccactaaaacattgctttgtcaaaagctaaaaaagatgatgcccgacagccacttgtgtgaagcatgagaagccggtccctccactaagaaaattagtgaagcatcttccagtggtccctccactcacagctcaatcagtgagcaacaggacgaaggaaatgacgtaagccatgacgtctaatcccattcgaaacgcgtggaccgaagcttgcatgcctgcagtgcagcgtgacccggtcgtgcccctctctagagataatgagcattgcatgtctaagttataaaaaattaccacatattttttttgtcacacttgtttgaagtgcagtttatctatctttatacatatatttaaactttactctacgaataatataatctatagtactacaataatatcagtgttttagagaatcatataaatgaacagttagacatggtctaaaggacaattgagtattttgacaacaggactctacagttttatctttttagtgtgcatgtgttctcctttttttttgcaaatagcttcacctatataatacttcatccattttattagtacatccatttagggtttagggttaatggtttttatagactaatttttttagtacatctattttattctattttagcctctaaattaagaaaactaaaactctattttagtttttttatttaataatttagatataaaatagaataaaataaagtgactaaaaattaaacaaataccctttaagaaattaaaaaaactaaggaaacatttttcttgtttcgagtagataatgccagcctgttaaacgccgtcgacgagtctaacggacaccaaccagcgaaccagcagcgtcgcgtcgggccaagcgaagcagacggcacggcatctctgtcgctgcctctggacccctctcgagagttccgctccaccgttggacttgctccgctgtcggcatccagaaattgcgtggcggagcggcagacgtgagccggcacggcaggcggcctcctcctcctctcacggcaccggcagctacgggggattcctttcccaccgctccttcgctttcccttcctcgcccgccgtaataaatagacaccccctccacaccctctttccccaacctcgtgttgttcggagcgcacacacacacaaccagatctcccccaaatccacccgtcggcacctccgcttcaaggtacgccgctcgtcctcccccccccccctctctaccttctctagatcggcgttccggtccatgcatggttagggcccggtagttctacttctgttcatgtttgtgttagatccgtgtttgtgttagatccgtgctgctagcgttcgtacacggatgcgacctgtacgtcagacacgttctgattgctaacttgccagtgtttctctttggggaatcctgggatggctctagccgttccgcagacgggatcgatttcatgattttttttgtttcgttgcatagggtttggtttgcccttttcctttatttcaatatatgccgtgcacttgtttgtcgggtcatcttttcatgcttttttttgtcttggttgtgatgatgtggtctggttgggcggtcgttctagatcggagtagaattctgtttcaaactacctggtggatttattaattttggatctgtatgtgtgtgccatacatattcatagttacgaattgaagatgatggatggaaatatcgatctaggataggtatacatgttgatgcgggttttactgatgcatatacagagatgctttttgttcgcttggttgtgatgatgtggtgtggttgggcggtcgttcattcgttctagatcggagtagaatactgtttcaaactacctggtgtatttattaattttggaactgtatgtgtgtgtcatacatcttcatagttacgagtttaagatggatggaaatatcgatctaggataggtatacatgttgatgtgggttttactgatgcatatacatgatggcatatgcagcatctattcatatgctctaaccttgagtacctatctattataataaacaagtatgttttataattattttgatcttgatatacttggatgatggcatatgcagcagctatatgtggatttttttagccctgccttcatacgctatttatttgcttggtactgtttcttttgtcgatgctcaccctgttgtttggtgttacttctgcaggtcgactttaacttagcctaggatccatggccactgtgaacaactggctcgctttctccctctccccgcaggagctgccgccctcccagacgacggactccacactcatctcggccgccaccgccgaccatgtctccggcgatgtctgcttcaacatcccccaagattggagcatgaggggatcagagctttcggcgctcgtcgcggagccgaagctggaggacttcctcggcggcatctccttctccgagcagcatcacaaggccaactgcaacatgatacccagcactagcagcacagtttgctacgcgagctcaggtgctagcaccggctaccatcaccagctgtaccaccagcccaccagctcagcgctccacttcgcggactccgtaatggtggcttcctcggccggtgtccacgacggcggtgccatgctcagcgcggccgccgctaacggtgtcgctggcgctgccagtgccaacggcggcggcatcgggctgtccatgattaagaactggctgcggagccaaccggcgcccatgcagccgagggtggcggcggctgagggcgcgcaggggctctctttgtccatgaacatggcggggacgacccaaggcgctgctggcatgccacttctcgctggagagcgcgcacgggcgcccgagagtgtatcgacgtcagcacagggtggagccgtcgtcgtcacggcgccgaaggaggatagcggtggcagcggtgttgccggcgctctagtagccgtgagcacggacacgggtggcagcggcggcgcgtcggctgacaacacggcaaggaagacggtggacacgttcgggcagcgcacgtcgatttaccgtggcgtgacaaggcatagatggactgggagatatgaggcacatctttgggataacagttgcagaagggaagggcaaactcgtaagggtcgtcaagtctatttaggtggctatgataaagaggagaaagctgctagggcttatgatcttgctgctctgaagtactggggtgccacaacaacaacaaattttccagtgagtaactacgaaaaggagctcgaggacatgaagcacatgacaaggcaggagtttgtagcgtctctgagaaggaagagcagtggtttctccagaggtgcatccatttacaggggagtgactaggcatcaccaacatggaagatggcaagcacggattggacgagttgcagggaacaaggatctttacttgggcaccttcagcacccaggaggaggcagcggaggcgtacgacatcgcggcgatcaagttccgcggcctcaacgccgtcaccaacttcgacatgagccgctacgacgtgaagagcatcctggacagcagcgccctccccatcggcagcgccgccaagcgcctcaaggaggccgaggccgcagcgtccgcgcagcaccaccacgccggcgtggtgagctacgacgtcggccgcatcgcctcgcagctcggcgacggcggagccctggcggcggcgtacggcgcgcactaccacggcgccgcctggccgaccatcgcgttccagccgggcgccgccagcacaggcctgtaccacccgtacgcgcagcagccaatgcgcggcggcgggtggtgcaagcaggagcaggaccacgcggtgatcgcggccgcgcacagcctgcaggacctccaccacctgaacctgggcgcggccggcgcgcacgactttttctcggcagggcagcaggccgccgccgctgcgatgcacggcctgggtagcatcgacagtgcgtcgctcgagcacagcaccggctccaactccgtcgtctacaacggcggggtcggcgacagcaacggcgccagcgccgtcggcggcagtggcggtggctacatgatgccgatgagcgctgccggagcaaccactacatcggcaatggtgagccacgagcaggtgcatgcacgggcctacgacgaagccaagcaggctgctcagatggggtacgagagctacctggtgaacgcggagaacaatggtggcggaaggatgtctgcatgggggactgtcgtgtctgcagccgcggcggcagcagcaagcagcaacgacaacatggccgccgacgtcgggcatggcggcgcgcagctcttcagtgtctggaacgacacttaagcgtacctagtggtacctgacatcttatagtctgcaacctctcgtgtctgaattcctatctttatcaagtgttattgcttccacgactataggacagctttcgtcgaaagcttttgctcatgtgatctcgaaggattcatctagtctgatttttcgtgacttgtatcggttttattggattcatccaacatatatcaataaaaaatgagttgtgtttcctttcttcctagttcagttaaaattatttccctcctgcgcttgtgctgtaattgtctgtgtacctgttgtttgtgactgtgttagttcccttggatatgatttcgtatttgatatgtacatggagatagcttagcttcattattggagtatgaagttagtatgacatagtcactctcctggaaaattgacactgcaaaccatatttttattctgaaccacaaatcctagtcagtccgctggcatatgccgtccgtttgctgaatccagaacgtgggtttggagatgtacggctgagatgcctctatgcgaaggggatttcgtggtgaaacgagatgggagtagagcaacgcccgtggaagatgcttcaaacttccacacttttgagcaacgatcggcagtagtaaggtagacgatttcaagatcaaagcatatgaagataaacaacatcaacaacaaaatttgttggggttctatagagagaaacagagctacatacatacactgttttgtatctaccatctgagatgatgaaaagatgaaaaactaaagaatgccccggcgccaacgccaggacacgccgcgcgcgcgtcacccgagccatctcttgacccagccggcgctgtatatttacacacgttgcagcatcgatcaccacctgttcgatcgcgtcgccgtcaccggcgcgccgcgacttattgaactagtctagggcgcggctaacaacctagcttagattgccttgtctaaacccttaggctaacgcgccactctagaaggccgatctccccgggtttaccgagctccaccttgctagttggatattacctcttctcttcaaagtatccttgaacgctcaccggttatcaaatctctacactatagctctgtagtcttgctagatagttagttctttagctctctctagaggttcacaaactcaatacaacacacagtggagtagggtattacgctccggcggcccgaaccactctaaatccttgtgtcctcgtgtgctcttccaccattaatgactgtaattgcagggacacgaagagttgtagcgcttttgccaacaagatccgctatatgctagtagagtggaacctgcacagcaacaagcatccaataatctgagaataagaattatgtgtggtgatggttctcatctctgcaactcgccattttcgcgagagaaccaaatccaagttggtgaagatcatgatttgggctcatgggctggcatagtagctattacctttgcaattgtggttcgaatctatccgatattctccttttcagggagagctaatgcttatgcttattgggtattttggtttgacactgcttcacgcccaaaaaaaggcaactatgtctgagttggatatggcccaaaaaaaggcagctatgtctgagttggatatggaagtcttctttcgtttagggtgaagtaagaccaagctcatgagcttattatcttaggtcggaacaaattagttgataggcatggcacatttatcaaattataatgattttaacagaaaagcaacacctctttttcagcagcaccagctttgcaagctgcaattgacactccaagcatagtatttgctccaaactcagcctgcatttcgcacaatatcatatctatttccatttggataaaatatattttccagaaatatgggaacagaatcaagatacagaaaaaagttgtggtagtagtggtaagtggaaacacaagtacagtgaaaagatagcattatttctgaacagtcaaattaaccgaaataagtagtatcacatactgcccctaaattgactacacccaatgtaaagaattgcttgagcatattgagccatcagttgtttgtttgtgtaacggatttgacaatgcagagttcaggagcaaaaaaccgcaaaggagagaaagagggaaaggatctcctagtatcccaccttgtggcgcgccctgtcaagtgcatgatggcctggtcgatctgcgtctgctgctgcggttccatcccaacgagtgcctccgacaccttgtcgttgatcacccgcaccgcgtaggcgacccccctggcgaggaacttccgcctctcggaggccccggccgcgtcggcggcggcgccctcgagcgcgcccacgctagccgtagatgctcggtgcacggccttgttggtgtgcaactcgacctcaacggccggtgcgctacgcccgtcaaggatctggcgcgcccgcaccctcgtgatcacggtgggcgcctcccgcctcatgtggccgacgatgaaaagcgccgggttaggggccttggcgcgcaccgccgtattcagggcctcctcgctcttgcgcgagagcaggtgcttccccaggtactcctgcactgacaaggctgccacagcggtggaatttgtcctcacgacttcgccacgtcgtcctcacctccctggcttcccacgactccgccgtatcgaggtgctcggtgggtcgtcttaatccgaagtccgaactaggaagacgagacagagaggtctgaggaatgggcctcgtttgatgttgagctgaattatttttccagcataagcccaggtcttggtccatgaacaaaattactagaaacccagcccagtactacgatctaaaagagggactgccactggatagctctctctagcattctccacgctccaatacagcggcgtcgtgtctatccgggtctatccgcgaacacgtgagaactctccagaaactgctttctcctccacttcatctctctcgctttccctctataaaaagaccccttctaggaattgagggagacagcaagcaccaagcagcgatccgaagctcaatcaattcactcaaacctcttccccaaatcttcgattagatcttcgttgacaagaagactagaaccgaacctgacatgtccaacctgctcacggttcaccagaaccttccggctcttccagtggacgcgacgtccgatgaagtcaggaagaacctcatggacatgttccgcgacaggcaagcgttcagcgagcacacctggaagatgctgctctccgtctgccgctcctgggctgcatggtgcaagctgaacaacaggaagtggttccccgctgagcccgaggacgtgagggattaccttctgtacctgcaagcgcgaggtttgtttctgcttctacctttgatatatatataataattatcattaattagtagtaatataatatttcaaatatttttttcaaaataaaagaatgtagtatatagcaattgcttttctgtagtttataagtgtgtatattttaatttataacttttctaatatatgaccaaaacatggtgatgcctaggtctggcagtgaagaccatccagcaacaccttggacaactgaacatgcttcacaggcgctccggcctcccgcgccccagcgactcgaacgccgtgagcctcgtcatgcgccgcatcaggaaggaaaacgtcgatgccggcgaaagggcaaagcaggccctcgcgttcgagaggaccgatttcgaccaggtccgcagcctgatggagaacagcgacaggtgccaggacattaggaacctggcgttcctcggaattgcatacaacacgctcctcaggatcgcggaaattgcccgcattcgcgtgaaggacattagccgcaccgacggcggcaggatgcttatccacattggcaggaccaagacgctcgtttccaccgcaggcgtcgaaaaggccctcagcctcggagtgaccaagctcgtcgaacgctggatctccgtgtccggcgtcgcggacgacccaaacaactacctcttctgccgcgtccgcaagaacggggtggctgcccctagcgccaccagccaactcagcacgagggccttggaaggtattttcgaggccacccaccgcctgatctacggcgcgaaggatgacagcggtcaacgctacctcgcatggtccgggcactccgcccgcgttggagctgctagggacatggcccgcgccggtgtttccatccccgaaatcatgcaggcgggtggatggacgaacgtgaacattgtcatgaactacattcgcaaccttgacagcgagacgggcgcaatggttcgcctcctggaagatggtgactgaggtacccaacctagacttgtccatcttctggattggccaacttaattaatgtatgaaataaaaggatgcacacatagtgacatgctaatcactataatgtgggcatcaaagttgtgtgttatgtgtaattactagttatctgaataaaagagaaagagatcatccatatttcttatcctaaatgaatgtcacgtgtctttataattctttgatgaaccagatgcatttcattaaccaaatccatatacatataaatattaatcatatataattaatatcaattgggttagcaaaacaaatctagtctaggtgtgttttgcgatccgatatcgatgggtctaaaaacggcccctaactaacgcttagttgcccgctagattagtcccccgttagtgcctagttagacacacgacgaactaggggctagcacgcgttagataacttcgtatagcatacattatacgaagttattccggaccgggttaccgaattcctgcccttaaggccaattgttcaagattcattcaacaattgaaacatctcccatgattaaatcagtataaggttgctatggtcttgcttgacaaagtttttttttgagggaatttcaactaaatttttgagtgaaactatcaaatactgattttaaaaaatttttataaaaggaagcgcagagataaaaggccatctatgctacaaaagtacccaaaaatgtaatcctaaagtatgaattgcattttttttttgtttggacgaaaggaaaggagtattaccacaagaatgatatcatcttcatatttagatcttttttgggtaaagcttgagattctctaaatatagagaaatcagaagaaaaaaaaaccgtgttttggtggttttgatttctagcctccacaataactttgacggcgtcgacaagtctaacggacaccaagcagcgaaccaccagcgccgagccaagcgaagcagacggccgagacgttgacaccttcggcgcggcatctctcgagagttccgctccggcgctccacctccaccgctggcggtttcttattccgttccgttccgcctcctgctctgctcctctccacaccacacggcacgaaaccgttacggcaccggcagcacccagcacgggagaggggattcctttcccaccgttccttccctttccgccccgccgctataaatagccagccccatccccagcttttttccccaatctcatctcctctctcctgttgttcggagcacacgcacaatccgatcgatccccaaatccccttcgtctctcctcgcgagcctcgtggatcccagcttcaaggtacggcgatcgatcatcccccctccttctctctaccttcttttctctagactacatcggatggcgatccatggttagggcctgctagtttcccttcctgttttgtcgatggctgcgaggcacaatagatctgatggcgttatgacggctaacttgtcatgttgttgcgatttatagtccctttaggagatcagtttaatttctcggatggttcgagatcggtggtccatggttagtaccctaagatccgcgctgttagggttcgtagatggaggcgacctgttctgattgttaacttgtcagtacctgggaaatcctgggatggttctagctcgtccgcagatgagatcgatttcatgatcctctgtatcttgtttcgttgcctaggttccgtctaatctatccgtggtatgatgtagatgttttgatcgtgctaactacgtcttgtaaagttaattgtcaggtcataatttttagcatgcctttttttttgtttggttttgtctaattgggctgtcgttctagatcagagtagaagactgttccaaactacctgctggatttattgaacttggatctgtatgtgtgtcacatatcttcataaattcatgattaagatggattgaaatatcttttatctttttggtatggatagttctatatgttggtgtggctttgttagatgtatacatgcttagatacatgaagcaacgtgctgctactgtttagtaattgctgttcatttgtctaataaacagataaggatatgtatttatgttgctgttggttttgctggtactttgttggatacaaatgcttcaatacagaaaacagcatgctgctacgatttaccatttatctaatcttatcatatgtctaatctaataaacaaacatgcttttaaattatcttcatatgcttggatgatggcatacacagcggctatgtgtggttttttaaatacccagcatcatgggcatgcatgacactgctttaatatgctttttatttgcttgagactgtttcttttgtttatactgaccctttagttcggtgactcttctgcaggtcgactttaacttagcctaggatccatggcccagtccaagcacggcctgaccaaggagatgaccatgaagtaccgcatggagggctgcgtggacggccacaagttcgtgatcaccggcgagggcatcggctaccccttcaagggcaagcaggccatcaacctgtgcgtggtggagggcggccccttgcccttcgccgaggacatcttgtccgccgccttcatgtacggcaaccgcgtgttcaccgagtacccccaggacatcgtcgactacttcaagaactcctgccccgccggctacacctgggaccgctccttcctgttcgaggacggcgccgtgtgcatctgcaacgccgacatcaccgtgagcgtggaggagaactgcatgtaccacgagtccaagttctacggcgtgaacttccccgccgacggccccgtgatgaagaagatgaccgacaactgggagccctcctgcgagaagatcatccccgtgcccaagcagggcatcttgaagggcgacgtgagcatgtacctgctgctgaaggacggtggccgcttgcgctgccagttcgacaccgtgtacaaggccaagtccgtgccccgcaagatgcccgactggcacttcatccagcacaagctgacccgcgaggaccgcagcgacgccaagaaccagaagtggcacctgaccgagcacgccatcgcctccggctccgccttgccctccggactcagatctcgatagggtaccaatggccagttaacagatccagctgctgctgttctagggttcacaagtctgcctatttgtcttccccaatggagctatggttgtctggtctggtccttggtcgtgtcccgtttcattgtgtactatttacctgtaatgtgtatccttaagtctggtttgatggtgtctgaaacgttttgctgtggtagagcagcatggaagaactataatgaataagtgatccctaatcattgtgtccaaattttgcttctgctatacccttttgtgctgtttcttatgttttgcttaaaaatttgatctgacaaacaaatttgtctaaattatgctcttgttctgactgtgtactgtacacatttgtattgctaccggtttggcacatagttttctctttgattgcagatcaaacccttctgattgcagattgcttggctatggctgatgtgctcactgttcttctttagcttgtatattgctgatggtggcttggctacggctgaaaaagttgctgctgcgccgacttggcaactgttgctccagtaatgctttgtcctctcttcctagccgccgacttggcacttggcagctgttgctcctgtaatgcgttgttatctcttatctcttgagatgtactatgattttgaggctgtttgacttgtgccagattgccagtgctgatgctatattatctcaggtttttatgctagtatatgttttactgtgtgctgcctgtgtcgagttacgtaatctattgaaccgctatgcgtgttgatgccctgttgttgcttgccagattgatgcccctgttgcttgcagcttgcaagctgtagtgaaatcctaaaattcgaaaccaaatctattctgaacttttgaagatctgtgatgtccggaagaaaagattcaaacagataaacgggactctccagaatctataaaataaatgatcgacaaacgctttgctttggtaggcttcctagttagttagcggaccgaagcttcggtccgggcctagaaggccagcttcggccgcccctcggtaccctgggatctgcccttactttaacgcctctaaccaacacccctttatctttataaggaacaataaacagaatttgccccactgttctaaatcacctaataatatccccagctaaaaacaataaaggtttcctagaattaagacaagcatgactgttcctccaggagggtttggaacattgttgcagtcttgcagatacgggcgaagggtgagaaacagagcggagggctggaggtgacctcggtagtcgacgccggagttgagcttgacaacgacggggcggcccctgatggacttgaggaagtccgatggcgtcttcaccgtcccgccggcgcccgaggcgggcctgtcgctgccgccgccgccgctgctcatcttgcgcgctgtgcccccggcggtgtccctgtgttgcggatcgcgggtgggccaggtggatgcgagggcgacccgtttggactccggccggagccgccggatccctggtcggtgtcagtgccgtttactctgggccccacgtgtcagtaccgtctgtagatgacaacaacccgtcgtccacagtcatgtccaaaatatcctttcttcttttttttcgattcggatatctatcttccttttttttttccaaaaatcttcttgacgcaccagcgcgcacgtttgtggtaaacgccgacacgtcggtcccacgtcgatagaccccacccaccagtgagtagcgtgtacgtattcgggggtgacggacgtgtcgccgtcgtcttgctagtcccattcccatctgagccacacatctctgaacaaaaaaaaggagggaggcctccacgcacatccccctccgtgccacccgccccaaaccctcgcgccgcctccgagacagccgccgcaaccatggccaccgccgccgccgcgtctaccgcgctcactggcgccactaccgctgcgcccaaggcgaggcgccgggcgcacctcctggccacccgccgcgccctcgccgcgcccatcaggtgctcagcggcgtcacccgccatgccgatggctcccccggccaccccgctccggccgtggggccccaccgagccccgcaagggtgctgacatcctcgtcgagtccctcgagcgctgcggcgtccgcgacgtcttcgcctaccccggcggcgcgtccatggagatccaccaggcactcacccgctcccccgtcatcgccaaccacctcttccgccacgagcaaggggaggcctttgccgcctccggctacgcgcgctcctcgggccgcgtcggcgtctgcatcgccacctccggccccggcgccaccaacctagtctccgcgctcgccgacgcgctgctcgattccgtccccatggtcgccatcacgggacaggtggcgcgacgcatgattggcaccgacgccttccaggagacgcccatcgtcgaggtcacccgctccatcaccaagcacaactacctggtcctcgacgtcgacgacatcccccgcgtcgtgcaggaggctttcttcctcgcctcctctggtcgaccagggccggtgcttgtcgacatccccaaggacatccagcagcagatggcggtgcctgtctgggacaagcccatgagtctgcctgggtacattgcgcgccttcccaagccccctgcgactgagttgcttgagcaggtgctgcgtcttgttggtgaatcgcggcgccctgttctttatgtgggcggtggctgcgcagcatctggtgaggagttgcgacgctttgtggagctgactggaatcccggtcacaactactcttatgggcctcggcaacttccccagcgacgacccactgtctctgcgcatgctaggtatgcatgggacggtgtatgcaaattatgcagtggataaggccgatctgttgcttgcacttggtgtgcggtttgatgatcgcgtgacagggaagattgaggcttttgcaagcagggctaagattgtgcacgttgatattgatccggctgagattggcaagaacaagcagccacatgtgtccatctgtgcagatgttaagcttgctttgcagggcatgaatgctcttcttgaaggaagcacatcaaagaagagctttgactttggctcatggaacgatgagttggatcagcagaagagggaattcccccttgggtataaaacatctaatgaggagatccagccacaatatgctattcaggttcttgatgagctgacgaaaggcgaggccatcatcggcacaggtgttgggcagcaccagatgtgggcggcacagtactacacttacaagcggccaaggcagtggttgtcttcagctggtcttggggctatgggatttggtttgccggctgctgctggtgcttctgtggcaaacccaggtgtcactgttgttgacatcgatggagatggtagctttctcatgaacgttcaggagctagctatgatccgaattgagaacctcccagtgaaggtctttgtgctaaacaaccagcacctggggatggtggtgcagttggaggacaggttctataaggccaacagagcgcacacatacttgggaaacccagagaatgaaagtgagatatatccagatttcgtgacgatcgccaaagggttcaacattccagccgtccgtgtgacaaagaagaacgaagtccgcgcagcgataaagaagatgctcgagactccagggccgtacctcttggatataatcgtcccacaccaggagcatgtgttgcctatgatccctagtggtggggctttcaaggatatgatcctggatggtgatggcaggactgtgtactgacttcgaataggtacccggggatcctctagtgccgtgggtcgtttaagctgccgctgtacctgtgtcgtctggtgccttctggtgtacctgggaggttgtcgtctatcaagtatctgtggttggtgtcatgagtcagtgagtcccaatactgttcgtgtcctgtgtgcattatacccaaaactgttatgggcaaatcatgaataagcttgatgttcgaacttaaaagtctctgctcaatatggtattatggttgtttttgttcgtctcctaatatttgcctgggatcaaattttattggctggtgttcatttgacctccatgttcttgctaggctccattttttactctacagccataatatgtttgattgtttggtttgttctttgttgtacacctggttctgtcgagcttagttttcgacactggcttacagcttaacatgttgctattttattgggttctgattgctattttattgggttctgattgctagtttttgctgaatccaaaaaccatgttatttatttaagcgatccaggttattattatgatggtggctaagtttttttttttccaagggtaaattttctggattctccagtgtttctgtggccgaattcaatcactagagtcgacctgcaaagcttcggtccgggcctagaaggcccgcgccacttacgcttgattccgatgacttcgtaggttcctagctcaagccgctcgtgtccaagcgtcacttacgattagctaatgattacggcatctaggaccgactagttcttatgtgcttctagtctccaaatgtggttgatagttattttgctctaagatcaacagtaatgaagtataaatcatcgttgtggtgtgctactcggttaattgagcattaacacacacaaacatgacgaggatggtataatctccaaaaatgtgtactttgttaggtgggaccctatagccttgattaatgtgctatgttaggcatgcctggaaacgtgtgacgcatatgttttgtgaacctgttgatattatatgtgcttttatattaccatattttattaaaatactaatatttattactagtaagatataacattctatctagcttaaaaactaaccataaatattccataataactagatttaccaaactaatatactaaatatacataataaatacaaaattaacaagacaataatcaatatttatgagcttaatatatttagacattatggttggtcgacgataatcatgctaacttttcgtaattgcttgattgaaatatgcttagaataatgcctctttgttctacatggcaaatagggaccattatggtgtaacaccctgggaaccacaaacaccccgaaatgctactaaactacacaactaaccttcatatataaaatttcgacagcatctcctttgaaaatttgcatagacgtggaagcaacagagtataaacagatctgcgtttaaacgtgcaagcgctactagacaattcagtacattaaaaacgtccgcaatgtgttattaagttgtctaagcgtcaatttgtttacaccacaatatatcctgcca

SEQ ID NO: 75 - DNA, 20256 bp, synthetic construct
  misc_feature 1..20256: note = PHP96919
  source 1..20256: mol_type = other DNA
gtttacccgccaatatatcctgtcaaacactgcggccgcacttgaccgcggatggagccggagctgtggtgaggccatcgacgggaggtgggggagaacacagtctcagtgttctttgtgagtccgcaaggtttttagcttttctgtattaattaaggttgctgttggctgtagaatacggtcgtggaagagctgtatcggtagctactacgtaagctattatatactggaagtctggagctcgtcgatctccggtcgtcttcctccatttctcctcgtcttgctttgactgctgctaccatttgcttctgttttctgatgaagcatgccatgtcggccaccagtgtttgtgtggtttttgcagggaatggctttcaagtgctgtgattgaatggccctcgtcgtcctcggctgagctcacatggacgcgtcatgtgagtgagatatatgatcatatgatgagtggggttcgggtgagtgcgtacttgaagtaggatcccgctttcactcattcattcattggcctttaaaccgggaaattttcgcgaggagatggagggaagcaagcagggtgacgagtgcagagtgccgcgagcgctttgtcaaaaggcaccgccgtaggcaaaaaaatcaatggccctgactgactcgatggtagtactactgtagagactagagagggttgctccccatatcttcgtgtgacttttactccagcattgcatttccgtcattgagacgttaattaatagcagctttcgggacagatgactgtggccatgtttcgtcacggccgcttcgtgccagctgggggtactatagtactgtgattttgttagtaaaaactttcattaggccaccattgacgaccgggccttcgcttttgctgcgctaattaaccatttcccggcgaccgaagggaacatgaacatgccccgacacatgagggcatgaggactagtgttctccctgtcgttcgttgacttgactagtgatagtttaaacgctcttcaactggaagagcggttactaccggttcactagctagctgctaatcgagctagttaccctatgaggtgacatgaagcgctcacggttactatgacggttagcttcacgactgttggtggcagtagcgtacgacttagctatagttccggacttacctagctaataacttcgtatagcatacattatacgaagttatggttaccacactgatagtttaaactgaaggcgggaaacgacaatctgatcatgagcggagaattaagggagtcacgttatgacccccgccgatgacgcgggacaagccgttttacgtttggaactgacagaaccgcaacgattgaaggagccactcagccgcgggtttctggagtttaatgagctaagcacatacgtcagaaaccattattgcgcgttcaaaagtcgcctaaggtcactatcagctagcaaatatttcttgtcaaaacgtaagcgcttacgcaccgaacaacgtaagcgcttacgcaccgaacaacgtaagcgcttacgcaatgctccactgacgttccataaattcccctcggtatccaattagagtctcatattcactcccatggcggccaatgcgggcggcggtggagcgggaggaggcagcggcagcggcagcgtggctgcgccggcggtgtgccgccccagcggctcgcggtggacgccgacgccggagcagatcaggatgctgaaggagctctactacggctgcggcatccggtcgcccagctcggagcagatccagcgcatcaccgccatgctgcggcagcacggcaagatcgagggcaagaacgtcttctactggttccagaaccacaaggcccgcgagcgccagaagcgccgcctcaccagcctcgacgtcaacgtgcccgccgccggcgcggccgacgccaccaccagccaactcggcgtcctctcgctgtcgtcgccgccgccttcaggcgcggcgcctccctcgcccaccctcggcttctacgccgccggcaatggcggcggatcggctgtgctgctggacacgagttccgactggggcagcagcggcgctgctatggccaccgagacatgcttcctgcaggactacatgggcgtgacggacacgggcagctcgtcgcagtggccacgcttctcgtcgtcggacacgataatggcggcggccgcggcgcgggcggcgacgacgcgggcgcccgagacgctccctctcttcccgacctgcggcgacgacggcggcagcggtagcagcagctacttgccgttctggggtgccgcgtccacaactgccggcgccacttcttccgttgcgatccaacagcaacaccagctgcaggagcagtacagcttttacagcaacagcaacagcacccagctggccggcaccggcaaccaagacgtatcggcaacagcagcagcagccgccgccctggagctgagcctcagctcatggtgctccccttaccctgctgcagggagtatgtgagagcaacgcgagctgccactgctcttcactgatgtctctggaatggaaggaggaggaagtgagaacagatcattcgacaaagcagcattagtccgttgatcggtggaagaccactcgtcagtgttgagttgaatgtttgatcaataaaatacggcaatgctgtaagggttgttttttatgccattgataatacactgtactgttcagttgttgaactctatttcttagccatgccaagtgcttttcttattttgaataacattacagcaaaaagttgaaagacaaaaaaaaaaacccccgaacagagtgctttgggtcccaagcttctttagactgtgttcggcgttccccctaaatttctccccctatatctcactcacttgtcacatcagcgttctctttccccctatatctccacgctctacagcagttccacctatatcaaacctctataccccaccacaacaatattatatactttcatcttcaactaactcatgtaccttccaatttttttctactaataattatttacgtgcacagaaacttagcaaggagagagagagcgggaatttaaatgctcggcgttaggcttttagtccgctaggtggctagaccgaggttaggacgctagttcactaggggcctagtggtgttttaagacgtcacggtcaccacgcgtggaccgaagcttgcatgcctgcagtgcagcgtgacccggtcgtgcccctctctagagataatgagcattgcatgtctaagttataaaaaattaccacatattttttttgtcacacttgtttgaagtgcagtttatctatctttatacatatatttaaactttactctacgaataatataatctatagtactacaataatatcagtgttttagagaatcatataaatgaacagttagacatggtctaaaggacaattgagtattttgacaacaggactctacagttttatctttttagtgtgcatgtgttctcctttttttttgcaaatagcttcacctatataatacttcatccattttattagtacatccatttagggtttagggttaatggtttttatagactaatttttttagtacatctattttattctattttagcctctaaattaagaaaactaaaactctattttagtttttttatttaataatttagatataaaatagaataaaataaagtgactaaaaattaaacaaataccctttaagaaattaaaaaaactaaggaaacatttttcttgtttcgagtagataatgccagcctgttaaacgccgtcgacgagtctaacggacaccaaccagcgaaccagcagcgtcgcgtcgggccaagcgaagcagacggcacggcatctctgtcgctgcctctggacccctctcgagagttccgctccaccgttggacttgctccgctgtcggcatccagaaattgcgtggcggagcggcagacgtgagccggcacggcaggcggcctcctcctcctctcacggcaccggcagctacgggggattcctttcccaccgctccttcgcacgtaagcgcttacgcaccgaacaacgtaagcgcttacgcaccgaacaacgtaagcgcttacgctttcccttcctcgcccgccgtaataaatagacaccccctccacaccctctttccccaacctcgtgttgttcggagcgcacacacacacaaccagatctcccccaaatccacccgtcggcacctccgcttcaaggtacgccgctcgtcctcccccccccccctctctaccttctctagatcggcgttccggtccatgcatggttagggcccggtagttctacttctgttcatgtttgtgttagatccgtgtttgtgttagatccgtgctgctagcgttcgtacacggatgcgacctgtacgtcagacacgttctgattgctaacttgccagtgtttctctttggggaatcctgggatggctctagccgttccgcagacgggatcgatttcatgattttttttgtttcgttgcatagggtttggtttgcccttttcctttatttcaatatatgccgtgcacttgtttgtcgggtcatcttttcatgcttttttttgtcttggttgtgatgatgtggtctggttgggcggtcgttctagatcggagtagaattctgtttcaaactacctggtggatttattaattttggatctgtatgtgtgtgccatacatattcatagttacgaattgaagatgatggatggaaatatcgatctaggataggtatacatgttgatgcgggttttactgatgcatatacagagatgctttttgttcgcttggttgtgatgatgtggtgtggttgggcggtcgttcattcgttctagatcggagtagaatactgtttcaaactacctggtgtatttattaattttggaactgtatgtgtgtgtcatacatcttcatagttacgagtttaagatggatggaaatatcgatctaggataggtatacatgttgatgtgggttttactgatgcatatacatgatggcatatgcagcatctattcatatgctctaaccttgagtacctatctattataataaacaagtatgttttataattattttgatcttgatatacttggatgatggcatatgcagcagctatatgtggatttttttagccctgccttcatacgctatttatttgcttggtactgtttcttttgtcgatgctcaccctgttgtttggtgttacttctgcaggtcgactttaacttagcctagcatggccactgtgaacaactggctcgctttctccctctccccgcaggagctgccgccctcccagacgacggactccacactcatctcggccgccaccgccgaccatgtctccggcgatgtctgcttcaacatcccccaagattggagcatgaggggatcagagctttcggcgctcgtcgcggagccgaagctggaggacttcctcggcggcatctccttctccgagcagcatcacaaggccaactgcaacatgatacccagcactagcagcacagtttgctacgcgagctcaggtgctagcaccggctaccatcaccagctgtaccaccagcccaccagctcagcgctccacttcgcggactccgtaatggtggcttcctcggccggtgtccacgacggcggtgccatgctcagcgcggccgccgctaacggtgtcgctggcgctgccagtgccaacggcggcggcatcgggctgtccatgattaagaactggctgcggagccaaccggcgcccatgcagccgagggtggcggcggctgagggcgcgcaggggctctctttgtccatgaacatggcggggacgacccaaggcgctgctggcatgccacttctcgctggagagcgcgcacgggcgcccgagagtgtatcgacgtcagcacagggtggagccgtcgtcgtcacggcgccgaaggaggatagcggtggcagcggtgttgccggcgctctagtagccgtgagcacggacacgggtggcagcggcggcgcgtcggctgacaacacggcaaggaagacggtggacacgttcgggcagcgcacgtcgatttaccgtggcgtgacaaggcatagatggactgggagatatgaggcacatctttgggataacagttgcagaagggaagggcaaactcgtaagggtcgtcaagtctatttaggtggctatgataaagaggagaaagctgctagggcttatgatcttgctgctctgaagtactggggtgccacaacaacaacaaattttccagtgagtaactacgaaaaggagctcgaggacatgaagcacatgacaaggcaggagtttgtagcgtctctgagaaggaagagcagtggtttctccagaggtgcatccatttacaggggagtgactaggcatcaccaacatggaagatggcaagcacggattggacgagttgcagggaacaaggatctttacttgggcaccttcagcacccaggaggaggcagcggaggcgtacgacatcgcggcgatcaagttccgcggcctcaacgccgtcaccaacttcgacatgagccgctacgacgtgaagagcatcctggacagcagcgccctccccatcggcagcgccgccaagcgcctcaaggaggccgaggccgcagcgtccgcgcagcaccaccacgccggcgtggtgagctacgacgtcggccgcatcgcctcgcagctcggcgacggcggagccctggcggcggcgtacggcgcgcactaccacggcgccgcctggccgaccatcgcgttccagccgggcgccgccagcacaggcctgtaccacccgtacgcgcagcagccaatgcgcggcggcgggtggtgcaagcaggagcaggaccacgcggtgatcgcggccgcgcacagcctgcaggacctccaccacctgaacctgggcgcggccggcgcgcacgactttttctcggcagggcagcaggccgccgccgctgcgatgcacggcctgggtagcatcgacagtgcgtcgctcgagcacagcaccggctccaactccgtcgtctacaacggcggggtcggcgacagcaacggcgccagcgccgtcggcggcagtggcggtggctacatgatgccgatgagcgctgccggagcaaccactacatcggcaatggtgagccacgagcaggtgcatgcacgggcctacgacgaagccaagcaggctgctcagatggggtacgagagctacctggtgaacgcggagaacaatggtggcggaaggatgtctgcatgggggactgtcgtgtctgcagccgcggcggcagcagcaagcagcaacgacaacatggccgccgacgtcgggcatggcggcgcgcagctcttcagtgtctggaacgacacttaagcgtacctagtggtacctgacatcttatagtctgcaacctctcgtgtctgaattcctatctttatcaagtgttattgcttccacgactataggacagctttcgtcgaaagcttttgctcatgtgatctcgaaggattcatctagtctgatttttcgtgacttgtatcggttttattggattcatccaacatatatcaataaaaaatgagttgtgtttcctttcttcctagttcagttaaaattatttccctcctgcgcttgtgctgtaattgtctgtgtacctgttgtttgtgactgtgttagttcccttggatatgatttcgtatttgatatgtacatggagatagcttagcttcattattggagtatgaagttagtatgacatagtcactctcctggaaaattgacactgcaaaccatatttttattctgaaccacaaatcctagtcagtccgctggcatatgccgtccgtttgctgaatccagaacgtgggtttggagatgtacggctgagatgcctctatgcgaaggggatttcgtggtgaaacgagatgggagtagagcaacgcccgtggaagatgcttcaaacttccacacttttgagcaacgatcggcagtagtaaggtagacgatttcaagatcaaagcatatgaagataaacaacatcaacaacaaaatttgttggggttctatagagagaaacagagctacatacatacactgttttgtatctaccatctgagatgatgaaaagatgaaaaactaaagaatgccccggcgccaacgccaggacacgccgcgcgcgcgtcacccgagccatctcttgacccagccggcgctgtatatttacacacgttgcagcatcgatcaccacctgttcgatcgcgtcgccgtcaccggcgcgccgcgacttattgaactagtctagggcgcggctaacaacctagcttagattgccttgtctaaacccttaggctaacgcgccactctagaaggccgatctcccccgaacgcgccagatctcccgggttaccgaattcgagctcggtaccctggttcacaaactcaatacaacacacagtggagtagggtattacgctccggcggcccgaaccactctaaatccttgtgtcctcgtgtgctcttccaccattaatgactgtaattgcagggacacgaagagttgtagcgcttttgccaacaagatccgctatatgctagtagagtggaacctgcacagcaacaagcatccaataatctgagaataagaattatgtgtggtgatggttctcatctctgcaactcgccattttcgcgagagaaccaaatccaagttggtgaagatcatgatttgggctcatgggctggcatagtagctattacctttgcaattgtggttcgaatctatccgatattctccttttcagggagagctaatgcttatgcttattgggtattttggtttgacactgcttcacgcccaaaaaaaggcaactatgtctgagttggatatggcccaaaaaaaggcagctatgtctgagttggatatggaagtcttctttcgtttagggtgaagtaagaccaagctcatgagcttattatcttaggtcggaacaaattagttgataggcatggcacatttatcaaattataatgattttaacagaaaagcaacacctctttttcagcagcaccagctttgcaagctgcaattgacactccaagcatagtatttgctccaaactcagcctgcatttcgcacaatatcatatctatttccatttggataaaatatattttccagaaatatgggaacagaatcaagatacagaaaaaagttgtggtagtagtggtaagtggaaacacaagtacagtgaaaagatagcattatttctgaacagtcaaattaaccgaaataagtagtatcacatactgcccctaaattgactacacccaatgtaaagaattgcttgagcatattgagccatcagttgtttgtttgtgtaacggatttgacaatgcagagttcaggagcaaaaaaccgcaaaggagagaaagagggaaaggatctcctagtatcccaccttgtggcgcgccctgtcaagtgcatgatggcctggtcgatctgcgtctgctgctgcggttccatcccaacgagtgcctccgacaccttgtcgttgatcacccgcaccgcgtaggcgacccccctggcgaggaacttccgcctctcggaggccccggccgcgtcggcggcggcgccctcgagcgcgcccacgctagccgtagatgctcggtgcacggccttgttggtgtgcaactcgacctcaacggccggtgcgctacgcccgtcaaggatctggcgcgcccgcaccctcgtgatcacggtgggcgcctcccgcctcatgtggccgacgatgaaaagcgccgggttaggggccttggcgcgcaccgccgtattcagggcctcctcgctcttgcgcgagagcaggtgcttccccaggtactcctgcactgacaaggctgccacagcggtggaatttgtcctcacgacttcgccacgtcgtcctcacctccctggcttcccacgactccgccgtatcgaggtgctcggtgggtcgtcttaatccgaagtccgaactaggaagacgagacagagaggtctgaggaatgggcctcgtttgatgttgagctgaattatttttccagcataagcccaggtcttggtccatgaacaaaattactagaaacccagcccagtactacgatctaaaagagggactgccactggatagctctctctagcattctccacgctccaatacagcggcgtcgtgtctatccgggtctatccgcgaacacgtgagaactctccagaaactgctttctcctccacttcatctctctcgctttccctctataaaaagaccccttctaggaattgagggagacagcaagcaccaagcagcgatccgaagctcaatcaattcactcaaacctcttccccaaatcttcgattagatcttcgttgacaagaagactagaaccgaacctgacatgtccaacctgctcacggttcaccagaaccttccggctcttccagtggacgcgacgtccgatgaagtcaggaagaacctcatggacatgttccgcgacaggcaagcgttcagcgagcacacctggaagatgctgctctccgtctgccgctcctgggctgcatggtgcaagctgaacaacaggaagtggttccccgctgagcccgaggacgtgagggattaccttctgtacctgcaagcgcgaggtttgtttctgcttctacctttgatatatatataataattatcattaattagtagtaatataatatttcaaatatttttttcaaaataaaagaatgtagtatatagcaattgcttttctgtagtttataagtgtgtatattttaatttataacttttctaatatatgaccaaaacatggtgatgcctaggtctggcagtgaagaccatccagcaacaccttggacaactgaacatgcttcacaggcgctccggcctcccgcgccccagcgactcgaacgccgtgagcctcgtcatgcgccgcatcaggaaggaaaacgtcgatgccggcgaaagggcaaagcaggccctcgcgttcgagaggaccgatttcgaccaggtccgcagcctgatggagaacagcgacaggtgccaggacattaggaacctggcgttcctcggaattgcatacaacacgctcctcaggatcgcggaaattgcccgcattcgcgtgaaggacattagccgcaccgacggcggcaggatgcttatccacattggcaggaccaagacgctcgtttccaccgcaggcgtcgaaaaggccctcagcctcggagtgaccaagctcgtcgaacgctggatctccgtgtccggcgtcgcggacgacccaaacaactacctcttctgccgcgtccgcaagaacggggtggctgcccctagcgccaccagccaactcagcacgagggccttggaaggtattttcgaggccacccaccgcctgatctacggcgcgaaggatgacagcggtcaacgctacctcgcatggtccgggcactccgcccgcgttggagctgctagggacatggcccgcgccggtgtttccatccccgaaatcatgcaggcgggtggatggacgaacgtgaacattgtcatgaactacattcgcaaccttgacagcgagacgggcgcaatggttcgcctcctggaagatggtgactgaggtacccaacctagacttgtccatcttctggattggccaacttaattaatgtatgaaataaaaggatgcacacatagtgacatgctaatcactataatgtgggcatcaaagttgtgtgttatgtgtaattactagttatctgaataaaagagaaagagatcatccatatttcttatcctaaatgaatgtcacgtgtctttataattctttgatgaaccagatgcatttcattaaccaaatccatatacatataaatattaatcatatataattaatatcaattgggttagcaaaacaaatctagtctaggtgtgttttgcgatccgatatcgatgacgtctaaaaacggcccctaactaacgcttagttgcccgctagattagtcccccgttagtgcctagttagacacacgacgaactaggggctagccgtgcgcacgataacttcgtatagcatacattatacgaagttataacagcggaccgggttaccgaattcctgcccttaaggccaattgttcaagattcattcaacaattgaaacatctcccatgattaaatcagtataaggttgctatggtcttgcttgacaaagtttttttttgagggaatttcaactaaatttttgagtgaaactatcaaatactgattttaaaaaatttttataaaaggaagcgcagagataaaaggccatctatgctacaaaagtacccaaaaatgtaatcctaaagtatgaattgcattttttttttgtttggacgaaaggaaaggagtattaccacaagaatgatatcatcttcatatttagatcttttttgggtaaagcttgagattctctaaatatagagaaatcagaagaaaaaaaaaccgtgttttggtggttttgatttctagcctccacaataactttgacggcgtcgacaagtctaacggacaccaagcagcgaaccaccagcgccgagccaagcgaagcagacggccgagacgttgacaccttcggcgcggcatctctcgagagttccgctccggcgctccacctccaccgctggcggtttcttattccgttccgttccgcctcctgctctgctcctctccacaccacacggcacgaaaccgttacggcaccggcagcacccagcacgggagaggggattcctttcccaccgttccttccctttccgccccgccgctataaatagccagccccatccccagcttttttccccaatctcatctcctctctcctgttgttcggagcacacgcacaatccgatcgatccccaaatccccttcgtctctcctcgcgagcctcgtggatcccagcttcaaggtacggcgatcgatcatcccccctccttctctctaccttcttttctctagactacatcggatggcgatccatggttagggcctgctagtttcccttcctgttttgtcgatggctgcgaggcacaatagatctgatggcgttatgacggctaacttgtcatgttgttgcgatttatagtccctttaggagatcagtttaatttctcggatggttcgagatcggtggtccatggttagtaccctaagatccgcgctgttagggttcgtagatggaggcgacctgttctgattgttaacttgtcagtacctgggaaatcctgggatggttctagctcgtccgcagatgagatcgatttcatgatcctctgtatcttgtttcgttgcctaggttccgtctaatctatccgtggtatgatgtagatgttttgatcgtgctaactacgtcttgtaaagttaattgtcaggtcataatttttagcatgcctttttttttgtttggttttgtctaattgggctgtcgttctagatcagagtagaagactgttccaaactacctgctggatttattgaacttggatctgtatgtgtgtcacatatcttcataaattcatgattaagatggattgaaatatcttttatctttttggtatggatagttctatatgttggtgtggctttgttagatgtatacatgcttagatacatgaagcaacgtgctgctactgtttagtaattgctgttcatttgtctaataaacagataaggatatgtatttatgttgctgttggttttgctggtactttgttggatacaaatgcttcaatacagaaaacagcatgctgctacgatttaccatttatctaatcttatcatatgtctaatctaataaacaaacatgcttttaaattatcttcatatgcttggatgatggcatacacagcggctatgtgtggttttttaaatacccagcatcatgggcatgcatgacactgctttaatatgctttttatttgcttgagactgtttcttttgtttatactgaccctttagttcggtgactcttctgcaggtcgactttaacttagcctaggatccatggcccagtccaagcacggcctgaccaaggagatgaccatgaagtaccgcatggagggctgcgtggacggccacaagttcgtgatcaccggcgagggcatcggctaccccttcaagggcaagcaggccatcaacctgtgcgtggtggagggcggccccttgcccttcgccgaggacatcttgtccgccgccttcatgtacggcaaccgcgtgttcaccgagtacccccaggacatcgtcgactacttcaagaactcctgccccgccggctacacctgggaccgctccttcctgttcgaggacggcgccgtgtgcatctgcaacgccgacatcaccgtgagcgtggaggagaactgcatgtaccacgagtccaagttctacggcgtgaacttccccgccgacggccccgtgatgaagaagatgaccgacaactgggagccctcctgcgagaagatcatccccgtgcccaagcagggcatcttgaagggcgacgtgagcatgtacctgctgctgaaggacggtggccgcttgcgctgccagttcgacaccgtgtacaaggccaagtccgtgccccgcaagatgcccgactggcacttcatccagcacaagctgacccgcgaggaccgcagcgacgccaagaaccagaagtggcacctgaccgagcacgccatcgcctccggctccgccttgccctccggactcagatctcgatagggtaccaatggccagttaacagatccagctgctgctgttctagggttcacaagtctgcctatttgtcttccccaatggagctatggttgtctggtctggtccttggtcgtgtcccgtttcattgtgtactatttacctgtaatgtgtatccttaagtctggtttgatggtgtctgaaacgttttgctgtggtagagcagcatggaagaactataatgaataagtgatccctaatcattgtgtccaaattttgcttctgctatacccttttgtgctgtttcttatgttttgcttaaaaatttgatctgacaaacaaatttgtctaaattatgctcttgttctgactgtgtactgtacacatttgtattgctaccggtttggcacatagttttctctttgattgcagatcaaacccttctgattgcagattgcttggctatggctgatgtgctcactgttcttctttagcttgtatattgctgatggtggcttggctacggctgaaaaagttgctgctgcgccgacttggcaactgttgctccagtaatgctttgtcctctcttcctagccgccgacttggcacttggcagctgttgctcctgtaatgcgttgttatctcttatctcttgagatgtactatgattttgaggctgtttgacttgtgccagattgccagtgctgatgctatattatctcaggtttttatgctagtatatgttttactgtgtgctgcctgtgtcgagttacgtaatctattgaaccgctatgcgtgttgatgccctgttgttgcttgccagattgatgcccctgttgcttgcagcttgcaagctgtagtgaaatcctaaaattcgaaaccaaatctattctgaacttttgaagatctgtgatgtccggaagaaaagattcaaacagataaacgggactctccagaatctataaaataaatgatcgacaaacgctttgctttggtaggcttcctagttagttagcggaccgaagcttcggtccgggcctagaaggccagcttcggccgcccctcggtaccctgggatctgcccttactttaacgcctctaaccaacacccctttatctttataaggaacaataaacagaatttgccccactgttctaaatcacctaataatatccccagctaaaaacaataaaggtttcctagaattaagacaagcatgactgttcctccaggagggtttggaacattgttgcagtcttgcagatacgggcgaagggtgagaaacagagcggagggctggaggtgacctcggtagtcgacgccggagttgagcttgacaacgacggggcggcccctgatggacttgaggaagtccgatggcgtcttcaccgtcccgccggcgcccgaggcgggcctgtcgctgccgccgccgccgctgctcatcttgcgcgctgtgcccccggcggtgtccctgtgttgcggatcgcgggtgggccaggtggatgcgagggcgacccgtttggactccggccggagccgccggatccctggtcggtgtcagtgccgtttactctgggccccacgtgtcagtaccgtctgtagatgacaacaacccgtcgtccacagtcatgtccaaaatatcctttcttcttttttttcgattcggatatctatcttccttttttttttccaaaaatcttcttgacgcaccagcgcgcacgtttgtggtaaacgccgacacgtcggtcccacgtcgatagaccccacccaccagtgagtagcgtgtacgtattcgggggtgacggacgtgtcgccgtcgtcttgctagtcccattcccatctgagccacacatctctgaacaaaaaaaaggagggaggcctccacgcacatccccctccgtgccacccgccccaaaccctcgcgccgcctccgagacagccgccgcaaccatggccaccgccgccgccgcgtctaccgcgctcactggcgccactaccgctgcgcccaaggcgaggcgccgggcgcacctcctggccacccgccgcgccctcgccgcgcccatcaggtgctcagcggcgtcacccgccatgccgatggctcccccggccaccccgctccggccgtggggccccaccgagccccgcaagggtgctgacatcctcgtcgagtccctcgagcgctgcggcgtccgcgacgtcttcgcctaccccggcggcgcgtccatggagatccaccaggcactcacccgctcccccgtcatcgccaaccacctcttccgccacgagcaaggggaggcctttgccgcctccggctacgcgcgctcctcgggccgcgtcggcgtctgcatcgccacctccggccccggcgccaccaacctagtctccgcgctcgccgacgcgctgctcgattccgtccccatggtcgccatcacgggacaggtggcgcgacgcatgattggcaccgacgccttccaggagacgcccatcgtcgaggtcacccgctccatcaccaagcacaactacctggtcctcgacgtcgacgacatcccccgcgtcgtgcaggaggctttcttcctcgcctcctctggtcgaccagggccggtgcttgtcgacatccccaaggacatccagcagcagatggcggtgcctgtctgggacaagcccatgagtctgcctgggtacattgcgcgccttcccaagccccctgcgactgagttgcttgagcaggtgctgcgtcttgttggtgaatcgcggcgccctgttctttatgtgggcggtggctgcgcagcatctggtgaggagttgcgacgctttgtggagctgactggaatcccggtcacaactactcttatgggcctcggcaacttccccagcgacgacccactgtctctgcgcatgctaggtatgcatgggacggtgtatgcaaattatgcagtggataaggccgatctgttgcttgcacttggtgtgcggtttgatgatcgcgtgacagggaagattgaggcttttgcaagcagggctaagattgtgcacgttgatattgatccggctgagattggcaagaacaagcagccacatgtgtccatctgtgcagatgttaagcttgctttgcagggcatgaatgctcttcttgaaggaagcacatcaaagaagagctttgactttggctcatggaacgatgagttggatcagcagaagagggaattcccccttgggtataaaacatctaatgaggagatccagccacaatatgctattcaggttcttgatgagctgacgaaaggcgaggccatcatcggcacaggtgttgggcagcaccagatgtgggcggcacagtactacacttacaagcggccaaggcagtggttgtcttcagctggtcttggggctatgggatttggtttgccggctgctgctggtgcttctgtggcaaacccaggtgtcactgttgttgacatcgatggagatggtagctttctcatgaacgttcaggagctagctatgatccgaattgagaacctcccagtgaaggtctttgtgctaaacaaccagcacctggggatggtggtgcagttggaggacaggttctataaggccaacagagcgcacacatacttgggaaacccagagaatgaaagtgagatatatccagatttcgtgacgatcgccaaagggttcaacattccagccgtccgtgtgacaaagaagaacgaagtccgcgcagcgataaagaagatgctcgagactccagggccgtacctcttggatataatcgtcccacaccaggagcatgtgttgcctatgatccctagtggtggggctttcaaggatatgatcctggatggtgatggcaggactgtgtactgacttcgaataggtacccggggatcctctagtgccgtgggtcgtttaagctgccgctgtacctgtgtcgtctggtgccttctggtgtacctgggaggttgtcgtctatcaagtatctgtggttggtgtcatgagtcagtgagtcccaatactgttcgtgtcctgtgtgcattatacccaaaactgttatgggcaaatcatgaataagcttgatgttcgaacttaaaagtctctgctcaatatggtattatggttgtttttgttcgtctcctaatatttgcctgggatcaaattttattggctggtgttcatttgacctccatgttcttgctaggctccattttttactctacagccataatatgtttgattgtttggtttgttctttgttgtacacctggttctgtcgagcttagttttcgacactggcttacagcttaacatgttgctattttattgggttctgattgctattttattgggttctgattgctagtttttgctgaatccaaaaaccatgttatttatttaagcgatccaggttattattatgatggtggctaagtttttttttttccaagggtaaattttctggattctccagtgtttctgtggccgaattcaatcactagagtcgacctgcaaagcttcggtccgggcctagaaggcccgcgccacttacgcttgattccgatgacttcgtaggttcctagctcaagccgctcgtgtccaagcgtcacttacgattagctaatgattacggcatctaggaccgactagttcttatgtgcttctagtctccaaatgtggttgatagttattttgctctaagatcaacagtaatgaagtataaatcatcgttgtggtgtgctactcggttaattgagcattaacacacacaaacatgacgaggatggtataatctccaaaaatgtgtactttgttaggtgggaccctatagccttgattaatgtgctatgttaggcatgcctggaaacgtgtgacgcatatgttttgtgaacctgttgatattatatgtgcttttatattaccatattttattaaaatactaatatttattactagtaagatataacattctatctagcttaaaaactaaccataaatattccataataactagatttaccaaactaatatactaaatatacataataaatacaaaattaacaagacaataatcaatatttatgagcttaatatatttagacattatggttggtcgacgataatcatgctaacttttcgtaattgcttgattgaaatatgcttagaataatgcctctttgttctacatggcaaatagggaccattatggtgtaacaccctgggaaccacaaacaccccgaaatgctactaaactacacaactaaccttcatatataaaatttcgacagcatctcctttgaaaatttgcatagacgtggaagcaacagagtataaacagatctgcgtttaaacgtgcaagcgctactagacaattcagtacattaaaaacgtccgcaatgtgttattaagttgtctaagcgtcaatttgtttacaccacaatatatcctgcca

SEQ ID NO: 76 - DNA, 27949 bp, synthetic construct
  misc_feature 1..27949: note = PHP96942
  source 1..27949: mol_type = other DNA
gtttacccgccaatatatcctgtcaaacactgatagtttaaactgaaggcgggaaacgacaatctgatcatgagcctagttagttaggggcagctaacgtcccctagctaactagttgctattaacctttagcctagtttagtgcggtcgcgctagtgaactagtctaatgggtgcctagcttagattagatccccgttcggcttagactaggttagtcggatagggctagtctagtggcttagcttggaactgttaagctaggctgttagtgcgggacttctaggctaacctattgacccctaacgcctagaacctaagaaacgctaaggacacctagctaactttggcgacgtccagaggtccgattccggctaactaactagcttaagcttgatatcgaattcctgcagccccggaccgggttacccggaccgaagcttgcatgcctgcagtgcagcgtgacccggtcgtgcccctctctagagataatgagcattgcatgtctaagttataaaaaattaccacatattttttttgtcacacttgtttgaagtgcagtttatctatctttatacatatatttaaactttactctacgaataatataatctatagtactacaataatatcagtgttttagagaatcatataaatgaacagttagacatggtctaaaggacaattgagtattttgacaacaggactctacagttttatctttttagtgtgcatgtgttctcctttttttttgcaaatagcttcacctatataatacttcatccattttattagtacatccatttagggtttagggttaatggtttttatagactaatttttttagtacatctattttattctattttagcctctaaattaagaaaactaaaactctattttagtttttttatttaataatttagatataaaatagaataaaataaagtgactaaaaattaaacaaataccctttaagaaattaaaaaaactaaggaaacatttttcttgtttcgagtagataatgccagcctgttaaacgccgtcgacgagtctaacggacaccaaccagcgaaccagcagcgtcgcgtcgggccaagcgaagcagacggcacggcatctctgtcgctgcctctggacccctctcgagagttccgctccaccgttggacttgctccgctgtcggcatccagaaattgcgtggcggagcggcagacgtgagccggcacggcaggcggcctcctcctcctctcacggcaccggcagctacgggggattcctttcccaccgctccttcgctttcccttcctcgcccgccgtaataaatagacaccccctccacaccctctttccccaacctcgtgttgttcggagcgcacacacacacaaccagatctcccccaaatccacccgtcggcacctccgcttcaaggtacgccgctcgtcctcccccccccccctctctaccttctctagatcggcgttccggtccatgcatggttagggcccggtagttctacttctgttcatgtttgtgttagatccgtgtttgtgttagatccgtgctgctagcgttcgtacacggatgcgacctgtacgtcagacacgttctgattgctaacttgccagtgtttctctttggggaatcctgggatggctctagccgttccgcagacgggatcgatttcatgattttttttgtttcgttgcatagggtttggtttgcccttttcctttatttcaatatatgccgtgcacttgtttgtcgggtcatcttttcatgcttttttttgtcttggttgtgatgatgtggtctggttgggcggtcgttctagatcggagtagaattctgtttcaaactacctggtggatttattaattttggatctgtatgtgtgtgccatacatattcatagttacgaattgaagatgatggatggaaatatcgatctaggataggtatacatgttgatgcgggttttactgatgcatatacagagatgctttttgttcgcttggttgtgatgatgtggtgtggttgggcggtcgttcattcgttctagatcggagtagaatactgtttcaaactacctggtgtatttattaattttggaactgtatgtgtgtgtcatacatcttcatagttacgagtttaagatggatggaaatatcgatctaggataggtatacatgttgatgtgggttttactgatgcatatacatgatggcatatgcagcatctattcatatgctctaaccttgagtacctatctattataataaacaagtatgttttataattattttgatcttgatatacttggatgatggcatatgcagcagctatatgtggatttttttagccctgccttcatacgctatttatttgcttggtactgtttcttttgtcgatgctcaccctgttgtttggtgttacttctgcaggtcgactttaacttagcctaggatccaacaatgccccagttcgacatcctctgcaagaccccccccaaggtgctcgtgaggcagttcgtggagaggttcgagaggccctccggcgagaagatcgccctctgcgccgccgagctcacctacctctgctggatgatcacccacaacggcaccgccattaagagggccaccttcatgtcatacaacaccatcatctccaactccctctccttcgacatcgtgaacaagtccctccagttcaaatacaagacccagaaggccaccatcctcgaggcctccctcaagaagctcatccccgcctgggagttcaccatcatcccctactacggccagaagcaccagtccgacatcaccgacatcgtgtcatccctccagcttcagttcgagtcctccgaggaggctgacaagggcaactcccactccaagaagatgctgaaggccctcctctccgagggcgagtccatctgggagatcaccgagaagatcctcaactccttcgagtacacctccaggttcactaagaccaagaccctctaccagttcctcttcctcgccaccttcatcaactgcggcaggttctcagacatcaagaacgtggaccccaagtccttcaagctcgtgcagaacaagtacctaggtttgtttctgcttctacctttgatatatatataataattatcattaattagtagtaatataatatttcaaatatttttttcaaaataaaagaatgtagtatatagcaattgcttttctgtagtttataagtgtgtatattttaatttataacttttctaatatatgaccaaaacatggtgatgcctaggtgtcatcatccagtgcctcgtgaccgagaccaagacctccgtgtccaggcacatctacttcttctccgctcgcggcaggatcgaccccctcgtgtacctcgacgagttcctcaggaactcagagcccgtgctcaagagggtgaacaggaccggcaactcctcctccaacaagcaggagtaccagctcctcaaggacaacctcgtgaggtcctacaacaaggccctcaagaagaacgccccctactccatcttcgccatcaagaacggccccaagtcccacatcggtaggcacctcatgacctccttcctctcaatgaagggcctcaccgagctcaccaacgtggtgggcaactggtccgacaagagggcctccgccgtggccaggaccacctacacccaccagatcaccgccatccccgaccactacttcgccctcgtgtcaaggtactacgcctacgaccccatctccaaggagatgatcgccctcaaggacgagactaaccccatcgaggagtggcagcacatcgagcagctcaagggctccgccgagggctccatcaggtaccccgcctggaacggcatcatctcccaggaggtgctcgactacctctcctcctacatcaacaggaggatctgagttaacctagacttgtccatcttctggattggccaacttaattaatgtatgaaataaaaggatgcacacatagtgacatgctaatcactataatgtgggcatcaaagttgtgtgttatgtgtaattactagttatctgaataaaagagaaagagatcatccatatttcttatcctaaatgaatgtcacgtgtctttataattctttgatgaaccagatgcatttcattaaccaaatccatatacatataaatattaatcatatataattaatatcaattgggttagcaaaacaaatctagtctaggtgtgttttgcgatgtgaaaccaatctggatatccctgaaatttgaataaggttatgttgtgagtttatgaagttgtggtctagtgttgtattttgtttttcttaaggataatgcatctgtgtgctttgcttatctaaaatctaaataaagtgggtttctgcattgtgactttgcacaaacttcttttgttaaaatgaataagaaatcacatcaagaaaacagaacaagaccacaacgagaagacttgaaactctctgaaggtatataaacaaacagaacctagtaaattagagtcagcttattcaaaacttttagaccatcatcaagatcattataaacttggagtcaatgttgcggaaaccaatctgctatccccggaatttcaaataaagagactagagaattactttgaacacacttcttttattaaatcggatcacaaaaatccatcaaagacacaacagcaacaaacacaaagagaagacttaaaacactgaagcagtaaacaaacagagagaaataaagtagaatcagcttattcaaagtgtgtaaactatcatcaaaagatacttaaaatctccataatcgcgattaacggcaaacgctaattagtcactaggcccaggaaacactaactaagccctagcttatcctagcgcaacctagttaggtcttatttaaatgaagttcctattccgaagttcctattctctagaaagtataggaacttcagatccaccgggatccccgatcatgcaaaaactcattaactcagtgcaaaactatgcctggggcagcaaaacggcgttgactgaactttatggtatggaaaatccgtccagccagccgatggccgagctgtggatgggcgcacatccgaaaagcagttcacgagtgcagaatgccgccggagatatcgtttcactgcgtgatgtgattgagagtgataaatcgactctgctcggagaggccgttgccaaacgctttggcgaactgcctttcctgttcaaagtattatgcgcagcacagccactctccattcaggttcatccaaacaaacacaattctgaaatcggttttgccaaagaaaatgccgcaggtatcccgatggatgccgccgagcgtaactataaagatcctaaccacaagccggagctggtttttgcgctgacgcctttccttgcgatgaacgcgtttcgtgaattttccgagattgtctccctactccagccggtcgcaggtgcacatccggcgattgctcactttttacaacagcctgatgccgaacgtttaagcgaactgttcgccagcctgttgaatatgcagggtgaagaaaaatcccgcgcgctggcgattttaaaatcggccctcgatagccagcagggtgaaccgtggcaaacgattcgtttaatttctgaattttacccggaagacagcggtctgttctccccgctattgctgaatgtggtgaaattgaaccctggcgaagcgatgttcctgttcgctgaaacaccgcacgcttacctgcaaggcgtggcgctggaagtgatggcaaactccgataacgtgctgcgtgcgggtctgacgcctaaatacattgatattccggaactggttgccaatgtgaaattcgaagccaaaccggctaaccagttgttgacccagccggtgaaacaaggtgcagaactggacttcccgattccagtggatgattttgccttctcgctgcatgaccttagtgataaagaaaccaccattagccagcagagtgccgccattttgttctgcgtcgaaggcgatgcaacgttgtggaaaggttctcagcagttacagcttaaaccgggtgaatcagcgtttattgccgccaacgaatcaccggtgactgtcaaaggccacggccgtttagcgcgtgtttacaacaagctgtaagagcttactgaaaaaattaacatctcttgctaagctgggggtggaacctagacttgtccatcttctggattggccaacttaattaatgtatgaaataaaaggatgcacacatagtgacatgctaatcactataatgtgggcatcaaagttgtgtgttatgtgtaattactagttatctgaataaaagagaaagagatcatccatatttcttatcctaaatgaatgtcacgtgtctttataattctttgatgaaccagatgcatttcattaaccaaatccatatacatataaatattaatcatatataattaatatcaattgggttagcaaaacaaatctagtctaggtgtgttttgcgaatgcgaccttcttatgtgcttctagtctccaaatgtggttgatagttattttgctctaagatcaacagtaatgaagtataaatcatcgttgtggtgtgctactcggttaattgagcattaacacacacaaacatgacgaggatggtataatctccaaaaatgtgtactttgttaggtgggaccctatagccttgattaatgtgctatgttaggcatgcctggaaacgtgtgacgcatatgttttgtgaacctgttgatattatatgtgcttttatattaccatattttattaaaatactaatatttattactagtaagatataacattctatctagcttaaaaactaaccataaatattccataataactagatttaccaaactaatatactaaatatacataataaatacaaaattaacaagacaataatcaatatttatgagcttaatatatttagacattatggttggtcgacgataatcatgctaacttttcgtaattgcttgattgaaatatgcttagaataatgcctctttgttctacatggcaaatagggaccattatggtgtaacaccctgggaaccacaaacaccccgaaatgctactaaactacacaactaaccttcatatataaaatttcgacagcatctcctttgaaaatttgcatagacgtggaagcaacagagtataaacagatatcatgataagaaaacatactagacattaataatctgctagaaatgggaagaatcctaacttgacgactgcgtaactgactagagtcacacttagctgaccctagtcacttacaactgacttcgtgtcctagatcgatgggccctggccgaagcttggtcacccggtccgggcctagaaggccgatctcccggttaaccggacttacccttaagcgatttaaatcctgaggcctgcaacactgatagtttaaactgaaggcgggaaacgacaatctgatcatgagcggagaattaagggagtcacgttatgacccccgccgatgacgcgggacaagccgttttacgtttggaactgacagaaccgcaacgattgaaggagccactcagccgcgggtttctggagtttaatgagctaagcacatacgtcagaaaccattattgcgcgttcaaaagtcgcctaaggtcactatcagctagcaaatatttcttgtcaaaaatgctccactgacgttccataaattcccctcggtatccaattagagtctcatattcactcccatggcggccaatgcgggcggcggtggagcgggaggaggcagcggcagcggcagcgtggctgcgccggcggtgtgccgccccagcggctcgcggtggacgccgacgccggagcagatcaggatgctgaaggagctctactacggctgcggcatccggtcgcccagctcggagcagatccagcgcatcaccgccatgctgcggcagcacggcaagatcgagggcaagaacgtcttctactggttccagaaccacaaggcccgcgagcgccagaagcgccgcctcaccagcctcgacgtcaacgtgcccgccgccggcgcggccgacgccaccaccagccaactcggcgtcctctcgctgtcgtcgccgccgccttcaggcgcggcgcctccctcgcccaccctcggcttctacgccgccggcaatggcggcggatcggctgtgctgctggacacgagttccgactggggcagcagcggcgctgctatggccaccgagacatgcttcctgcaggactacatgggcgtgacggacacgggcagctcgtcgcagtggccacgcttctcgtcgtcggacacgataatggcggcggccgcggcgcgggcggcgacgacgcgggcgcccgagacgctccctctcttcccgacctgcggcgacgacggcggcagcggtagcagcagctacttgccgttctggggtgccgcgtccacaactgccggcgccacttcttccgttgcgatccaacagcaacaccagctgcaggagcagtacagcttttacagcaacagcaacagcacccagctggccggcaccggcaaccaagacgtatcggcaacagcagcagcagccgccgccctggagctgagcctcagctcatggtgctccccttaccctgctgcagggagtatgtgagagcaacgcgagctgccactgctcttcactgatgtctctggaatggaaggaggaggaagtgagaacagatcattcgacaaagcagcattagtccgttgatcggtggaagaccactcgtcagtgttgagttgaatgtttgatcaataaaatacggcaatgctgtaagggttgttttttatgccattgataatacactgtactgttcagttgttgaactctatttcttagccatgccaagtgcttttcttattttgaataacattacagcaaaaagttgaaagacaaaaaaaaaaacccccgaacagagtgctttgggtcccaagcttctttagactgtgttcggcgttccccctaaatttctccccctatatctcactcacttgtcacatcagcgttctctttccccctatatctccacgctctacagcagttccacctatatcaaacctctataccccaccacaacaatattatatactttcatcttcaactaactcatgtaccttccaatttttttctactaataattatttacgtgcacagaaacttagcaaggagagagagagcgggaatttaaatgctcggcgttaggcttttagtccgctaggtggctagaccgaggttaggacgctagttcactaggggcctagtggtgttttaagacgtcacggtcaccgcggccgcatcgagcagctggcttgtggggaccagacaaaaaaggaatggtgcagaattgttaggcgcacctaccaaaagcatctttgcctttattgcaaagataaagcagattcctctagtacaagtggggaacaaaataacgtggaaaagagctgtcctgacagcccactcactaatgcgtatgacgaacgcagtgacgaccacaaaactcgagcaacgagatcatgagccaatcaaagaggagtgatgtagacctaaagcaataatggagccatgacgtaagggcttacgcccatacgaaataattaaaggctgatgtgacctgtcggtctctcagaacctttactttttatgtttggcgtgtatttttaaatttccacggcaatgacgatgtgaccgtcgacccactaaaacattgctttgtcaaaagctaaaaaagatgatgcccgacagccacttgtgtgaagcatgagaagccggtccctccactaagaaaattagtgaagcatcttccagtggtccctccactcacagctcaatcagtgagcaacaggacgaaggaaatgacgtaagccatgacgtctaatcccattcgaaacgcgtggaccgaagcttgcatgcctgcagtgcagcgtgacccggtcgtgcccctctctagagataatgagcattgcatgtctaagttataaaaaattaccacatattttttttgtcacacttgtttgaagtgcagtttatctatctttatacatatatttaaactttactctacgaataatataatctatagtactacaataatatcagtgttttagagaatcatataaatgaacagttagacatggtctaaaggacaattgagtattttgacaacaggactctacagttttatctttttagtgtgcatgtgttctcctttttttttgcaaatagcttcacctatataatacttcatccattttattagtacatccatttagggtttagggttaatggtttttatagactaatttttttagtacatctattttattctattttagcctctaaattaagaaaactaaaactctattttagtttttttatttaataatttagatataaaatagaataaaataaagtgactaaaaattaaacaaataccctttaagaaattaaaaaaactaaggaaacatttttcttgtttcgagtagataatgccagcctgttaaacgccgtcgacgagtctaacggacaccaaccagcgaaccagcagcgtcgcgtcgggccaagcgaagcagacggcacggcatctctgtcgctgcctctggacccctctcgagagttccgctccaccgttggacttgctccgctgtcggcatccagaaattgcgtggcggagcggcagacgtgagccggcacggcaggcggcctcctcctcctctcacggcaccggcagctacgggggattcctttcccaccgctccttcgctttcccttcctcgcccgccgtaataaatagacaccccctccacaccctctttccccaacctcgtgttgttcggagcgcacacacacacaaccagatctcccccaaatccacccgtcggcacctccgcttcaaggtacgccgctcgtcctcccccccccccctctctaccttctctagatcggcgttccggtccatgcatggttagggcccggtagttctacttctgttcatgtttgtgttagatccgtgtttgtgttagatccgtgctgctagcgttcgtacacggatgcgacctgtacgtcagacacgttctgattgctaacttgccagtgtttctctttggggaatcctgggatggctctagccgttccgcagacgggatcgatttcatgattttttttgtttcgttgcatagggtttggtttgcccttttcctttatttcaatatatgccgtgcacttgtttgtcgggtcatcttttcatgcttttttttgtcttggttgtgatgatgtggtctggttgggcggtcgttctagatcggagtagaattctgtttcaaactacctggtggatttattaattttggatctgtatgtgtgtgccatacatattcatagttacgaattgaagatgatggatggaaatatcgatctaggataggtatacatgttgatgcgggttttactgatgcatatacagagatgctttttgttcgcttggttgtgatgatgtggtgtggttgggcggtcgttcattcgttctagatcggagtagaatactgtttcaaactacctggtgtatttattaattttggaactgtatgtgtgtgtcatacatcttcatagttacgagtttaagatggatggaaatatcgatctaggataggtatacatgttgatgtgggttttactgatgcatatacatgatggcatatgcagcatctattcatatgctctaaccttgagtacctatctattataataaacaagtatgttttataattattttgatcttgatatacttggatgatggcatatgcagcagctatatgtggatttttttagccctgccttcatacgctatttatttgcttggtactgtttcttttgtcgatgctcaccctgttgtttggtgttacttctgcaggtcgactttaacttagcctaggatccatggccactgtgaacaactggctcgctttctccctctccccgcaggagctgccgccctcccagacgacggactccacactcatctcggccgccaccgccgaccatgtctccggcgatgtctgcttcaacatcccccaagattggagcatgaggggatcagagctttcggcgctcgtcgcggagccgaagctggaggacttcctcggcggcatctccttctccgagcagcatcacaaggccaactgcaacatgatacccagcactagcagcacagtttgctacgcgagctcaggtgctagcaccggctaccatcaccagctgtaccaccagcccaccagctcagcgctccacttcgcggactccgtaatggtggcttcctcggccggtgtccacgacggcggtgccatgctcagcgcggccgccgctaacggtgtcgctggcgctgccagtgccaacggcggcggcatcgggctgtccatgattaagaactggctgcggagccaaccggcgcccatgcagccgagggtggcggcggctgagggcgcgcaggggctctctttgtccatgaacatggcggggacgacccaaggcgctgctggcatgccacttctcgctggagagcgcgcacgggcgcccgagagtgtatcgacgtcagcacagggtggagccgtcgtcgtcacggcgccgaaggaggatagcggtggcagcggtgttgccggcgctctagtagccgtgagcacggacacgggtggcagcggcggcgcgtcggctgacaacacggcaaggaagacggtggacacgttcgggcagcgcacgtcgatttaccgtggcgtgacaaggcatagatggactgggagatatgaggcacatctttgggataacagttgcagaagggaagggcaaactcgtaagggtcgtcaagtctatttaggtggctatgataaagaggagaaagctgctagggcttatgatcttgctgctctgaagtactggggtgccacaacaacaacaaattttccagtgagtaactacgaaaaggagctcgaggacatgaagcacatgacaaggcaggagtttgtagcgtctctgagaaggaagagcagtggtttctccagaggtgcatccatttacaggggagtgactaggcatcaccaacatggaagatggcaagcacggattggacgagttgcagggaacaaggatctttacttgggcaccttcagcacccaggaggaggcagcggaggcgtacgacatcgcggcgatcaagttccgcggcctcaacgccgtcaccaacttcgacatgagccgctacgacgtgaagagcatcctggacagcagcgccctccccatcggcagcgccgccaagcgcctcaaggaggccgaggccgcagcgtccgcgcagcaccaccacgccggcgtggtgagctacgacgtcggccgcatcgcctcgcagctcggcgacggcggagccctggcggcggcgtacggcgcgcactaccacggcgccgcctggccgaccatcgcgttccagccgggcgccgccagcacaggcctgtaccacccgtacgcgcagcagccaatgcgcggcggcgggtggtgcaagcaggagcaggaccacgcggtgatcgcggccgcgcacagcctgcaggacctccaccacctgaacctgggcgcggccggcgcgcacgactttttctcggcagggcagcaggccgccgccgctgcgatgcacggcctgggtagcatcgacagtgcgtcgctcgagcacagcaccggctccaactccgtcgtctacaacggcggggtcggcgacagcaacggcgccagcgccgtcggcggcagtggcggtggctacatgatgccgatgagcgctgccggagcaaccactacatcggcaatggtgagccacgagcaggtgcatgcacgggcctacgacgaagccaagcaggctgctcagatggggtacgagagctacctggtgaacgcggagaacaatggtggcggaaggatgtctgcatgggggactgtcgtgtctgcagccgcggcggcagcagcaagcagcaacgacaacatggccgccgacgtcgggcatggcggcgcgcagctcttcagtgtctggaacgacacttaagcgtacctagtggtacctgacatcttatagtctgcaacctctcgtgtctgaattcctatctttatcaagtgttattgcttccacgactataggacagctttcgtcgaaagcttttgctcatgtgatctcgaaggattcatctagtctgatttttcgtgacttgtatcggttttattggattcatccaacatatatcaataaaaaatgagttgtgtttcctttcttcctagttcagttaaaattatttccctcctgcgcttgtgctgtaattgtctgtgtacctgttgtttgtgactgtgttagttcccttggatatgatttcgtatttgatatgtacatggagatagcttagcttcattattggagtatgaagttagtatgacatagtcactctcctggaaaattgacactgcaaaccatatttttattctgaaccacaaatcctagtcagtccgctggcatatgccgtccgtttgctgaatccagaacgtgggtttggagatgtacggctgagatgcctctatgcgaaggggatttcgtggtgaaacgagatgggagtagagcaacgcccgtggaagatgcttcaaacttccacacttttgagcaacgatcggcagtagtaaggtagacgatttcaagatcaaagcatatgaagataaacaacatcaacaacaaaatttgttggggttctatagagagaaacagagctacatacatacactgttttgtatctaccatctgagatgatgaaaagatgaaaaactaaagaatgccccggcgccaacgccaggacacgccgcgcgcgcgtcacccgagccatctcttgacccagccggcgctgtatatttacacacgttgcagcatcgatcaccacctgttcgatcgcgtcgccgtcaccggcgcgccgcgacttattgaactagtctagggcgcggctaacaacctagcttagattgccttgtctaaacccttaggctaacgcgccactctagaaggccgatctccccgggttcacaaactcaatacaacacacagtggagtagggtattacgctccggcggcccgaaccactctaaatccttgtgtcctcgtgtgctcttccaccattaatgactgtaattgcagggacacgaagagttgtagcgcttttgccaacaagatccgctatatgctagtagagtggaacctgcacagcaacaagcatccaataatctgagaataagaattatgtgtggtgatggttctcatctctgcaactcgccattttcgcgagagaaccaaatccaagttggtgaagatcatgatttgggctcatgggctggcatagtagctattacctttgcaattgtggttcgaatctatccgatattctccttttcagggagagctaatgcttatgcttattgggtattttggtttgacactgcttcacgcccaaaaaaaggcaactatgtctgagttggatatggcccaaaaaaaggcagctatgtctgagttggatatggaagtcttctttcgtttagggtgaagtaagaccaagctcatgagcttattatcttaggtcggaacaaattagttgataggcatggcacatttatcaaattataatgattttaacagaaaagcaacacctctttttcagcagcaccagctttgcaagctgcaattgacactccaagcatagtatttgctccaaactcagcctgcatttcgcacaatatcatatctatttccatttggataaaatatattttccagaaatatgggaacagaatcaagatacagaaaaaagttgtggtagtagtggtaagtggaaacacaagtacagtgaaaagatagcattatttctgaacagtcaaattaaccgaaataagtagtatcacatactgcccctaaattgactacacccaatgtaaagaattgcttgagcatattgagccatcagttgtttgtttgtgtaacggatttgacaatgcagagttcaggagcaaaaaaccgcaaaggagagaaagagggaaaggatctcctagtatcccaccttgtggcgcgccctgtcaagtgcatgatggcctggtcgatctgcgtctgctgctgcggttccatcccaacgagtgcctccgacaccttgtcgttgatcacccgcaccgcgtaggcgacccccctggcgaggaacttccgcctctcggaggccccggccgcgtcggcggcggcgccctcgagcgcgcccacgctagccgtagatgctcggtgcacggccttgttggtgtgcaactcgacctcaacggccggtgcgctacgcccgtcaaggatctggcgcgcccgcaccctcgtgatcacggtgggcgcctcccgcctcatgtggccgacgatgaaaagcgccgggttaggggccttggcgcgcaccgccgtattcagggcctcctcgctcttgcgcgagagcaggtgcttccccaggtactcctgcactgacaaggctgccacagcggtggaatttgtcctcacgacttcgccacgtcgtcctcacctccctggcttcccacgactccgccgtatcgaggtgctcggtgggtcgtcttaatccgaagtccgaactaggaagacgagacagagaggtctgaggaatgggcctcgtttgatgttgagctgaattatttttccagcataagcccaggtcttggtccatgaacaaaattactagaaacccagcccagtactacgatctaaaagagggactgccactggatagctctctctagcattctccacgctccaatacagcggcgtcgtgtctatccgggtctatccgcgaacacgtgagaactctccagaaactgctttctcctccacttcatctctctcgctttccctctataaaaagaccccttctaggaattgagggagacagcaagcaccaagcagcgatccgaagctcaatcaattcactcaaacctcttccccaaatcttcgattagatcttcgttgacaagaagactagaaccgaacctgacatgtccaacctgctcacggttcaccagaaccttccggctcttccagtggacgcgacgtccgatgaagtcaggaagaacctcatggacatgttccgcgacaggcaagcgttcagcgagcacacctggaagatgctgctctccgtctgccgctcctgggctgcatggtgcaagctgaacaacaggaagtggttccccgctgagcccgaggacgtgagggattaccttctgtacctgcaagcgcgaggtttgtttctgcttctacctttgatatatatataataattatcattaattagtagtaatataatatttcaaatatttttttcaaaataaaagaatgtagtatatagcaattgcttttctgtagtttataagtgtgtatattttaatttataacttttctaatatatgaccaaaacatggtgatgcctaggtctggcagtgaagaccatccagcaacaccttggacaactgaacatgcttcacaggcgctccggcctcccgcgccccagcgactcgaacgccgtgagcctcgtcatgcgccgcatcaggaaggaaaacgtcgatgccggcgaaagggcaaagcaggccctcgcgttcgagaggaccgatttcgaccaggtccgcagcctgatggagaacagcgacaggtgccaggacattaggaacctggcgttcctcggaattgcatacaacacgctcctcaggatcgcggaaattgcccgcattcgcgtgaaggacattagccgcaccgacggcggcaggatgcttatccacattggcaggaccaagacgctcgtttccaccgcaggcgtcgaaaaggccctcagcctcggagtgaccaagctcgtcgaacgctggatctccgtgtccggcgtcgcggacgacccaaacaactacctcttctgccgcgtccgcaagaacggggtggctgcccctagcgccaccagccaactcagcacgagggccttggaaggtattttcgaggccacccaccgcctgatctacggcgcgaaggatgacagcggtcaacgctacctcgcatggtccgggcactccgcccgcgttggagctgctagggacatggcccgcgccggtgtttccatccccgaaatcatgcaggcgggtggatggacgaacgtgaacattgtcatgaactacattcgcaaccttgacagcgagacgggcgcaatggttcgcctcctggaagatggtgactgaggtaccggctccacgtagtcgttatcgacgatcggcgacactactggagttggagcaacgtctagttccagcaataatataatgcaatattactgtagtagtagtagtatactataggacccctcctagctagcatgcggacatgctcttgtgatcttgtctcgggtccagacttcaataaagccatcttggcattatatgtactatacaaaaaagattatcactgctttctctcgatcgcaaatcatcctgtttttttttttggcaaaaagttcagcgtttctttctctctctctgactaccaaactgttgacagaaagaaaaaggtcaaaggagtttgcgaacgtacagtacagacataaaaaaacaaacacaagcagaaatatcaaatactgtgtttggttgttgtggcacgttgggcgtggtggaactgcggcacagttcttcgtgtagttttgcacaacttctgcctaaagttcgcactgatttcttgcactagatattcggggacaccacagctacctgcgcgcgtataaggtaaacaggccctaataacaaccgtctcaatattgtgtgatgtgtttgaggtcagatttgatcaatcaagaacatcttaacctataagatataggtaaataacaagccatctctttaacagtgaacatgtgtctctcaaacatattaaataatattggtgcggttagtgtgaagaaagtactgttagctgatttgttgtgaaagaaaaatattactgaatgactaacatctcttccaaactaaatgtttgcgtgtgaaataatggatattgtcggttccaaactaaatgtttgcgtgtgaaataatggatattgtcggatagagcacaaggtgctcaccttctgcacccaatataatttcactcaagaacgagcaggatatcgatcgacgatctcaaatgagcaacacgagctcagcataatatcgtgagccgtgatccgtcgccccgctagtctaaaaacggcccctaactaacgcttagttgcccgctagattagtcccccgttagtgcctagttagacacacgacgaactaggggctagcacgcgttacccgggataacttcgtatagcatacattatacgaagttatgaattccggaccgggttaccgaattcctgcccttaaggccaattgttcaagattcattcaacaattgaaacatctcccatgattaaatcagtataaggttgctatggtcttgcttgacaaagtttttttttgagggaatttcaactaaatttttgagtgaaactatcaaatactgattttaaaaaatttttataaaaggaagcgcagagataaaaggccatctatgctacaaaagtacccaaaaatgtaatcctaaagtatgaattgcattttttttttgtttggacgaaaggaaaggagtattaccacaagaatgatatcatcttcatatttagatcttttttgggtaaagcttgagattctctaaatatagagaaatcagaagaaaaaaaaaccgtgttttggtggttttgatttctagcctccacaataactttgacggcgtcgacaagtctaacggacaccaagcagcgaaccaccagcgccgagccaagcgaagcagacggccgagacgttgacaccttcggcgcggcatctctcgagagttccgctccggcgctccacctccaccgctggcggtttcttattccgttccgttccgcctcctgctctgctcctctccacaccacacggcacgaaaccgttacggcaccggcagcacccagcacgggagaggggattcctttcccaccgttccttccctttccgccccgccgctataaatagccagccccatccccagcttttttccccaatctcatctcctctctcctgttgttcggagcacacgcacaatccgatcgatccccaaatccccttcgtctctcctcgcgagcctcgtggatcccagcttcaaggtacggcgatcgatcatcccccctccttctctctaccttcttttctctagactacatcggatggcgatccatggttagggcctgctagtttcccttcctgttttgtcgatggctgcgaggcacaatagatctgatggcgttatgacggctaacttgtcatgttgttgcgatttatagtccctttaggagatcagtttaatttctcggatggttcgagatcggtggtccatggttagtaccctaagatccgcgctgttagggttcgtagatggaggcgacctgttctgattgttaacttgtcagtacctgggaaatcctgggatggttctagctcgtccgcagatgagatcgatttcatgatcctctgtatcttgtttcgttgcctaggttccgtctaatctatccgtggtatgatgtagatgttttgatcgtgctaactacgtcttgtaaagttaattgtcaggtcataatttttagcatgcctttttttttgtttggttttgtctaattgggctgtcgttctagatcagagtagaagactgttccaaactacctgctggatttattgaacttggatctgtatgtgtgtcacatatcttcataaattcatgattaagatggattgaaatatcttttatctttttggtatggatagttctatatgttggtgtggctttgttagatgtatacatgcttagatacatgaagcaacgtgctgctactgtttagtaattgctgttcatttgtctaataaacagataaggatatgtatttatgttgctgttggttttgctggtactttgttggatacaaatgcttcaatacagaaaacagcatgctgctacgatttaccatttatctaatcttatcatatgtctaatctaataaacaaacatgcttttaaattatcttcatatgcttggatgatggcatacacagcggctatgtgtggttttttaaatacccagcatcatgggcatgcatgacactgctttaatatgctttttatttgcttgagactgtttcttttgtttatactgaccctttagttcggtgactcttctgcaggtcgactttaacttagcctaggatccatggcccagtccaagcacggcctgaccaaggagatgaccatgaagtaccgcatggagggctgcgtggacggccacaagttcgtgatcaccggcgagggcatcggctaccccttcaagggcaagcaggccatcaacctgtgcgtggtggagggcggccccttgcccttcgccgaggacatcttgtccgccgccttcatgtacggcaaccgcgtgttcaccgagtacccccaggacatcgtcgactacttcaagaactcctgccccgccggctacacctgggaccgctccttcctgttcgaggacggcgccgtgtgcatctgcaacgccgacatcaccgtgagcgtggaggagaactgcatgtaccacgagtccaagttctacggcgtgaacttccccgccgacggccccgtgatgaagaagatgaccgacaactgggagccctcctgcgagaagatcatccccgtgcccaagcagggcatcttgaagggcgacgtgagcatgtacctgctgctgaaggacggtggccgcttgcgctgccagttcgacaccgtgtacaaggccaagtccgtgccccgcaagatgcccgactggcacttcatccagcacaagctgacccgcgaggaccgcagcgacgccaagaaccagaagtggcacctgaccgagcacgccatcgcctccggctccgccttgccctccggactcagatctcgatagggtaccaatggccagttaacagatccagctgctgctgttctagggttcacaagtctgcctatttgtcttccccaatggagctatggttgtctggtctggtccttggtcgtgtcccgtttcattgtgtactatttacctgtaatgtgtatccttaagtctggtttgatggtgtctgaaacgttttgctgtggtagagcagcatggaagaactataatgaataagtgatccctaatcattgtgtccaaattttgcttctgctatacccttttgtgctgtttcttatgttttgcttaaaaatttgatctgacaaacaaatttgtctaaattatgctcttgttctgactgtgtactgtacacatttgtattgctaccggtttggcacatagttttctctttgattgcagatcaaacccttctgattgcagattgcttggctatggctgatgtgctcactgttcttctttagcttgtatattgctgatggtggcttggctacggctgaaaaagttgctgctgcgccgacttggcaactgttgctccagtaatgctttgtcctctcttcctagccgccgacttggcacttggcagctgttgctcctgtaatgcgttgttatctcttatctcttgagatgtactatgattttgaggctgtttgacttgtgccagattgccagtgctgatgctatattatctcaggtttttatgctagtatatgttttactgtgtgctgcctgtgtcgagttacgtaatctattgaaccgctatgcgtgttgatgccctgttgttgcttgccagattgatgcccctgttgcttgcagcttgcaagctgtagtgaaatcctaaaattcgaaaccaaatctattctgaacttttgaagatctgtgatgtccggaagaaaagattcaaacagataaacgggactctccagaatctataaaataaatgatcgacaaacgctttgctttggtaggcttcctcaactttattatacaaagttgatagatcctacaggccagaatggcctctggattcagcggcctagaaggccgaagtacttggtcttcctaatatcggaccgaggaccgattaaactttaattcggtccgtcaatattcaccgaagcgactaattaactagctgtcccacggcctaactagcacttaatcccctagcctaacctaagagcgctaatctaggctagtggtcacttagggctttaaggctagcgtatacgaagttcctattccgaagttcctattcttcaaaaagtataggaacttctgtacacctgagcctaactaactaggacgtcccgaggtccgattccgggctaattaacacctagctcgccactcgactaattagggactaagcctagcgcttagccgttaaaacctagcacaccctaagcacccttagttaggttcccctcttaattaagccctagtgagcccctaagttaaggggacgctaagagccccctaacctagtattcggctagaggcgaactaggctaaacacctaagcgcacctctttaagctagatcgctagggggctaggctagagcttcgctagattagtctaagggcagctaactaactaggggcgcgtcaataccgaattcattccgattaatcgtggcctcttgctcttcaggatgaagagctatgtttaaacgtgcaagcgctactagacaattcagtacattaaaaacgtccgcaatgtgttattaagttgtctaagcgtcaatttgtttacaccacaatatatcctgccaccagccagccaacagctccccgaccggcagctcggcacaaaatcaccactcgatacaggcagcccatcagtccgggacggcgtcagcgggagagccgttgtaaggcggcagactttgctcatgttaccgatgctattcggaagaacggcaactaagctgccgggtttgaaacacggatgatctcgcggagggtagcatgttgattgtaacgatgacagagcgttgctgcctgtgatcaaatatcatctccctcgcagagatccgaattatcagccttcttattcatttctcgcttaaccgtgacaggcgcgcgcggtgccacctgggtccttttcatcacgtgctataaaaataattataatttaaattttttaatataaatatataaattaaaaatagaaagtaaaaaaagaaattaaagaaaaaatagtttttgttttccgaagatgtaaaagactctagggggatcgccaacaaatactaccttttatcttgctcttcctgctctcaggtattaatgccgaattgtttcatcttgtctgtgtagaagaccacacacgaaaatcctgtgattttacattttacttatcgttaatcgaatgtatatctatttaatctgcttttcttgtctaataaatatatatgtaaagtacgctttttgttgaaattttttaaacctttgtttatttttttttcttcattccgtaactcttctaccttctttatttactttctaaaatccaaatacaaaacataaaaataaataaacacagagtaaattcccaaattattccatcattaaaagatacgaggcgcgtgtaagttacaggcaagcgatccgtcctaagaaaccattattatcatgacattaacctataaaaataggcgtatcacgaggccctttcgtctcgcgcgtttcggtgatgacggtgaaaacctctgacacatgcagctcccggagacggtcacagcttgtctgtaagcggatgccgggagcagacaagcccgtcagggcgcgtcagcgggtgttggcgggtgtcggggctggcttaactatgcggcatcagagcagattgtactgagagtgcaccataccacagcttttcaattcaattcatcattttttttttattcttttttttgatttcggtttctttgaaatttttttgattcggtaatctccgaacagaaggaagaacgaaggaaggagcacagacttagattggtatatatacgcatatgtagtgttgaagaaacatgaaattgcccagtattcttaacccaactgcacagaacaaaaacctgcaggaaacgaagataaatcatgtcgaaagctacatataaggaacgtgctgctactcatcctagtcctgttgctgccaagctatttaatatcatgcacgaaaagcaaacaaacttgtgtgcttcattggatgttcgtaccaccaaggaattactggagttagttgaagcattaggtcccaaaatttgtttactaaaaacacatgtggatatcttgactgatttttccatggagggcacagttaagccgctaaaggcattatccgccaagtacaattttttactcttcgaagacagaaaatttgctgacattggtaatacagtcaaattgcagtactctgcgggtgtatacagaatagcagaatgggcagacattacgaatgcacacggtgtggtgggcccaggtattgttagcggtttgaagcaggcggcagaagaagtaacaaaggaacctagaggccttttgatgttagcagaattgtcatgcaagggctccctatctactggagaatatactaagggtactgttgacattgcgaagagcgacaaagattttgttatcggctttattgctcaaagagacatgggtggaagagatgaaggttacgattggttgattatgacacccggtgtgggtttagatgacaagggagacgcattgggtcaacagtatagaaccgtggatgatgtggtctctacaggatctgacattattattgttggaagaggactatttgcaaagggaagggatgctaaggtagagggtgaacgttacagaaaagcaggctgggaagcatatttgagaagatgcggccagcaaaactaaaaaactgtattataagtaaacgcgcgcgggcgcgccttttcagcctgatacagattaaatcagaacgcagaagcggtctgataaaacagaatttgcctggcggcagtagcgcggtggtcccacctgaccccatgccgaactcagaagtgaaacgccgtagcgccgatggtagtgtggggtctccccatgcgagagtagggaactgccaggcatcaaataaaacgaaaggctcagtcgaaagactgggcctttcgttttatctgttgtttgtcggtgaacgctctcctgagtaggacaaatccgccgggagcggatttgaacgttgcgaagcaacggcccggagggtggcgggcaggacgcccgccataaactgccaggcatcaaattaagcagaaggccatcctgacggatggcctttttgcgtttctacaaactcttaccgcacccggagcgggcgcgaggccgccaaggcccgaggcgtgaagtttggcccccgccctaccctcaccccggcacagatcgcgcacgcccgcgagctgatcgaccaggaaggccgcaccgtgaaagaggcggctgcactgcttggcgtgcatcgctcgaccctgtaccgcgcacttgagcgcagcgaggaagtgacgcccaccgaggccaggcggcgcggtgccttccgtgaggacgcattgaccgaggccgacgccctggcggccgccgagaatgaacgccaagaggaacaagcatgaaaccgcaccaggacggccaggacgaaccgtttttcattaccgaagagatcgaggcggagatgatcgcggccgggtacgtgttcgagccgcccgcgcacgtctcaaccgtgcggctgcatgaaatcctggccggtttgtctgatgccaagctggcggcctggccggccagcttggccgctgaagaaaccgagcgccgccgtctaaaaaggtgatgtgtatttgagtaaaacagcttgcgtcatgcggtcgctgcgtatatgatgcgatgagtaaataaacaaatacgcaaggggaacgcatgaaggttatcgctgtacttaaccagaaaggcgggtcaggcaagacgaccatcgcaacccatctagcccgcgccctgcaactcgccggggccgatgttctgttagtcgattccgatccccagggcagtgcccgcgattgggcggccgtgcgggaagatcaaccgctaaccgttgtcggcatcgaccgcccgacgattgaccgcgacgtgaaggccatcggccggcgcgacttcgtagtgatcgacggagcgccccaggcggcggacttggctgtgtccgcgatcaaggcagccgacttcgtgctgattccggtgcagccaagcccttacgacatatgggccaccgccgacctggtggagctggttaagcagcgcattgaggtcacggatggaaggctacaagcggcctttgtcgtgtcgcgggcgatcaaaggcacgcgcatcggcggtgaggttgccgaggcgctggccgggtacgagctgcccattcttgagtcccgtatcacgcagcgcgtgagctacccaggcactgccgccgccggcacaaccgttcttgaatcagaacccgagggcgacgctgcccgcgaggtccaggcgctggccgctgaaattaaatcaaaactcatttgagttaatgaggtaaagagaaaatgagcaaaagcacaaacacgctaagtgccggccgtccgagcgcacgcagcagcaaggctgcaacgttggccagcctcgcagacacgccagccatgaagcgggtcaactttcagttgccggcggaggatcacaccaagctgaagatgtacgcggtacgccaaggcaagaccattaccgagctg

SEQ ID NO: 77 - DNA, 20950 bp, synthetic construct
  misc_feature 1..20950: note = PHP97334
  source 1..20950: mol_type = other DNA
gtttacccgccaatatatcctgtcaaacactgcggccgcacttgaccgcggatggagccggagctgtggtgaggccatcgacgggaggtgggggagaacacagtctcagtgttctttgtgagtccgcaaggtttttagcttttctgtattaattaaggttgctgttggctgtagaatacggtcgtggaagagctgtatcggtagctactacgtaagctattatatactggaagtctggagctcgtcgatctccggtcgtcttcctccatttctcctcgtcttgctttgactgctgctaccatttgcttctgttttctgatgaagcatgccatgtcggccaccagtgtttgtgtggtttttgcagggaatggctttcaagtgctgtgattgaatggccctcgtcgtcctcggctgagctcacatggacgcgtcatgtgagtgagatatatgatcatatgatgagtggggttcgggtgagtgcgtacttgaagtaggatcccgctttcactcattcattcattggcctttaaaccgggaaattttcgcgaggagatggagggaagcaagcagggtgacgagtgcagagtgccgcgagcgctttgtcaaaaggcaccgccgtaggcaaaaaaatcaatggccctgactgactcgatggtagtactactgtagagactagagagggttgctccccatatcttcgtgtgacttttactccagcattgcatttccgtcattgagacgttaattaatagcagctttcgggacagatgactgtggccatgtttcgtcacggccgcttcgtgccagctgggggtactatagtactgtgattttgttagtaaaaactttcattaggccaccattgacgaccgggccttcgcttttgctgcgctaattaaccatttcccggcgaccgaagggaacatgaacatgccccgacacatgagggcatgaggactagtgttctccctgtcgttcgttgacttgactagtgatagtttaaacgctcttcaactggaagagcggttactaccggttcactagctagctgctaatcgagctagttaccctatgaggtgacatgaagcgctcacggttactatgacggttagcttcacgactgttggtggcagtagcgtacgacttagctatagttccggacttacctagctaataacttcgtatagcatacattatacgaagttatggttaccgagctgttaccaagcggccgcacactgatagtttaaactgaaggcgggaaacgacaatctgatcatgagcggagaattaagggagtcacgttatgacccccgccgatgacgcgggacaagccgttttacgtttggaactgacagaaccgcaacgattgaaggagccactcagccgcgggtttctggagtttaatgagctaagcacatacgtcagaaaccattattgcgcgttcaaaagtcgcctaaggtcactatcagctagcaaatatttcttgtcaaaaatgctccactgacgttccataaattcccctcggtatccaattagagtctcatattcactcccatggcggccaatgcgggcggcggtggagcgggaggaggcagcggcagcggcagcgtggctgcgccggcggtgtgccgccccagcggctcgcggtggacgccgacgccggagcagatcaggatgctgaaggagctctactacggctgcggcatccggtcgcccagctcggagcagatccagcgcatcaccgccatgctgcggcagcacggcaagatcgagggcaagaacgtcttctactggttccagaaccacaaggcccgcgagcgccagaagcgccgcctcaccagcctcgacgtcaacgtgcccgccgccggcgcggccgacgccaccaccagccaactcggcgtcctctcgctgtcgtcgccgccgccttcaggcgcggcgcctccctcgcccaccctcggcttctacgccgccggcaatggcggcggatcggctgtgctgctggacacgagttccgactggggcagcagcggcgctgctatggccaccgagacatgcttcctgcaggactacatgggcgtgacggacacgggcagctcgtcgcagtggccacgcttctcgtcgtcggacacgataatggcggcggccgcggcgcgggcggcgacgacgcgggcgcccgagacgctccctctcttcccgacctgcggcgacgacggcggcagcggtagcagcagctacttgccgttctggggtgccgcgtccacaactgccggcgccacttcttccgttgcgatccaacagcaacaccagctgcaggagcagtacagcttttacagcaacagcaacagcacccagctggccggcaccggcaaccaagacgtatcggcaacagcagcagcagccgccgccctggagctgagcctcagctcatggtgctccccttaccctgctgcagggagtatgtgagagcaacgcgagctgccactgctcttcactgatgtctctggaatggaaggaggaggaagtgagaacagatcattcgacaaagcagcattagtccgttgatcggtggaagaccactcgtcagtgttgagttgaatgtttgatcaataaaatacggcaatgctgtaagggttgttttttatgccattgataatacactgtactgttcagttgttgaactctatttcttagccatgccaagtgcttttcttattttgaataacattacagcaaaaagttgaaagacaaaaaaaaaaacccccgaacagagtgctttgggtcccaagcttctttagactgtgttcggcgttccccctaaatttctccccctatatctcactcacttgtcacatcagcgttctctttccccctatatctccacgctctacagcagttccacctatatcaaacctctataccccaccacaacaatattatatactttcatcttcaactaactcatgtaccttccaatttttttctactaataattatttacgtgcacagaaacttagcaaggagagagagagcgggaatttaaatgctcggcgttaggcttttagtccgctaggtggctagaccgaggttaggacgctagttcactaggggcctagtggtgttttaagacgtcacggtcactacgaatcgaccgaagcttgcatgggccgcatcgagcagctggcttgtggggaccagacaaaaaaggaatggtgcagaattgttaggcgcacctaccaaaagcatctttgcctttattgcaaagataaagcagattcctctagtacaagtggggaacaaaataacgtggaaaagagctgtcctgacagcccactcactaatgcgtatgacgaacgcagtgacgaccacaaaactcgagcaacgagatcatgagccaatcaaagaggagtgatgtagacctaaagcaataatggagccatgacgtaagggcttacgcccatacgaaataattaaaggctgatgtgacctgtcggtctctcagaacctttactttttatgtttggcgtgtatttttaaatttccacggcaatgacgatgtgaccgtcgacccactaaaacattgctttgtcaaaagctaaaaaagatgatgcccgacagccacttgtgtgaagcatgagaagccggtccctccactaagaaaattagtgaagcatcttccagtggtccctccactcacagctcaatcagtgagcaacaggacgaaggaaatgacgtaagccatgacgtctaatcccagggccagcttgcatgcctgcagtgcagcgtgacccggtcgtgcccctctctagagataatgagcattgcatgtctaagttataaaaaattaccacatattttttttgtcacacttgtttgaagtgcagtttatctatctttatacatatatttaaactttactctacgaataatataatctatagtactacaataatatcagtgttttagagaatcatataaatgaacagttagacatggtctaaaggacaattgagtattttgacaacaggactctacagttttatctttttagtgtgcatgtgttctcctttttttttgcaaatagcttcacctatataatacttcatccattttattagtacatccatttagggtttagggttaatggtttttatagactaatttttttagtacatctattttattctattttagcctctaaattaagaaaactaaaactctattttagtttttttatttaataatttagatataaaatagaataaaataaagtgactaaaaattaaacaaataccctttaagaaattaaaaaaactaaggaaacatttttcttgtttcgagtagataatgccagcctgttaaacgccgtcgacgagtctaacggacaccaaccagcgaaccagcagcgtcgcgtcgggccaagcgaagcagacggcacggcatctctgtcgctgcctctggacccctctcgagagttccgctccaccgttggacttgctccgctgtcggcatccagaaattgcgtggcggagcggcagacgtgagccggcacggcaggcggcctcctcctcctctcacggcaccggcagctacgggggattcctttcccaccgctccttcgctttcccttcctcgcccgccgtaataaatagacaccccctccacaccctctttccccaacctcgtgttgttcggagcgcacacacacacaaccagatctcccccaaatccacccgtcggcacctccgcttcaaggtacgccgctcgtcctcccccccccccctctctaccttctctagatcggcgttccggtccatgcatggttagggcccggtagttctacttctgttcatgtttgtgttagatccgtgtttgtgttagatccgtgctgctagcgttcgtacacggatgcgacctgtacgtcagacacgttctgattgctaacttgccagtgtttctctttggggaatcctgggatggctctagccgttccgcagacgggatcgatttcatgattttttttgtttcgttgcatagggtttggtttgcccttttcctttatttcaatatatgccgtgcacttgtttgtcgggtcatcttttcatgcttttttttgtcttggttgtgatgatgtggtctggttgggcggtcgttctagatcggagtagaattctgtttcaaactacctggtggatttattaattttggatctgtatgtgtgtgccatacatattcatagttacgaattgaagatgatggatggaaatatcgatctaggataggtatacatgttgatgcgggttttactgatgcatatacagagatgctttttgttcgcttggttgtgatgatgtggtgtggttgggcggtcgttcattcgttctagatcggagtagaatactgtttcaaactacctggtgtatttattaattttggaactgtatgtgtgtgtcatacatcttcatagttacgagtttaagatggatggaaatatcgatctaggataggtatacatgttgatgtgggttttactgatgcatatacatgatggcatatgcagcatctattcatatgctctaaccttgagtacctatctattataataaacaagtatgttttataattattttgatcttgatatacttggatgatggcatatgcagcagctatatgtggatttttttagccctgccttcatacgctatttatttgcttggtactgtttcttttgtcgatgctcaccctgttgtttggtgttacttctgcaggtcgactttaacttagcctaggatccatggccactgtgaacaactggctcgctttctccctctccccgcaggagctgccgccctcccagacgacggactccacactcatctcggccgccaccgccgaccatgtctccggcgatgtctgcttcaacatcccccaagattggagcatgaggggatcagagctttcggcgctcgtcgcggagccgaagctggaggacttcctcggcggcatctccttctccgagcagcatcacaaggccaactgcaacatgatacccagcactagcagcacagtttgctacgcgagctcaggtgctagcaccggctaccatcaccagctgtaccaccagcccaccagctcagcgctccacttcgcggactccgtaatggtggcttcctcggccggtgtccacgacggcggtgccatgctcagcgcggccgccgctaacggtgtcgctggcgctgccagtgccaacggcggcggcatcgggctgtccatgattaagaactggctgcggagccaaccggcgcccatgcagccgagggtggcggcggctgagggcgcgcaggggctctctttgtccatgaacatggcggggacgacccaaggcgctgctggcatgccacttctcgctggagagcgcgcacgggcgcccgagagtgtatcgacgtcagcacagggtggagccgtcgtcgtcacggcgccgaaggaggatagcggtggcagcggtgttgccggcgctctagtagccgtgagcacggacacgggtggcagcggcggcgcgtcggctgacaacacggcaaggaagacggtggacacgttcgggcagcgcacgtcgatttaccgtggcgtgacaaggcatagatggactgggagatatgaggcacatctttgggataacagttgcagaagggaagggcaaactcgtaagggtcgtcaagtctatttaggtggctatgataaagaggagaaagctgctagggcttatgatcttgctgctctgaagtactggggtgccacaacaacaacaaattttccagtgagtaactacgaaaaggagctcgaggacatgaagcacatgacaaggcaggagtttgtagcgtctctgagaaggaagagcagtggtttctccagaggtgcatccatttacaggggagtgactaggcatcaccaacatggaagatggcaagcacggattggacgagttgcagggaacaaggatctttacttgggcaccttcagcacccaggaggaggcagcggaggcgtacgacatcgcggcgatcaagttccgcggcctcaacgccgtcaccaacttcgacatgagccgctacgacgtgaagagcatcctggacagcagcgccctccccatcggcagcgccgccaagcgcctcaaggaggccgaggccgcagcgtccgcgcagcaccaccacgccggcgtggtgagctacgacgtcggccgcatcgcctcgcagctcggcgacggcggagccctggcggcggcgtacggcgcgcactaccacggcgccgcctggccgaccatcgcgttccagccgggcgccgccagcacaggcctgtaccacccgtacgcgcagcagccaatgcgcggcggcgggtggtgcaagcaggagcaggaccacgcggtgatcgcggccgcgcacagcctgcaggacctccaccacctgaacctgggcgcggccggcgcgcacgactttttctcggcagggcagcaggccgccgccgctgcgatgcacggcctgggtagcatcgacagtgcgtcgctcgagcacagcaccggctccaactccgtcgtctacaacggcggggtcggcgacagcaacggcgccagcgccgtcggcggcagtggcggtggctacatgatgccgatgagcgctgccggagcaaccactacatcggcaatggtgagccacgagcaggtgcatgcacgggcctacgacgaagccaagcaggctgctcagatggggtacgagagctacctggtgaacgcggagaacaatggtggcggaaggatgtctgcatgggggactgtcgtgtctgcagccgcggcggcagcagcaagcagcaacgacaacatggccgccgacgtcgggcatggcggcgcgcagctcttcagtgtctggaacgacacttaagcgtacctagtggtacctgacatcttatagtctgcaacctctcgtgtctgaattcctatctttatcaagtgttattgcttccacgactataggacagctttcgtcgaaagcttttgctcatgtgatctcgaaggattcatctagtctgatttttcgtgacttgtatcggttttattggattcatccaacatatatcaataaaaaatgagttgtgtttcctttcttcctagttcagttaaaattatttccctcctgcgcttgtgctgtaattgtctgtgtacctgttgtttgtgactgtgttagttcccttggatatgatttcgtatttgatatgtacatggagatagcttagcttcattattggagtatgaagttagtatgacatagtcactctcctggaaaattgacactgcaaaccatatttttattctgaaccacaaatcctagtcagtccgctggcatatgccgtccgtttgctgaatccagaacgtgggtttggagatgtacggctgagatgcctctatgcgaaggggatttcgtggtgaaacgagatgggagtagagcaacgcccgtggaagatgcttcaaacttccacacttttgagcaacgatcggcagtagtaaggtagacgatttcaagatcaaagcatatgaagataaacaacatcaacaacaaaatttgttggggttctatagagagaaacagagctacatacatacactgttttgtatctaccatctgagatgatgaaaagatgaaaaactaaagaatgccccggcgccaacgccaggacacgccgcgcgcgcgtcacccgagccatctcttgacccagccggcgctgtatatttacacacgttgcagcatcgatcaccacctgttcgatcgcgtcgccgtcaccggcgcgccgcgacttattgaactagtctagggcgcggctaacaacctagcttagattgccttgtctaaacccttaggctaacgcgccactctagaaggccgatctcccccgaacgcgccagatccgatatcgatgggccctggccgaagcttggtcacccgcaccttgctagttggatattacctcttctcttcaaagtatccttgaacgctcaccggttatcaaatctctacactatagctctgtagtcttgctagatagttagttctttagctctctctagaggttcacaaactcaatacaacacacagtggagtagggtattacgctccggcggcccgaaccactctaaatccttgtgtcctcgtgtgctcttccaccattaatgactgtaattgcagggacacgaagagttgtagcgcttttgccaacaagatccgctatatgctagtagagtggaacctgcacagcaacaagcatccaataatctgagaataagaattatgtgtggtgatggttctcatctctgcaactcgccattttcgcgagagaaccaaatccaagttggtgaagatcatgatttgggctcatgggctggcatagtagctattacctttgcaattgtggttcgaatctatccgatattctccttttcagggagagctaatgcttatgcttattgggtattttggtttgacactgcttcacgcccaaaaaaaggcaactatgtctgagttggatatggcccaaaaaaaggcagctatgtctgagttggatatggaagtcttctttcgtttagggtgaagtaagaccaagctcatgagcttattatcttaggtcggaacaaattagttgataggcatggcacatttatcaaattataatgattttaacagaaaagcaacacctctttttcagcagcaccagctttgcaagctgcaattgacactccaagcatagtatttgctccaaactcagcctgcatttcgcacaatatcatatctatttccatttggataaaatatattttccagaaatatgggaacagaatcaagatacagaaaaaagttgtggtagtagtggtaagtggaaacacaagtacagtgaaaagatagcattatttctgaacagtcaaattaaccgaaataagtagtatcacatactgcccctaaattgactacacccaatgtaaagaattgcttgagcatattgagccatcagttgtttgtttgtgtaacggatttgacaatgcagagttcaggagcaaaaaaccgcaaaggagagaaagagggaaaggatctcctagtatcccaccttgtggcgcgccctgtcaagtgcatgatggcctggtcgatctgcgtctgctgctgcggttccatcccaacgagtgcctccgacaccttgtcgttgatcacccgcaccgcgtaggcgacccccctggcgaggaacttccgcctctcggaggccccggccgcgtcggcggcggcgccctcgagcgcgcccacgctagccgtagatgctcggtgcacggccttgttggtgtgcaactcgacctcaacggccggtgcgctacgcccgtcaaggatctggcgcgcccgcaccctcgtgatcacggtgggcgcctcccgcctcatgtggccgacgatgaaaagcgccgggttaggggccttggcgcgcaccgccgtattcagggcctcctcgctcttgcgcgagagcaggtgcttccccaggtactcctgcactgacaaggctgccacagcggtggaatttgtcctcacgacttcgccacgtcgtcctcacctccctggcttcccacgactccgccgtatcgaggtgctcggtgggtcgtcttaatccgaagtccgaactaggaagacgagacagagaggtctgaggaatgggcctcgtttgatgttgagctgaattatttttccagcataagcccaggtcttggtccatgaacaaaattactagaaacccagcccagtactacgatctaaaagagggactgccactggatagctctctctagcattctccacgctccaatacagcggcgtcgtgtctatccgggtctatccgcgaacacgtgagaactctccagaaactgctttctcctccacttcatctctctcgctttccctctataaaaagaccccttctaggaattgagggagacagcaagcaccaagcagcgatccgaagctcaatcaattcactcaaacctcttccccaaatcttcgattagatcttcgttgacaagaagactagaaccgaacctgacatgtccaacctgctcacggttcaccagaaccttccggctcttccagtggacgcgacgtccgatgaagtcaggaagaacctcatggacatgttccgcgacaggcaagcgttcagcgagcacacctggaagatgctgctctccgtctgccgctcctgggctgcatggtgcaagctgaacaacaggaagtggttccccgctgagcccgaggacgtgagggattaccttctgtacctgcaagcgcgaggtttgtttctgcttctacctttgatatatatataataattatcattaattagtagtaatataatatttcaaatatttttttcaaaataaaagaatgtagtatatagcaattgcttttctgtagtttataagtgtgtatattttaatttataacttttctaatatatgaccaaaacatggtgatgcctaggtctggcagtgaagaccatccagcaacaccttggacaactgaacatgcttcacaggcgctccggcctcccgcgccccagcgactcgaacgccgtgagcctcgtcatgcgccgcatcaggaaggaaaacgtcgatgccggcgaaagggcaaagcaggccctcgcgttcgagaggaccgatttcgaccaggtccgcagcctgatggagaacagcgacaggtgccaggacattaggaacctggcgttcctcggaattgcatacaacacgctcctcaggatcgcggaaattgcccgcattcgcgtgaaggacattagccgcaccgacggcggcaggatgcttatccacattggcaggaccaagacgctcgtttccaccgcaggcgtcgaaaaggccctcagcctcggagtgaccaagctcgtcgaacgctggatctccgtgtccggcgtcgcggacgacccaaacaactacctcttctgccgcgtccgcaagaacggggtggctgcccctagcgccaccagccaactcagcacgagggccttggaaggtattttcgaggccacccaccgcctgatctacggcgcgaaggatgacagcggtcaacgctacctcgcatggtccgggcactccgcccgcgttggagctgctagggacatggcccgcgccggtgtttccatccccgaaatcatgcaggcgggtggatggacgaacgtgaacattgtcatgaactacattcgcaaccttgacagcgagacgggcgcaatggttcgcctcctggaagatggtgactgaggtacccaacctagacttgtccatcttctggattggccaacttaattaatgtatgaaataaaaggatgcacacatagtgacatgctaatcactataatgtgggcatcaaagttgtgtgttatgtgtaattactagttatctgaataaaagagaaagagatcatccatatttcttatcctaaatgaatgtcacgtgtctttataattctttgatgaaccagatgcatttcattaaccaaatccatatacatataaatattaatcatatataattaatatcaattgggttagcaaaacaaatctagtctaggtgtgttttgcgatccgatatcgacgtctaaaaacggcccctaactaacgcttagttgcccgctagattagtcccccgttagtgcctagttagacacacgacgaactaggggctagtgccaccttgctagttggatattacctcttctcttcaaagtatccttgaacgctcaccggttatcaaatctctacactatagctctgtagtcttgctagatagttagttctttagctctcgcacgataacttcgtatagcatacattatacgaagttataacagcggaccgggttaccgaattcctgcccttaaggccaattgttcaagattcattcaacaattgaaacatctcccatgattaaatcagtataaggttgctatggtcttgcttgacaaagtttttttttgagggaatttcaactaaatttttgagtgaaactatcaaatactgattttaaaaaatttttataaaaggaagcgcagagataaaaggccatctatgctacaaaagtacccaaaaatgtaatcctaaagtatgaattgcattttttttttgtttggacgaaaggaaaggagtattaccacaagaatgatatcatcttcatatttagatcttttttgggtaaagcttgagattctctaaatatagagaaatcagaagaaaaaaaaaccgtgttttggtggttttgatttctagcctccacaataactttgacggcgtcgacaagtctaacggacaccaagcagcgaaccaccagcgccgagccaagcgaagcagacggccgagacgttgacaccttcggcgcggcatctctcgagagttccgctccggcgctccacctccaccgctggcggtttcttattccgttccgttccgcctcctgctctgctcctctccacaccacacggcacgaaaccgttacggcaccggcagcacccagcacgggagaggggattcctttcccaccgttccttccctttccgccccgccgctataaatagccagccccatccccagcttttttccccaatctcatctcctctctcctgttgttcggagcacacgcacaatccgatcgatccccaaatccccttcgtctctcctcgcgagcctcgtggatcccagcttcaaggtacggcgatcgatcatcccccctccttctctctaccttcttttctctagactacatcggatggcgatccatggttagggcctgctagtttcccttcctgttttgtcgatggctgcgaggcacaatagatctgatggcgttatgacggctaacttgtcatgttgttgcgatttatagtccctttaggagatcagtttaatttctcggatggttcgagatcggtggtccatggttagtaccctaagatccgcgctgttagggttcgtagatggaggcgacctgttctgattgttaacttgtcagtacctgggaaatcctgggatggttctagctcgtccgcagatgagatcgatttcatgatcctctgtatcttgtttcgttgcctaggttccgtctaatctatccgtggtatgatgtagatgttttgatcgtgctaactacgtcttgtaaagttaattgtcaggtcataatttttagcatgcctttttttttgtttggttttgtctaattgggctgtcgttctagatcagagtagaagactgttccaaactacctgctggatttattgaacttggatctgtatgtgtgtcacatatcttcataaattcatgattaagatggattgaaatatcttttatctttttggtatggatagttctatatgttggtgtggctttgttagatgtatacatgcttagatacatgaagcaacgtgctgctactgtttagtaattgctgttcatttgtctaataaacagataaggatatgtatttatgttgctgttggttttgctggtactttgttggatacaaatgcttcaatacagaaaacagcatgctgctacgatttaccatttatctaatcttatcatatgtctaatctaataaacaaacatgcttttaaattatcttcatatgcttggatgatggcatacacagcggctatgtgtggttttttaaatacccagcatcatgggcatgcatgacactgctttaatatgctttttatttgcttgagactgtttcttttgtttatactgaccctttagttcggtgactcttctgcaggtcgactttaacttagcctaggatccatggcccagtccaagcacggcctgaccaaggagatgaccatgaagtaccgcatggagggctgcgtggacggccacaagttcgtgatcaccggcgagggcatcggctaccccttcaagggcaagcaggccatcaacctgtgcgtggtggagggcggccccttgcccttcgccgaggacatcttgtccgccgccttcatgtacggcaaccgcgtgttcaccgagtacccccaggacatcgtcgactacttcaagaactcctgccccgccggctacacctgggaccgctccttcctgttcgaggacggcgccgtgtgcatctgcaacgccgacatcaccgtgagcgtggaggagaactgcatgtaccacgagtccaagttctacggcgtgaacttccccgccgacggccccgtgatgaagaagatgaccgacaactgggagccctcctgcgagaagatcatccccgtgcccaagcagggcatcttgaagggcgacgtgagcatgtacctgctgctgaaggacggtggccgcttgcgctgccagttcgacaccgtgtacaaggccaagtccgtgccccgcaagatgcccgactggcacttcatccagcacaagctgacccgcgaggaccgcagcgacgccaagaaccagaagtggcacctgaccgagcacgccatcgcctccggctccgccttgccctccggactcagatctcgatagggtaccaatggccagttaacagatccagctgctgctgttctagggttcacaagtctgcctatttgtcttccccaatggagctatggttgtctggtctggtccttggtcgtgtcccgtttcattgtgtactatttacctgtaatgtgtatccttaagtctggtttgatggtgtctgaaacgttttgctgtggtagagcagcatggaagaactataatgaataagtgatccctaatcattgtgtccaaattttgcttctgctatacccttttgtgctgtttcttatgttttgcttaaaaatttgatctgacaaacaaatttgtctaaattatgctcttgttctgactgtgtactgtacacatttgtattgctaccggtttggcacatagttttctctttgattgcagatcaaacccttctgattgcagattgcttggctatggctgatgtgctcactgttcttctttagcttgtatattgctgatggtggcttggctacggctgaaaaagttgctgctgcgccgacttggcaactgttgctccagtaatgctttgtcctctcttcctagccgccgacttggcacttggcagctgttgctcctgtaatgcgttgttatctcttatctcttgagatgtactatgattttgaggctgtttgacttgtgccagattgccagtgctgatgctatattatctcaggtttttatgctagtatatgttttactgtgtgctgcctgtgtcgagttacgtaatctattgaaccgctatgcgtgttgatgccctgttgttgcttgccagattgatgcccctgttgcttgcagcttgcaagctgtagtgaaatcctaaaattcgaaaccaaatctattctgaacttttgaagatctgtgatgtccggaagaaaagattcaaacagataaacgggactctccagaatctataaaataaatgatcgacaaacgctttgctttggtaggcttcctagttagttagcggaccgaagcttcggtccgggcctgcggccgcagatatcagaacctgcgtctggacgcacaagtcatagcattatcggctaaaatttcttaatttctaaattagtcatatcggctaagaaagtggggagcactatcatttcgtagaacaagaacaaggtatcatatatatatatatatataatatttaaactttgttaagtggaatcaaagtgctagtattaatggagtttcatgtgcattaaattttatgtcacatcagcaattttgttgacttggcaaggtcatttagggtgtgtttggaagacaggggctattaggagtattaaacatagtctaattacaaaactaattgcacaaccgctaagctgaatcgcgagatggatctattaagcttaattagtccatgatttgacaatgtggtgctacaataaccatttgctaatgatggattacttaggtttaatagattcgtctcgtgatttagcctatgggttctgctattaattttgtaattagctcatatttagttcttataattagtatccgaacatccaatgtgacatgctaaagtttaaccctggtatccaaatgaagtcttatgagagtttcatcactccggtggtatatgtacttaggctccgttttcttccaccgacttatttttagcacccgtcacattgaatgtttagatactaattagaagtattaaacgtagactatttacaaaatccattacataagacgaatctaaacggcgagacgaatctattaaacctaattagtccatgatttgacaatgtgttgctacagtaaacatttgctaatgatggattaattaggcttaatagattcgtctcgccgtttagcctccacttatgtaatgggttttctaaacaatctacgtttaatactcctaattagtatctaaatattcaatgtgacacgtgctaaaaataagtcagtggaaggaagagaacgtccccttagttttccatcttattaattgtacgatgaaactgtgcagccagatgattgacaatcgcaatacttcaactagtgggccatgcacatcagcgacgtgtaacgtcgtgagttgctgttcccgtagagaaatatcaactggtgggccacgcacatcagcgtcgtgtaacgtggacggaggagccccgtgacggcgtcgacatcgaacggccaccaaccacggaaccacccgtccccacctctcggaagctccgctccacggcgtcgacatctaacggctaccagcaggcgtacgggttggagtggactccttgcctctttgcgctggcggcttccggaaattgcgtggcggagacgaggcgggctcgtctcacacggcacggaagacgtcacgggttccttccccacctctcctcttccccaccgccataaatagccgaccccctcgcctttctccccaatctcatctcgtctcgtgttgttcggagcacaccacccgccccaaatcgttcttcccgcaagcctcggcgatccttcacccgcttcaaggtacggcgatcgtcttcctcctctagatcggcgtgatctgcaagtagttgatttggtagatggttaggatctgtgcactgaagaaatcatgttagatccgcgatgtttctgttcgtagatggctgggaggtggaatttttgtgtagatctgatatgttctcctgtttatcttgtcacgctcctgcgatttgtggggattttaggtcgttgatctgggaatcgtggggttgcttctaggctgttcgtagatgaggtcgttctcacggtttactggatcattgcctagtagatcagctcgggctttcgtctttgtatatggtgcccatacttgcatctatgatctggttccgtggtgttacctaggtttctgcgcctgattcgtccgatcgattttgttagcatgtggtaaacgtttggtcatggtctgatttagattagagtcgaataggatgatctcgatctagctcttgggattaatatgcatgtgtcaccaatctgttccgtggttaagatgatgaatctatgcttagttaatgggtgtagatatatatgctgctgttcctcaatgatgccgtagcttttacctgagcagcatggatcgtcctgttacttaggtagatgcacatgcttatagatcaagatatgtactgctactgttggaattctttagtatacctgatgatcatccatgctcttgttacttgttttggtatacttggatgatggcatgctgctgctttttgttgatttgagcccatccatatctgcatatgtcacatgattaagatgattacgctgtttctgtatgatgccatagcttttatgtgagcaacatgcatcctcctggttatatgcattaatagatggaagatatctattgctacaatttgatgattattttgtacatacgatgatcaagcatgctcttcatactttgttgatatacttggataatgaaatgctgctgcacgttcattctatagcactaatgatgtgatgaacacgcacgacctgtttgtggcatctgtttgaatgtgttgttgctgttcactagagactgttttattaacctactgctagatacttacccttctgtctgtttattcttttgcagccagaatagcggatccgcccatggtcgaacaggacggcctgcatgcaggatcaccagcggcctgggtcgaaagactcttcggctacgactgggcacaacagaccatcgggtgtagcgacgcagctgttttcaggctgtccgcacagggcagacccgttttgttcgtcaaaacagacctgtctggcgcgctcaacgaactgcaagacgaggccgcaagactgagctggcttgctaccacaggcgttccttgtgctgcagtcctcgacgtcgttactgaggctggaagagactggctgctcctgggtgaagtcccaggacaggaccttttgtccagccatctggcacctgccgaaaaggtcagcatcatggcagacgccatgagaaggctgcacacactcgaccctgcaacatgccccttcgatcaccaggcaaaacacaggatcgagcgcgcaagaacgcgcatggaggctggtttggtcgaccaagatgacctcgacgaggaacaccaaggactggctcctgctgaactcttcgccagactcaaggcgagaatgccagacggtgacgacctggtcgtcacacacggcgacgcttgtctcccaaacataatggtcgagaacggacgcttcagcggtttcatcgactgcggtagactcggagtcgctgacagataccaggacatcgccctggcaacacgcgacatcgcagaggaactcggaggcgaatgggctgacaggtttctcgtgctctacggtatcgctgctccagacagccagaggatcgcattctacaggctcctcgacgagttcttttagttcgaacggtacccggggatcctctagtgccgtgggtcgtttaagctgccgctgtacctgtgtcgtctggtgccttctggtgtacctgggaggttgtcgtctatcaagtatctgtggttggtgtcatgagtcagtgagtcccaatactgttcgtgtcctgtgtgcattatacccaaaactgttatgggcaaatcatgaataagcttgatgttcgaacttaaaagtctctgctcaatatggtattatggttgtttttgttcgtctcctaatatttgcctgggatcaaattttattggctggtgttcatttgacctccatgttcttgctaggctccattttttactctacagccataatatgtttgattgtttggtttgttctttgttgtacacctggttctgtcgagcttagttttcgacactggcttacagcttaacatgttgctattttattgggttctgattgctattttattgggttctgattgctagtttttgctgaatccaaaaaccatgttatttatttaagcgatccaggttattattatgatggtggctaagtttttttttttccaagggtaaattttctggattctccagtgtttctgtggccgaattcaatcactagagtcgacctgcatgattccgatgacttcgtaggttcctagctcaagccgctcgtgtccaagcgtcacttacgattagctaatgattacggcatctaggaccgactagctagctagctaagagctcggtaccgagctcgaattcattccgattaatcgtggcctcttgctcttcaggatgaagagctatgtttaaacgtgcaagcgctactagacaattcagtacattaaaaacgtccgcaatgtgttattaagttgtctaagcgtcaatttgtttacaccacaatatatcctgcca

SEQ ID NO: 78 - DNA, 20983 bp, synthetic construct
  misc_feature 1..20983: note = PHP97335
  source 1..20983: mol_type = other DNA
gtttacccgccaatatatcctgtcaaacactgcggccgcacttgaccgcggatggagccggagctgtggtgaggccatcgacgggaggtgggggagaacacagtctcagtgttctttgtgagtccgcaaggtttttagcttttctgtattaattaaggttgctgttggctgtagaatacggtcgtggaagagctgtatcggtagctactacgtaagctattatatactggaagtctggagctcgtcgatctccggtcgtcttcctccatttctcctcgtcttgctttgactgctgctaccatttgcttctgttttctgatgaagcatgccatgtcggccaccagtgtttgtgtggtttttgcagggaatggctttcaagtgctgtgattgaatggccctcgtcgtcctcggctgagctcacatggacgcgtcatgtgagtgagatatatgatcatatgatgagtggggttcgggtgagtgcgtacttgaagtaggatcccgctttcactcattcattcattggcctttaaaccgggaaattttcgcgaggagatggagggaagcaagcagggtgacgagtgcagagtgccgcgagcgctttgtcaaaaggcaccgccgtaggcaaaaaaatcaatggccctgactgactcgatggtagtactactgtagagactagagagggttgctccccatatcttcgtgtgacttttactccagcattgcatttccgtcattgagacgttaattaatagcagctttcgggacagatgactgtggccatgtttcgtcacggccgcttcgtgccagctgggggtactatagtactgtgattttgttagtaaaaactttcattaggccaccattgacgaccgggccttcgcttttgctgcgctaattaaccatttcccggcgaccgaagggaacatgaacatgccccgacacatgagggcatgaggactagtgttctccctgtcgttcgttgacttgactagtgatagtttaaacgctcttcaactggaagagcggttactaccggttcactagctagctgctaatcgagctagttaccctatgaggtgacatgaagcgctcacggttactatgacggttagcttcacgactgttggtggcagtagcgtacgacttagctatagttccggacttacctagctaataacttcgtatagcatacattatacgaagttatggttaccgcggccgcagatatcagaacctgcgtctggacgcacaagtcatagcattatcggctaaaatttcttaatttctaaattagtcatatcggctaagaaagtggggagcactatcatttcgtagaacaagaacaaggtatcatatatatatatatatataatatttaaactttgttaagtggaatcaaagtgctagtattaatggagtttcatgtgcattaaattttatgtcacatcagcaattttgttgacttggcaaggtcatttagggtgtgtttggaagacaggggctattaggagtattaaacatagtctaattacaaaactaattgcacaaccgctaagctgaatcgcgagatggatctattaagcttaattagtccatgatttgacaatgtggtgctacaataaccatttgctaatgatggattacttaggtttaatagattcgtctcgtgatttagcctatgggttctgctattaattttgtaattagctcatatttagttcttataattagtatccgaacatccaatgtgacatgctaaagtttaaccctggtatccaaatgaagtcttatgagagtttcatcactccggtggtatatgtacttaggctccgttttcttccaccgacttatttttagcacccgtcacattgaatgtttagatactaattagaagtattaaacgtagactatttacaaaatccattacataagacgaatctaaacggcgagacgaatctattaaacctaattagtccatgatttgacaatgtgttgctacagtaaacatttgctaatgatggattaattaggcttaatagattcgtctcgccgtttagcctccacttatgtaatgggttttctaaacaatctacgtttaatactcctaattagtatctaaatattcaatgtgacacgtgctaaaaataagtcagtggaaggaagagaacgtccccttagttttccatcttattaattgtacgatgaaactgtgcagccagatgattgacaatcgcaatacttcaactagtgggccatgcacatcagcgacgtgtaacgtcgtgagttgctgttcccgtagagaaatatcaactggtgggccacgcacatcagcgtcgtgtaacgtggacggaggagccccgtgacggcgtcgacatcgaacggccaccaaccacggaaccacccgtccccacctctcggaagctccgctccacggcgtcgacatctaacggctaccagcaggcgtacgggttggagtggactccttgcctctttgcgctggcggcttccggaaattgcgtggcggagacgaggcgggctcgtctcacacggcacggaagacgtcacgggttccttccccacctctcctcttccccaccgccataaatagccgaccccctcgcctttctccccaatctcatctcgtctcgtgttgttcggagcacaccacccgccccaaatcgttcttcccgcaagcctcggcgatccttcacccgcttcaaggtacggcgatcgtcttcctcctctagatcggcgtgatctgcaagtagttgatttggtagatggttaggatctgtgcactgaagaaatcatgttagatccgcgatgtttctgttcgtagatggctgggaggtggaatttttgtgtagatctgatatgttctcctgtttatcttgtcacgctcctgcgatttgtggggattttaggtcgttgatctgggaatcgtggggttgcttctaggctgttcgtagatgaggtcgttctcacggtttactggatcattgcctagtagatcagctcgggctttcgtctttgtatatggtgcccatacttgcatctatgatctggttccgtggtgttacctaggtttctgcgcctgattcgtccgatcgattttgttagcatgtggtaaacgtttggtcatggtctgatttagattagagtcgaataggatgatctcgatctagctcttgggattaatatgcatgtgtcaccaatctgttccgtggttaagatgatgaatctatgcttagttaatgggtgtagatatatatgctgctgttcctcaatgatgccgtagcttttacctgagcagcatggatcgtcctgttacttaggtagatgcacatgcttatagatcaagatatgtactgctactgttggaattctttagtatacctgatgatcatccatgctcttgttacttgttttggtatacttggatgatggcatgctgctgctttttgttgatttgagcccatccatatctgcatatgtcacatgattaagatgattacgctgtttctgtatgatgccatagcttttatgtgagcaacatgcatcctcctggttatatgcattaatagatggaagatatctattgctacaatttgatgattattttgtacatacgatgatcaagcatgctcttcatactttgttgatatacttggataatgaaatgctgctgcacgttcattctatagcactaatgatgtgatgaacacgcacgacctgtttgtggcatctgtttgaatgtgttgttgctgttcactagagactgttttattaacctactgctagatacttacccttctgtctgtttattcttttgcagccagaatagcggatccgcccatggtcgaacaggacggcctgcatgcaggatcaccagcggcctgggtcgaaagactcttcggctacgactgggcacaacagaccatcgggtgtagcgacgcagctgttttcaggctgtccgcacagggcagacccgttttgttcgtcaaaacagacctgtctggcgcgctcaacgaactgcaagacgaggccgcaagactgagctggcttgctaccacaggcgttccttgtgctgcagtcctcgacgtcgttactgaggctggaagagactggctgctcctgggtgaagtcccaggacaggaccttttgtccagccatctggcacctgccgaaaaggtcagcatcatggcagacgccatgagaaggctgcacacactcgaccctgcaacatgccccttcgatcaccaggcaaaacacaggatcgagcgcgcaagaacgcgcatggaggctggtttggtcgaccaagatgacctcgacgaggaacaccaaggactggctcctgctgaactcttcgccagactcaaggcgagaatgccagacggtgacgacctggtcgtcacacacggcgacgcttgtctcccaaacataatggtcgagaacggacgcttcagcggtttcatcgactgcggtagactcggagtcgctgacagataccaggacatcgccctggcaacacgcgacatcgcagaggaactcggaggcgaatgggctgacaggtttctcgtgctctacggtatcgctgctccagacagccagaggatcgcattctacaggctcctcgacgagttcttttagttcgaacggtacccggggatcctctagtgccgtgggtcgtttaagctgccgctgtacctgtgtcgtctggtgccttctggtgtacctgggaggttgtcgtctatcaagtatctgtggttggtgtcatgagtcagtgagtcccaatactgttcgtgtcctgtgtgcattatacccaaaactgttatgggcaaatcatgaataagcttgatgttcgaacttaaaagtctctgctcaatatggtattatggttgtttttgttcgtctcctaatatttgcctgggatcaaattttattggctggtgttcatttgacctccatgttcttgctaggctccattttttactctacagccataatatgtttgattgtttggtttgttctttgttgtacacctggttctgtcgagcttagttttcgacactggcttacagcttaacatgttgctattttattgggttctgattgctattttattgggttctgattgctagtttttgctgaatccaaaaaccatgttatttatttaagcgatccaggttattattatgatggtggctaagtttttttttttccaagggtaaattttctggattctccagtgtttctgtggccgaattcaatcactagagtcgacctgcaggcatagttaccaagcggccgcacactgatagtttaaactgaaggcgggaaacgacaatctgatcatgagcggagaattaagggagtcacgttatgacccccgccgatgacgcgggacaagccgttttacgtttggaactgacagaaccgcaacgattgaaggagccactcagccgcgggtttctggagtttaatgagctaagcacatacgtcagaaaccattattgcgcgttcaaaagtcgcctaaggtcactatcagctagcaaatatttcttgtcaaaaatgctccactgacgttccataaattcccctcggtatccaattagagtctcatattcactcccatggcggccaatgcgggcggcggtggagcgggaggaggcagcggcagcggcagcgtggctgcgccggcggtgtgccgccccagcggctcgcggtggacgccgacgccggagcagatcaggatgctgaaggagctctactacggctgcggcatccggtcgcccagctcggagcagatccagcgcatcaccgccatgctgcggcagcacggcaagatcgagggcaagaacgtcttctactggttccagaaccacaaggcccgcgagcgccagaagcgccgcctcaccagcctcgacgtcaacgtgcccgccgccggcgcggccgacgccaccaccagccaactcggcgtcctctcgctgtcgtcgccgccgccttcaggcgcggcgcctccctcgcccaccctcggcttctacgccgccggcaatggcggcggatcggctgtgctgctggacacgagttccgactggggcagcagcggcgctgctatggccaccgagacatgcttcctgcaggactacatgggcgtgacggacacgggcagctcgtcgcagtggccacgcttctcgtcgtcggacacgataatggcggcggccgcggcgcgggcggcgacgacgcgggcgcccgagacgctccctctcttcccgacctgcggcgacgacggcggcagcggtagcagcagctacttgccgttctggggtgccgcgtccacaactgccggcgccacttcttccgttgcgatccaacagcaacaccagctgcaggagcagtacagcttttacagcaacagcaacagcacccagctggccggcaccggcaaccaagacgtatcggcaacagcagcagcagccgccgccctggagctgagcctcagctcatggtgctccccttaccctgctgcagggagtatgtgagagcaacgcgagctgccactgctcttcactgatgtctctggaatggaaggaggaggaagtgagaacagatcattcgacaaagcagcattagtccgttgatcggtggaagaccactcgtcagtgttgagttgaatgtttgatcaataaaatacggcaatgctgtaagggttgttttttatgccattgataatacactgtactgttcagttgttgaactctatttcttagccatgccaagtgcttttcttattttgaataacattacagcaaaaagttgaaagacaaaaaaaaaaacccccgaacagagtgctttgggtcccaagcttctttagactgtgttcggcgttccccctaaatttctccccctatatctcactcacttgtcacatcagcgttctctttccccctatatctccacgctctacagcagttccacctatatcaaacctctataccccaccacaacaatattatatactttcatcttcaactaactcatgtaccttccaatttttttctactaataattatttacgtgcacagaaacttagcaaggagagagagagcgggaatttaaatgctcggcgttaggcttttagtccgctaggtggctagaccgaggttaggacgctagttcactaggggcctagtggtgttttaagacgtcacggtcactacgaatcgaccgaagcttgcatgggccgcatcgagcagctggcttgtggggaccagacaaaaaaggaatggtgcagaattgttaggcgcacctaccaaaagcatctttgcctttattgcaaagataaagcagattcctctagtacaagtggggaacaaaataacgtggaaaagagctgtcctgacagcccactcactaatgcgtatgacgaacgcagtgacgaccacaaaactcgagcaacgagatcatgagccaatcaaagaggagtgatgtagacctaaagcaataatggagccatgacgtaagggcttacgcccatacgaaataattaaaggctgatgtgacctgtcggtctctcagaacctttactttttatgtttggcgtgtatttttaaatttccacggcaatgacgatgtgaccgtcgacccactaaaacattgctttgtcaaaagctaaaaaagatgatgcccgacagccacttgtgtgaagcatgagaagccggtccctccactaagaaaattagtgaagcatcttccagtggtccctccactcacagctcaatcagtgagcaacaggacgaaggaaatgacgtaagccatgacgtctaatcccagggccagcttgcatgcctgcagtgcagcgtgacccggtcgtgcccctctctagagataatgagcattgcatgtctaagttataaaaaattaccacatattttttttgtcacacttgtttgaagtgcagtttatctatctttatacatatatttaaactttactctacgaataatataatctatagtactacaataatatcagtgttttagagaatcatataaatgaacagttagacatggtctaaaggacaattgagtattttgacaacaggactctacagttttatctttttagtgtgcatgtgttctcctttttttttgcaaatagcttcacctatataatacttcatccattttattagtacatccatttagggtttagggttaatggtttttatagactaatttttttagtacatctattttattctattttagcctctaaattaagaaaactaaaactctattttagtttttttatttaataatttagatataaaatagaataaaataaagtgactaaaaattaaacaaataccctttaagaaattaaaaaaactaaggaaacatttttcttgtttcgagtagataatgccagcctgttaaacgccgtcgacgagtctaacggacaccaaccagcgaaccagcagcgtcgcgtcgggccaagcgaagcagacggcacggcatctctgtcgctgcctctggacccctctcgagagttccgctccaccgttggacttgctccgctgtcggcatccagaaattgcgtggcggagcggcagacgtgagccggcacggcaggcggcctcctcctcctctcacggcaccggcagctacgggggattcctttcccaccgctccttcgctttcccttcctcgcccgccgtaataaatagacaccccctccacaccctctttccccaacctcgtgttgttcggagcgcacacacacacaaccagatctcccccaaatccacccgtcggcacctccgcttcaaggtacgccgctcgtcctcccccccccccctctctaccttctctagatcggcgttccggtccatgcatggttagggcccggtagttctacttctgttcatgtttgtgttagatccgtgtttgtgttagatccgtgctgctagcgttcgtacacggatgcgacctgtacgtcagacacgttctgattgctaacttgccagtgtttctctttggggaatcctgggatggctctagccgttccgcagacgggatcgatttcatgattttttttgtttcgttgcatagggtttggtttgcccttttcctttatttcaatatatgccgtgcacttgtttgtcgggtcatcttttcatgcttttttttgtcttggttgtgatgatgtggtctggttgggcggtcgttctagatcggagtagaattctgtttcaaactacctggtggatttattaattttggatctgtatgtgtgtgccatacatattcatagttacgaattgaagatgatggatggaaatatcgatctaggataggtatacatgttgatgcgggttttactgatgcatatacagagatgctttttgttcgcttggttgtgatgatgtggtgtggttgggcggtcgttcattcgttctagatcggagtagaatactgtttcaaactacctggtgtatttattaattttggaactgtatgtgtgtgtcatacatcttcatagttacgagtttaagatggatggaaatatcgatctaggataggtatacatgttgatgtgggttttactgatgcatatacatgatggcatatgcagcatctattcatatgctctaaccttgagtacctatctattataataaacaagtatgttttataattattttgatcttgatatacttggatgatggcatatgcagcagctatatgtggatttttttagccctgccttcatacgctatttatttgcttggtactgtttcttttgtcgatgctcaccctgttgtttggtgttacttctgcaggtcgactttaacttagcctaggatccatggccactgtgaacaactggctcgctttctccctctccccgcaggagctgccgccctcccagacgacggactccacactcatctcggccgccaccgccgaccatgtctccggcgatgtctgcttcaacatcccccaagattggagcatgaggggatcagagctttcggcgctcgtcgcggagccgaagctggaggacttcctcggcggcatctccttctccgagcagcatcacaaggccaactgcaacatgatacccagcactagcagcacagtttgctacgcgagctcaggtgctagcaccggctaccatcaccagctgtaccaccagcccaccagctcagcgctccacttcgcggactccgtaatggtggcttcctcggccggtgtccacgacggcggtgccatgctcagcgcggccgccgctaacggtgtcgctggcgctgccagtgccaacggcggcggcatcgggctgtccatgattaagaactggctgcggagccaaccggcgcccatgcagccgagggtggcggcggctgagggcgcgcaggggctctctttgtccatgaacatggcggggacgacccaaggcgctgctggcatgccacttctcgctggagagcgcgcacgggcgcccgagagtgtatcgacgtcagcacagggtggagccgtcgtcgtcacggcgccgaaggaggatagcggtggcagcggtgttgccggcgctctagtagccgtgagcacggacacgggtggcagcggcggcgcgtcggctgacaacacggcaaggaagacggtggacacgttcgggcagcgcacgtcgatttaccgtggcgtgacaaggcatagatggactgggagatatgaggcacatctttgggataacagttgcagaagggaagggcaaactcgtaagggtcgtcaagtctatttaggtggctatgataaagaggagaaagctgctagggcttatgatcttgctgctctgaagtactggggtgccacaacaacaacaaattttccagtgagtaactacgaaaaggagctcgaggacatgaagcacatgacaaggcaggagtttgtagcgtctctgagaaggaagagcagtggtttctccagaggtgcatccatttacaggggagtgactaggcatcaccaacatggaagatggcaagcacggattggacgagttgcagggaacaaggatctttacttgggcaccttcagcacccaggaggaggcagcggaggcgtacgacatcgcggcgatcaagttccgcggcctcaacgccgtcaccaacttcgacatgagccgctacgacgtgaagagcatcctggacagcagcgccctccccatcggcagcgccgccaagcgcctcaaggaggccgaggccgcagcgtccgcgcagcaccaccacgccggcgtggtgagctacgacgtcggccgcatcgcctcgcagctcggcgacggcggagccctggcggcggcgtacggcgcgcactaccacggcgccgcctggccgaccatcgcgttccagccgggcgccgccagcacaggcctgtaccacccgtacgcgcagcagccaatgcgcggcggcgggtggtgcaagcaggagcaggaccacgcggtgatcgcggccgcgcacagcctgcaggacctccaccacctgaacctgggcgcggccggcgcgcacgactttttctcggcagggcagcaggccgccgccgctgcgatgcacggcctgggtagcatcgacagtgcgtcgctcgagcacagcaccggctccaactccgtcgtctacaacggcggggtcggcgacagcaacggcgccagcgccgtcggcggcagtggcggtggctacatgatgccgatgagcgctgccggagcaaccactacatcggcaatggtgagccacgagcaggtgcatgcacgggcctacgacgaagccaagcaggctgctcagatggggtacgagagctacctggtgaacgcggagaacaatggtggcggaaggatgtctgcatgggggactgtcgtgtctgcagccgcggcggcagcagcaagcagcaacgacaacatggccgccgacgtcgggcatggcggcgcgcagctcttcagtgtctggaacgacacttaagcgtacctagtggtacctgacatcttatagtctgcaacctctcgtgtctgaattcctatctttatcaagtgttattgcttccacgactataggacagctttcgtcgaaagcttttgctcatgtgatctcgaaggattcatctagtctgatttttcgtgacttgtatcggttttattggattcatccaacatatatcaataaaaaatgagttgtgtttcctttcttcctagttcagttaaaattatttccctcctgcgcttgtgctgtaattgtctgtgtacctgttgtttgtgactgtgttagttcccttggatatgatttcgtatttgatatgtacatggagatagcttagcttcattattggagtatgaagttagtatgacatagtcactctcctggaaaattgacactgcaaaccatatttttattctgaaccacaaatcctagtcagtccgctggcatatgccgtccgtttgctgaatccagaacgtgggtttggagatgtacggctgagatgcctctatgcgaaggggatttcgtggtgaaacgagatgggagtagagcaacgcccgtggaagatgcttcaaacttccacacttttgagcaacgatcggcagtagtaaggtagacgatttcaagatcaaagcatatgaagataaacaacatcaacaacaaaatttgttggggttctatagagagaaacagagctacatacatacactgttttgtatctaccatctgagatgatgaaaagatgaaaaactaaagaatgccccggcgccaacgccaggacacgccgcgcgcgcgtcacccgagccatctcttgacccagccggcgctgtatatttacacacgttgcagcatcgatcaccacctgttcgatcgcgtcgccgtcaccggcgcgccgcgacttattgaactagtctagggcgcggctaacaacctagcttagattgccttgtctaaacccttaggctaacgcgccactctagaaggccgatctcccccgaacgcgccagatccgatatcgatgggccctggccgaagcttggtcacccgcaccttgctagttggatattacctcttctcttcaaagtatccttgaacgctcaccggttatcaaatctctacactatagctctgtagtcttgctagatagttagttctttagctctctctagaggttcacaaactcaatacaacacacagtggagtagggtattacgctccggcggcccgaaccactctaaatccttgtgtcctcgtgtgctcttccaccattaatgactgtaattgcagggacacgaagagttgtagcgcttttgccaacaagatccgctatatgctagtagagtggaacctgcacagcaacaagcatccaataatctgagaataagaattatgtgtggtgatggttctcatctctgcaactcgccattttcgcgagagaaccaaatccaagttggtgaagatcatgatttgggctcatgggctggcatagtagctattacctttgcaattgtggttcgaatctatccgatattctccttttcagggagagctaatgcttatgcttattgggtattttggtttgacactgcttcacgcccaaaaaaaggcaactatgtctgagttggatatggcccaaaaaaaggcagctatgtctgagttggatatggaagtcttctttcgtttagggtgaagtaagaccaagctcatgagcttattatcttaggtcggaacaaattagttgataggcatggcacatttatcaaattataatgattttaacagaaaagcaacacctctttttcagcagcaccagctttgcaagctgcaattgacactccaagcatagtatttgctccaaactcagcctgcatttcgcacaatatcatatctatttccatttggataaaatatattttccagaaatatgggaacagaatcaagatacagaaaaaagttgtggtagtagtggtaagtggaaacacaagtacagtgaaaagatagcattatttctgaacagtcaaattaaccgaaataagtagtatcacatactgcccctaaattgactacacccaatgtaaagaattgcttgagcatattgagccatcagttgtttgtttgtgtaacggatttgacaatgcagagttcaggagcaaaaaaccgcaaaggagagaaagagggaaaggatctcctagtatcccaccttgtggcgcgccctgtcaagtgcatgatggcctggtcgatctgcgtctgctgctgcggttccatcccaacgagtgcctccgacaccttgtcgttgatcacccgcaccgcgtaggcgacccccctggcgaggaacttccgcctctcggaggccccggccgcgtcggcggcggcgccctcgagcgcgcccacgctagccgtagatgctcggtgcacggccttgttggtgtgcaactcgacctcaacggccggtgcgctacgcccgtcaaggatctggcgcgcccgcaccctcgtgatcacggtgggcgcctcccgcctcatgtggccgacgatgaaaagcgccgggttaggggccttggcgcgcaccgccgtattcagggcctcctcgctcttgcgcgagagcaggtgcttccccaggtactcctgcactgacaaggctgccacagcggtggaatttgtcctcacgacttcgccacgtcgtcctcacctccctggcttcccacgactccgccgtatcgaggtgctcggtgggtcgtcttaatccgaagtccgaactaggaagacgagacagagaggtctgaggaatgggcctcgtttgatgttgagctgaattatttttccagcataagcccaggtcttggtccatgaacaaaattactagaaacccagcccagtactacgatctaaaagagggactgccactggatagctctctctagcattctccacgctccaatacagcggcgtcgtgtctatccgggtctatccgcgaacacgtgagaactctccagaaactgctttctcctccacttcatctctctcgctttccctctataaaaagaccccttctaggaattgagggagacagcaagcaccaagcagcgatccgaagctcaatcaattcactcaaacctcttccccaaatcttcgattagatcttcgttgacaagaagactagaaccgaacctgacatgtccaacctgctcacggttcaccagaaccttccggctcttccagtggacgcgacgtccgatgaagtcaggaagaacctcatggacatgttccgcgacaggcaagcgttcagcgagcacacctggaagatgctgctctccgtctgccgctcctgggctgcatggtgcaagctgaacaacaggaagtggttccccgctgagcccgaggacgtgagggattaccttctgtacctgcaagcgcgaggtttgtttctgcttctacctttgatatatatataataattatcattaattagtagtaatataatatttcaaatatttttttcaaaataaaagaatgtagtatatagcaattgcttttctgtagtttataagtgtgtatattttaatttataacttttctaatatatgaccaaaacatggtgatgcctaggtctggcagtgaagaccatccagcaacaccttggacaactgaacatgcttcacaggcgctccggcctcccgcgccccagcgactcgaacgccgtgagcctcgtcatgcgccgcatcaggaaggaaaacgtcgatgccggcgaaagggcaaagcaggccctcgcgttcgagaggaccgatttcgaccaggtccgcagcctgatggagaacagcgacaggtgccaggacattaggaacctggcgttcctcggaattgcatacaacacgctcctcaggatcgcggaaattgcccgcattcgcgtgaaggacattagccgcaccgacggcggcaggatgcttatccacattggcaggaccaagacgctcgtttccaccgcaggcgtcgaaaaggccctcagcctcggagtgaccaagctcgtcgaacgctggatctccgtgtccggcgtcgcggacgacccaaacaactacctcttctgccgcgtccgcaagaacggggtggctgcccctagcgccaccagccaactcagcacgagggccttggaaggtattttcgaggccacccaccgcctgatctacggcgcgaaggatgacagcggtcaacgctacctcgcatggtccgggcactccgcccgcgttggagctgctagggacatggcccgcgccggtgtttccatccccgaaatcatgcaggcgggtggatggacgaacgtgaacattgtcatgaactacattcgcaaccttgacagcgagacgggcgcaatggttcgcctcctggaagatggtgactgaggtacccaacctagacttgtccatcttctggattggccaacttaattaatgtatgaaataaaaggatgcacacatagtgacatgctaatcactataatgtgggcatcaaagttgtgtgttatgtgtaattactagttatctgaataaaagagaaagagatcatccatatttcttatcctaaatgaatgtcacgtgtctttataattctttgatgaaccagatgcatttcattaaccaaatccatatacatataaatattaatcatatataattaatatcaattgggttagcaaaacaaatctagtctaggtgtgttttgcgatccgatatcgacgtctaaaaacggcccctaactaacgcttagttgcccgctagattagtcccccgttagtgcctagttagacacacgacgaactaggggctagtgccaccttgctagttggatattacctcttctcttcaaagtatccttgaacgctcaccggttatcaaatctctacactatagctctgtagtcttgctagatagttagttctttagctctcgcacgataacttcgtatagcatacattatacgaagttataacagcggaccgggttaccgaattcctgcccttaaggccaattgttcaagattcattcaacaattgaaacatctcccatgattaaatcagtataaggttgctatggtcttgcttgacaaagtttttttttgagggaatttcaactaaatttttgagtgaaactatcaaatactgattttaaaaaatttttataaaaggaagcgcagagataaaaggccatctatgctacaaaagtacccaaaaatgtaatcctaaagtatgaattgcattttttttttgtttggacgaaaggaaaggagtattaccacaagaatgatatcatcttcatatttagatcttttttgggtaaagcttgagattctctaaatatagagaaatcagaagaaaaaaaaaccgtgttttggtggttttgatttctagcctccacaataactttgacggcgtcgacaagtctaacggacaccaagcagcgaaccaccagcgccgagccaagcgaagcagacggccgagacgttgacaccttcggcgcggcatctctcgagagttccgctccggcgctccacctccaccgctggcggtttcttattccgttccgttccgcctcctgctctgctcctctccacaccacacggcacgaaaccgttacggcaccggcagcacccagcacgggagaggggattcctttcccaccgttccttccctttccgccccgccgctataaatagccagccccatccccagcttttttccccaatctcatctcctctctcctgttgttcggagcacacgcacaatccgatcgatccccaaatccccttcgtctctcctcgcgagcctcgtggatcccagcttcaaggtacggcgatcgatcatcccccctccttctctctaccttcttttctctagactacatcggatggcgatccatggttagggcctgctagtttcccttcctgttttgtcgatggctgcgaggcacaatagatctgatggcgttatgacggctaacttgtcatgttgttgcgatttatagtccctttaggagatcagtttaatttctcggatggttcgagatcggtggtccatggttagtaccctaagatccgcgctgttagggttcgtagatggaggcgacctgttctgattgttaacttgtcagtacctgggaaatcctgggatggttctagctcgtccgcagatgagatcgatttcatgatcctctgtatcttgtttcgttgcctaggttccgtctaatctatccgtggtatgatgtagatgttttgatcgtgctaactacgtcttgtaaagttaattgtcaggtcataatttttagcatgcctttttttttgtttggttttgtctaattgggctgtcgttctagatcagagtagaagactgttccaaactacctgctggatttattgaacttggatctgtatgtgtgtcacatatcttcataaattcatgattaagatggattgaaatatcttttatctttttggtatggatagttctatatgttggtgtggctttgttagatgtatacatgcttagatacatgaagcaacgtgctgctactgtttagtaattgctgttcatttgtctaataaacagataaggatatgtatttatgttgctgttggttttgctggtactttgttggatacaaatgcttcaatacagaaaacagcatgctgctacgatttaccatttatctaatcttatcatatgtctaatctaataaacaaacatgcttttaaattatcttcatatgcttggatgatggcatacacagcggctatgtgtggttttttaaatacccagcatcatgggcatgcatgacactgctttaatatgctttttatttgcttgagactgtttcttttgtttatactgaccctttagttcggtgactcttctgcaggtcgactttaacttagcctaggatccatggcccagtccaagcacggcctgaccaaggagatgaccatgaagtaccgcatggagggctgcgtggacggccacaagttcgtgatcaccggcgagggcatcggctaccccttcaagggcaagcaggccatcaacctgtgcgtggtggagggcggccccttgcccttcgccgaggacatcttgtccgccgccttcatgtacggcaaccgcgtgttcaccgagtacccccaggacatcgtcgactacttcaagaactcctgccccgccggctacacctgggaccgctccttcctgttcgaggacggcgccgtgtgcatctgcaacgccgacatcaccgtgagcgtggaggagaactgcatgtaccacgagtccaagttctacggcgtgaacttccccgccgacggccccgtgatgaagaagatgaccgacaactgggagccctcctgcgagaagatcatccccgtgcccaagcagggcatcttgaagggcgacgtgagcatgtacctgctgctgaaggacggtggccgcttgcgctgccagttcgacaccgtgtacaaggccaagtccgtgccccgcaagatgcccgactggcacttcatccagcacaagctgacccgcgaggaccgcagcgacgccaagaaccagaagtggcacctgaccgagcacgccatcgcctccggctccgccttgccctccggactcagatctcgatagggtaccaatggccagttaacagatccagctgctgctgttctagggttcacaagtctgcctatttgtcttccccaatggagctatggttgtctggtctggtccttggtcgtgtcccgtttcattgtgtactatttacctgtaatgtgtatccttaagtctggtttgatggtgtctgaaacgttttgctgtggtagagcagcatggaagaactataatgaataagtgatccctaatcattgtgtccaaattttgcttctgctatacccttttgtgctgtttcttatgttttgcttaaaaatttgatctgacaaacaaatttgtctaaattatgctcttgttctgactgtgtactgtacacatttgtattgctaccggtttggcacatagttttctctttgattgcagatcaaacccttctgattgcagattgcttggctatggctgatgtgctcactgttcttctttagcttgtatattgctgatggtggcttggctacggctgaaaaagttgctgctgcgccgacttggcaactgttgctccagtaatgctttgtcctctcttcctagccgccgacttggcacttggcagctgttgctcctgtaatgcgttgttatctcttatctcttgagatgtactatgattttgaggctgtttgacttgtgccagattgccagtgctgatgctatattatctcaggtttttatgctagtatatgttttactgtgtgctgcctgtgtcgagttacgtaatctattgaaccgctatgcgtgttgatgccctgttgttgcttgccagattgatgcccctgttgcttgcagcttgcaagctgtagtgaaatcctaaaattcgaaaccaaatctattctgaacttttgaagatctgtgatgtccggaagaaaagattcaaacagataaacgggactctccagaatctataaaataaatgatcgacaaacgctttgctttggtaggcttcctagttagttagcggaccgaagcttcggttgtttctgtggccgaattcaatcactagagtcgacctgcatgattccgatgacttcgtaggttcctagctcaagccgctcgtgtccaagcgtcacttacgattagctaatgattacggcatctaggaccgactagctagctagctaagagctcggtaccgagctcgaattcattccgattaatcgtggcctcttgctcttcaggatgaagagctatgtttaaacgtgcaagcgctactagacaattcagtacattaaaaacgtccgcaatgtgttattaagttgtctaagcgtcaatttgtttacaccacaatatatcctgcca

SEQ ID NO: 79 - DNA, 21848 bp, synthetic construct
  misc_feature 1..21848: note = PHP97417
  source 1..21848: mol_type = other DNA
gtttacccgccaatatatcctgtcaaacactgcggccgcacttgaccgcggatggagccggagctgtggtgaggccatcgacgggaggtgggggagaacacagtctcagtgttctttgtgagtccgcaaggtttttagcttttctgtattaattaaggttgctgttggctgtagaatacggtcgtggaagagctgtatcggtagctactacgtaagctattatatactggaagtctggagctcgtcgatctccggtcgtcttcctccatttctcctcgtcttgctttgactgctgctaccatttgcttctgttttctgatgaagcatgccatgtcggccaccagtgtttgtgtggtttttgcagggaatggctttcaagtgctgtgattgaatggccctcgtcgtcctcggctgagctcacatggacgcgtcatgtgagtgagatatatgatcatatgatgagtggggttcgggtgagtgcgtacttgaagtaggatcccgctttcactcattcattcattggcctttaaaccgggaaattttcgcgaggagatggagggaagcaagcagggtgacgagtgcagagtgccgcgagcgctttgtcaaaaggcaccgccgtaggcaaaaaaatcaatggccctgactgactcgatggtagtactactgtagagactagagagggttgctccccatatcttcgtgtgacttttactccagcattgcatttccgtcattgagacgttaattaatagcagctttcgggacagatgactgtggccatgtttcgtcacggccgcttcgtgccagctgggggtactatagtactgtgattttgttagtaaaaactttcattaggccaccattgacgaccgggccttcgcttttgctgcgctaattaaccatttcccggcgaccgaagggaacatgaacatgccccgacacatgagggcatgaggactagtgttctccctgtcgttcgttgacttgactagtgatagtttaaacgctcttcaactggaagagcggttactaccggttcactagctagctgctaatcgagctagttaccctatgaggtgacatgaagcgctcacggttactatgacggttagcttcacgactgttggtggcagtagcgtacgacttagctatagttccggacttacccttaagataacttcgtatagcatacattatacgaagttatgggcccacgcgtgaagagcggttaccagagctggtcacctttgtccaccaagatggaactgtcttcggccagaatggccatctggattcagcaggcctagaaggccatttatcgctatcaactttgtatagaaaagttgggccgaattcgagctcggtacggccagaatggcccggaccgggttacccggaccgaagcttgcatgcctgcagtgcagcgtgacccggtcgtgcccctctctagagataatgagcattgcatgtctaagttataaaaaattaccacatattttttttgtcacacttgtttgaagtgcagtttatctatctttatacatatatttaaactttactctacgaataatataatctatagtactacaataatatcagtgttttagagaatcatataaatgaacagttagacatggtctaaaggacaattgagtattttgacaacaggactctacagttttatctttttagtgtgcatgtgttctcctttttttttgcaaatagcttcacctatataatacttcatccattttattagtacatccatttagggtttagggttaatggtttttatagactaatttttttagtacatctattttattctattttagcctctaaattaagaaaactaaaactctattttagtttttttatttaataatttagatataaaatagaataaaataaagtgactaaaaattaaacaaataccctttaagaaattaaaaaaactaaggaaacatttttcttgtttcgagtagataatgccagcctgttaaacgccgtcgacgagtctaacggacaccaaccagcgaaccagcagcgtcgcgtcgggccaagcgaagcagacggcacggcatctctgtcgctgcctctggacccctctcgagagttccgctccaccgttggacttgctccgctgtcggcatccagaaattgcgtggcggagcggcagacgtgagccggcacggcaggcggcctcctcctcctctcacggcaccggcagctacgggggattcctttcccaccgctccttcgctttcccttcctcgcccgccgtaataaatagacaccccctccacaccctctttccccaacctcgtgttgttcggagcgcacacacacacaaccagatctcccccaaatccacccgtcggcacctccgcttcaaggtacgccgctcgtcctcccccccccccctctctaccttctctagatcggcgttccggtccatgcatggttagggcccggtagttctacttctgttcatgtttgtgttagatccgtgtttgtgttagatccgtgctgctagcgttcgtacacggatgcgacctgtacgtcagacacgttctgattgctaacttgccagtgtttctctttggggaatcctgggatggctctagccgttccgcagacgggatcgatttcatgattttttttgtttcgttgcatagggtttggtttgcccttttcctttatttcaatatatgccgtgcacttgtttgtcgggtcatcttttcatgcttttttttgtcttggttgtgatgatgtggtctggttgggcggtcgttctagatcggagtagaattctgtttcaaactacctggtggatttattaattttggatctgtatgtgtgtgccatacatattcatagttacgaattgaagatgatggatggaaatatcgatctaggataggtatacatgttgatgcgggttttactgatgcatatacagagatgctttttgttcgcttggttgtgatgatgtggtgtggttgggcggtcgttcattcgttctagatcggagtagaatactgtttcaaactacctggtgtatttattaattttggaactgtatgtgtgtgtcatacatcttcatagttacgagtttaagatggatggaaatatcgatctaggataggtatacatgttgatgtgggttttactgatgcatatacatgatggcatatgcagcatctattcatatgctctaaccttgagtacctatctattataataaacaagtatgttttataattattttgatcttgatatacttggatgatggcatatgcagcagctatatgtggatttttttagccctgccttcatacgctatttatttgcttggtactgtttcttttgtcgatgctcaccctgttgtttggtgttacttctgcaggtcgactttaacttagcctaggatccatggcggccaatgcgggcggcggtggagcgggaggaggcagcggcagcggcagcgtggctgcgccggcggtgtgccgccccagcggctcgcggtggacgccgacgccggagcagatcaggatgctgaaggagctctactacggctgcggcatccggtcgcccagctcggagcagatccagcgcatcaccgccatgctgcggcagcacggcaagatcgagggcaagaacgtcttctactggttccagaaccacaaggcccgcgagcgccagaagcgccgcctcaccagcctcgacgtcaacgtgcccgccgccggcgcggccgacgccaccaccagccaactcggcgtcctctcgctgtcgtcgccgccgccttcaggcgcggcgcctccctcgcccaccctcggcttctacgccgccggcaatggcggcggatcggctgtgctgctggacacgagttccgactggggcagcagcggcgctgctatggccaccgagacatgcttcctgcaggactacatgggcgtgacggacacgggcagctcgtcgcagtggccacgcttctcgtcgtcggacacgataatggcggcggccgcggcgcgggcggcgacgacgcgggcgcccgagacgctccctctcttcccgacctgcggcgacgacggcggcagcggtagcagcagctacttgccgttctggggtgccgcgtccacaactgccggcgccacttcttccgttgcgatccaacagcaacaccagctgcaggagcagtacagcttttacagcaacagcaacagcacccagctggccggcaccggcaaccaagacgtatcggcaacagcagcagcagccgccgccctggagctgagcctcagctcatggtgctccccttaccctgctgcagggagtatgtgagagcaacgcgagctgccactgctcttcactgatgtctctggaatggaaggaggaggaagtgagaacagatcattcgacaaagcagcattagtccgttgatcggtggaagaccactcgtcagtgttgagttgaatgtttgatcaataaaatacggcaatgctgtaagggttgttttttatgccattgataatacactgtactgttcagttgttgaactctatttcttagccatgccaagtgcttttcttattttgaataacattacagcaaaaagttgaaagacaaaaaaaaaaacccccgaacagagtgctttgggtcccaagcttctttagactgtgttcggcgttccccctaaatttctccccctatatctcactcacttgtcacatcagcgttctctttccccctatatctccacgctctacagcagttccacctatatcaaacctctataccccaccacaacaatattatatactttcatcttcaactaactcatgtaccttccaatttttttctactaataattatttacgtgcacagaaacttagcaaggagagagagagcgggaatttaaatgctcggcgttaggcttttagtccgctaggtggctagaccgaggttaggacgctagttcactaggggcctagtggtgttttaagacgtcacggtcaccgcggccgcatcgagcagctggcttgtggggaccagacaaaaaaggaatggtgcagaattgttaggcgcacctaccaaaagcatctttgcctttattgcaaagataaagcagattcctctagtacaagtggggaacaaaataacgtggaaaagagctgtcctgacagcccactcactaatgcgtatgacgaacgcagtgacgaccacaaaactcgagcaacgagatcatgagccaatcaaagaggagtgatgtagacctaaagcaataatggagccatgacgtaagggcttacgcccatacgaaataattaaaggctgatgtgacctgtcggtctctcagaacctttactttttatgtttggcgtgtatttttaaatttccacggcaatgacgatgtgaccgtcgacccactaaaacattgctttgtcaaaagctaaaaaagatgatgcccgacagccacttgtgtgaagcatgagaagccggtccctccactaagaaaattagtgaagcatcttccagtggtccctccactcacagctcaatcagtgagcaacaggacgaaggaaatgacgtaagccatgacgtctaatcccattcgaaacgcgtggaccgaagcttgcatgcctgcagtgcagcgtgacccggtcgtgcccctctctagagataatgagcattgcatgtctaagttataaaaaattaccacatattttttttgtcacacttgtttgaagtgcagtttatctatctttatacatatatttaaactttactctacgaataatataatctatagtactacaataatatcagtgttttagagaatcatataaatgaacagttagacatggtctaaaggacaattgagtattttgacaacaggactctacagttttatctttttagtgtgcatgtgttctcctttttttttgcaaatagcttcacctatataatacttcatccattttattagtacatccatttagggtttagggttaatggtttttatagactaatttttttagtacatctattttattctattttagcctctaaattaagaaaactaaaactctattttagtttttttatttaataatttagatataaaatagaataaaataaagtgactaaaaattaaacaaataccctttaagaaattaaaaaaactaaggaaacatttttcttgtttcgagtagataatgccagcctgttaaacgccgtcgacgagtctaacggacaccaaccagcgaaccagcagcgtcgcgtcgggccaagcgaagcagacggcacggcatctctgtcgctgcctctggacccctctcgagagttccgctccaccgttggacttgctccgctgtcggcatccagaaattgcgtggcggagcggcagacgtgagccggcacggcaggcggcctcctcctcctctcacggcaccggcagctacgggggattcctttcccaccgctccttcgctttcccttcctcgcccgccgtaataaatagacaccccctccacaccctctttccccaacctcgtgttgttcggagcgcacacacacacaaccagatctcccccaaatccacccgtcggcacctccgcttcaaggtacgccgctcgtcctcccccccccccctctctaccttctctagatcggcgttccggtccatgcatggttagggcccggtagttctacttctgttcatgtttgtgttagatccgtgtttgtgttagatccgtgctgctagcgttcgtacacggatgcgacctgtacgtcagacacgttctgattgctaacttgccagtgtttctctttggggaatcctgggatggctctagccgttccgcagacgggatcgatttcatgattttttttgtttcgttgcatagggtttggtttgcccttttcctttatttcaatatatgccgtgcacttgtttgtcgggtcatcttttcatgcttttttttgtcttggttgtgatgatgtggtctggttgggcggtcgttctagatcggagtagaattctgtttcaaactacctggtggatttattaattttggatctgtatgtgtgtgccatacatattcatagttacgaattgaagatgatggatggaaatatcgatctaggataggtatacatgttgatgcgggttttactgatgcatatacagagatgctttttgttcgcttggttgtgatgatgtggtgtggttgggcggtcgttcattcgttctagatcggagtagaatactgtttcaaactacctggtgtatttattaattttggaactgtatgtgtgtgtcatacatcttcatagttacgagtttaagatggatggaaatatcgatctaggataggtatacatgttgatgtgggttttactgatgcatatacatgatggcatatgcagcatctattcatatgctctaaccttgagtacctatctattataataaacaagtatgttttataattattttgatcttgatatacttggatgatggcatatgcagcagctatatgtggatttttttagccctgccttcatacgctatttatttgcttggtactgtttcttttgtcgatgctcaccctgttgtttggtgttacttctgcaggtcgactttaacttagcctaggatccatggccactgtgaacaactggctcgctttctccctctccccgcaggagctgccgccctcccagacgacggactccacactcatctcggccgccaccgccgaccatgtctccggcgatgtctgcttcaacatcccccaagattggagcatgaggggatcagagctttcggcgctcgtcgcggagccgaagctggaggacttcctcggcggcatctccttctccgagcagcatcacaaggccaactgcaacatgatacccagcactagcagcacagtttgctacgcgagctcaggtgctagcaccggctaccatcaccagctgtaccaccagcccaccagctcagcgctccacttcgcggactccgtaatggtggcttcctcggccggtgtccacgacggcggtgccatgctcagcgcggccgccgctaacggtgtcgctggcgctgccagtgccaacggcggcggcatcgggctgtccatgattaagaactggctgcggagccaaccggcgcccatgcagccgagggtggcggcggctgagggcgcgcaggggctctctttgtccatgaacatggcggggacgacccaaggcgctgctggcatgccacttctcgctggagagcgcgcacgggcgcccgagagtgtatcgacgtcagcacagggtggagccgtcgtcgtcacggcgccgaaggaggatagcggtggcagcggtgttgccggcgctctagtagccgtgagcacggacacgggtggcagcggcggcgcgtcggctgacaacacggcaaggaagacggtggacacgttcgggcagcgcacgtcgatttaccgtggcgtgacaaggcatagatggactgggagatatgaggcacatctttgggataacagttgcagaagggaagggcaaactcgtaagggtcgtcaagtctatttaggtggctatgataaagaggagaaagctgctagggcttatgatcttgctgctctgaagtactggggtgccacaacaacaacaaattttccagtgagtaactacgaaaaggagctcgaggacatgaagcacatgacaaggcaggagtttgtagcgtctctgagaaggaagagcagtggtttctccagaggtgcatccatttacaggggagtgactaggcatcaccaacatggaagatggcaagcacggattggacgagttgcagggaacaaggatctttacttgggcaccttcagcacccaggaggaggcagcggaggcgtacgacatcgcggcgatcaagttccgcggcctcaacgccgtcaccaacttcgacatgagccgctacgacgtgaagagcatcctggacagcagcgccctccccatcggcagcgccgccaagcgcctcaaggaggccgaggccgcagcgtccgcgcagcaccaccacgccggcgtggtgagctacgacgtcggccgcatcgcctcgcagctcggcgacggcggagccctggcggcggcgtacggcgcgcactaccacggcgccgcctggccgaccatcgcgttccagccgggcgccgccagcacaggcctgtaccacccgtacgcgcagcagccaatgcgcggcggcgggtggtgcaagcaggagcaggaccacgcggtgatcgcggccgcgcacagcctgcaggacctccaccacctgaacctgggcgcggccggcgcgcacgactttttctcggcagggcagcaggccgccgccgctgcgatgcacggcctgggtagcatcgacagtgcgtcgctcgagcacagcaccggctccaactccgtcgtctacaacggcggggtcggcgacagcaacggcgccagcgccgtcggcggcagtggcggtggctacatgatgccgatgagcgctgccggagcaaccactacatcggcaatggtgagccacgagcaggtgcatgcacgggcctacgacgaagccaagcaggctgctcagatggggtacgagagctacctggtgaacgcggagaacaatggtggcggaaggatgtctgcatgggggactgtcgtgtctgcagccgcggcggcagcagcaagcagcaacgacaacatggccgccgacgtcgggcatggcggcgcgcagctcttcagtgtctggaacgacacttaagcgtacctagtggtacctgacatcttatagtctgcaacctctcgtgtctgaattcctatctttatcaagtgttattgcttccacgactataggacagctttcgtcgaaagcttttgctcatgtgatctcgaaggattcatctagtctgatttttcgtgacttgtatcggttttattggattcatccaacatatatcaataaaaaatgagttgtgtttcctttcttcctagttcagttaaaattatttccctcctgcgcttgtgctgtaattgtctgtgtacctgttgtttgtgactgtgttagttcccttggatatgatttcgtatttgatatgtacatggagatagcttagcttcattattggagtatgaagttagtatgacatagtcactctcctggaaaattgacactgcaaaccatatttttattctgaaccacaaatcctagtcagtccgctggcatatgccgtccgtttgctgaatccagaacgtgggtttggagatgtacggctgagatgcctctatgcgaaggggatttcgtggtgaaacgagatgggagtagagcaacgcccgtggaagatgcttcaaacttccacacttttgagcaacgatcggcagtagtaaggtagacgatttcaagatcaaagcatatgaagataaacaacatcaacaacaaaatttgttggggttctatagagagaaacagagctacatacatacactgttttgtatctaccatctgagatgatgaaaagatgaaaaactaaagaatgccccggcgccaacgccaggacacgccgcgcgcgcgtcacccgagccatctcttgacccagccggcgctgtatatttacacacgttgcagcatcgatcaccacctgttcgatcgcgtcgccgtcaccggcgcgccgcgacttattgaactagtctagggcgcggctaacaacctagcttagattgccttgtctaaacccttaggctaacgcgccactctagacaccttgctagttggatattacctcttctcttcaaagtatccttgaacgctcaccggttatcaaatctctacactatagctctgtagtcttgctagatagttagttctttagctctcgaattcgagctcggtaccctggttcacaaactcaatacaacacacagtggagtagggtattacgctccggcggcccgaaccactctaaatccttgtgtcctcgtgtgctcttccaccattaatgactgtaattgcagggacacgaagagttgtagcgcttttgccaacaagatccgctatatgctagtagagtggaacctgcacagcaacaagcatccaataatctgagaataagaattatgtgtggtgatggttctcatctctgcaactcgccattttcgcgagagaaccaaatccaagttggtgaagatcatgatttgggctcatgggctggcatagtagctattacctttgcaattgtggttcgaatctatccgatattctccttttcagggagagctaatgcttatgcttattgggtattttggtttgacactgcttcacgcccaaaaaaaggcaactatgtctgagttggatatggcccaaaaaaaggcagctatgtctgagttggatatggaagtcttctttcgtttagggtgaagtaagaccaagctcatgagcttattatcttaggtcggaacaaattagttgataggcatggcacatttatcaaattataatgattttaacagaaaagcaacacctctttttcagcagcaccagctttgcaagctgcaattgacactccaagcatagtatttgctccaaactcagcctgcatttcgcacaatatcatatctatttccatttggataaaatatattttccagaaatatgggaacagaatcaagatacagaaaaaagttgtggtagtagtggtaagtggaaacacaagtacagtgaaaagatagcattatttctgaacagtcaaattaaccgaaataagtagtatcacatactgcccctaaattgactacacccaatgtaaagaattgcttgagcatattgagccatcagttgtttgtttgtgtaacggatttgacaatgcagagttcaggagcaaaaaaccgcaaaggagagaaagagggaaaggatctcctagtatcccaccttgtggcgcgccctgtcaagtgcatgatggcctggtcgatctgcgtctgctgctgcggttccatcccaacgagtgcctccgacaccttgtcgttgatcacccgcaccgcgtaggcgacccccctggcgaggaacttccgcctctcggaggccccggccgcgtcggcggcggcgccctcgagcgcgcccacgctagccgtagatgctcggtgcacggccttgttggtgtgcaactcgacctcaacggccggtgcgctacgcccgtcaaggatctggcgcgcccgcaccctcgtgatcacggtgggcgcctcccgcctcatgtggccgacgatgaaaagcgccgggttaggggccttggcgcgcaccgccgtattcagggcctcctcgctcttgcgcgagagcaggtgcttccccaggtactcctgcactgacaaggctgccacagcggtggaatttgtcctcacgacttcgccacgtcgtcctcacctccctggcttcccacgactccgccgtatcgaggtgctcggtgggtcgtcttaatccgaagtccgaactaggaagacgagacagagaggtctgaggaatgggcctcgtttgatgttgagctgaattatttttccagcataagcccaggtcttggtccatgaacaaaattactagaaacccagcccagtactacgatctaaaagagggactgccactggatagctctctctagcattctccacgctccaatacagcggcgtcgtgtctatccgggtctatccgcgaacacgtgagaactctccagaaactgctttctcctccacttcatctctctcgctttccctctataaaaagaccccttctaggaattgagggagacagcaagcaccaagcagcgatccgaagctcaatcaattcactcaaacctcttccccaaatcttcgattagatcttcgttgacaagaagactagaaccgaacctgacatgtccaacctgctcacggttcaccagaaccttccggctcttccagtggacgcgacgtccgatgaagtcaggaagaacctcatggacatgttccgcgacaggcaagcgttcagcgagcacacctggaagatgctgctctccgtctgccgctcctgggctgcatggtgcaagctgaacaacaggaagtggttccccgctgagcccgaggacgtgagggattaccttctgtacctgcaagcgcgaggtttgtttctgcttctacctttgatatatatataataattatcattaattagtagtaatataatatttcaaatatttttttcaaaataaaagaatgtagtatatagcaattgcttttctgtagtttataagtgtgtatattttaatttataacttttctaatatatgaccaaaacatggtgatgcctaggtctggcagtgaagaccatccagcaacaccttggacaactgaacatgcttcacaggcgctccggcctcccgcgccccagcgactcgaacgccgtgagcctcgtcatgcgccgcatcaggaaggaaaacgtcgatgccggcgaaagggcaaagcaggccctcgcgttcgagaggaccgatttcgaccaggtccgcagcctgatggagaacagcgacaggtgccaggacattaggaacctggcgttcctcggaattgcatacaacacgctcctcaggatcgcggaaattgcccgcattcgcgtgaaggacattagccgcaccgacggcggcaggatgcttatccacattggcaggaccaagacgctcgtttccaccgcaggcgtcgaaaaggccctcagcctcggagtgaccaagctcgtcgaacgctggatctccgtgtccggcgtcgcggacgacccaaacaactacctcttctgccgcgtccgcaagaacggggtggctgcccctagcgccaccagccaactcagcacgagggccttggaaggtattttcgaggccacccaccgcctgatctacggcgcgaaggatgacagcggtcaacgctacctcgcatggtccgggcactccgcccgcgttggagctgctagggacatggcccgcgccggtgtttccatccccgaaatcatgcaggcgggtggatggacgaacgtgaacattgtcatgaactacattcgcaaccttgacagcgagacgggcgcaatggttcgcctcctggaagatggtgactgaggtacccaacctagacttgtccatcttctggattggccaacttaattaatgtatgaaataaaaggatgcacacatagtgacatgctaatcactataatgtgggcatcaaagttgtgtgttatgtgtaattactagttatctgaataaaagagaaagagatcatccatatttcttatcctaaatgaatgtcacgtgtctttataattctttgatgaaccagatgcatttcattaaccaaatccatatacatataaatattaatcatatataattaatatcaattgggttagcaaaacaaatctagtctaggtgtgttttgcgatccgatatcaggcctgacgtctaaaaacggcccctaactaacgcttagttgcccgctagattagtcccccgttagtgcctagttagacacacgacgaactaggggctagccaccttgctagttggatattacctcttctcttcaaagtatccttgaacgctcaccggttatcaaatctctacactatagctctgtagtcttgctagatagttagttctttagctctcgtgcgcacgataacttcgtatagcatacattatacgaagttataacagcggaccgggttaccgaattcctgcccttaaggccaattgttcaagattcattcaacaattgaaacatctcccatgattaaatcagtataaggttgctatggtcttgcttgacaaagtttttttttgagggaatttcaactaaatttttgagtgaaactatcaaatactgattttaaaaaatttttataaaaggaagcgcagagataaaaggccatctatgctacaaaagtacccaaaaatgtaatcctaaagtatgaattgcattttttttttgtttggacgaaaggaaaggagtattaccacaagaatgatatcatcttcatatttagatcttttttgggtaaagcttgagattctctaaatatagagaaatcagaagaaaaaaaaaccgtgttttggtggttttgatttctagcctccacaataactttgacggcgtcgacaagtctaacggacaccaagcagcgaaccaccagcgccgagccaagcgaagcagacggccgagacgttgacaccttcggcgcggcatctctcgagagttccgctccggcgctccacctccaccgctggcggtttcttattccgttccgttccgcctcctgctctgctcctctccacaccacacggcacgaaaccgttacggcaccggcagcacccagcacgggagaggggattcctttcccaccgttccttccctttccgccccgccgctataaatagccagccccatccccagcttttttccccaatctcatctcctctctcctgttgttcggagcacacgcacaatccgatcgatccccaaatccccttcgtctctcctcgcgagcctcgtggatcccagcttcaaggtacggcgatcgatcatcccccctccttctctctaccttcttttctctagactacatcggatggcgatccatggttagggcctgctagtttcccttcctgttttgtcgatggctgcgaggcacaatagatctgatggcgttatgacggctaacttgtcatgttgttgcgatttatagtccctttaggagatcagtttaatttctcggatggttcgagatcggtggtccatggttagtaccctaagatccgcgctgttagggttcgtagatggaggcgacctgttctgattgttaacttgtcagtacctgggaaatcctgggatggttctagctcgtccgcagatgagatcgatttcatgatcctctgtatcttgtttcgttgcctaggttccgtctaatctatccgtggtatgatgtagatgttttgatcgtgctaactacgtcttgtaaagttaattgtcaggtcataatttttagcatgcctttttttttgtttggttttgtctaattgggctgtcgttctagatcagagtagaagactgttccaaactacctgctggatttattgaacttggatctgtatgtgtgtcacatatcttcataaattcatgattaagatggattgaaatatcttttatctttttggtatggatagttctatatgttggtgtggctttgttagatgtatacatgcttagatacatgaagcaacgtgctgctactgtttagtaattgctgttcatttgtctaataaacagataaggatatgtatttatgttgctgttggttttgctggtactttgttggatacaaatgcttcaatacagaaaacagcatgctgctacgatttaccatttatctaatcttatcatatgtctaatctaataaacaaacatgcttttaaattatcttcatatgcttggatgatggcatacacagcggctatgtgtggttttttaaatacccagcatcatgggcatgcatgacactgctttaatatgctttttatttgcttgagactgtttcttttgtttatactgaccctttagttcggtgactcttctgcaggtcgactttaacttagcctaggatccatggcccagtccaagcacggcctgaccaaggagatgaccatgaagtaccgcatggagggctgcgtggacggccacaagttcgtgatcaccggcgagggcatcggctaccccttcaagggcaagcaggccatcaacctgtgcgtggtggagggcggccccttgcccttcgccgaggacatcttgtccgccgccttcatgtacggcaaccgcgtgttcaccgagtacccccaggacatcgtcgactacttcaagaactcctgccccgccggctacacctgggaccgctccttcctgttcgaggacggcgccgtgtgcatctgcaacgccgacatcaccgtgagcgtggaggagaactgcatgtaccacgagtccaagttctacggcgtgaacttccccgccgacggccccgtgatgaagaagatgaccgacaactgggagccctcctgcgagaagatcatccccgtgcccaagcagggcatcttgaagggcgacgtgagcatgtacctgctgctgaaggacggtggccgcttgcgctgccagttcgacaccgtgtacaaggccaagtccgtgccccgcaagatgcccgactggcacttcatccagcacaagctgacccgcgaggaccgcagcgacgccaagaaccagaagtggcacctgaccgagcacgccatcgcctccggctccgccttgccctccggactcagatctcgatagggtaccaatggccagttaacagatccagctgctgctgttctagggttcacaagtctgcctatttgtcttccccaatggagctatggttgtctggtctggtccttggtcgtgtcccgtttcattgtgtactatttacctgtaatgtgtatccttaagtctggtttgatggtgtctgaaacgttttgctgtggtagagcagcatggaagaactataatgaataagtgatccctaatcattgtgtccaaattttgcttctgctatacccttttgtgctgtttcttatgttttgcttaaaaatttgatctgacaaacaaatttgtctaaattatgctcttgttctgactgtgtactgtacacatttgtattgctaccggtttggcacatagttttctctttgattgcagatcaaacccttctgattgcagattgcttggctatggctgatgtgctcactgttcttctttagcttgtatattgctgatggtggcttggctacggctgaaaaagttgctgctgcgccgacttggcaactgttgctccagtaatgctttgtcctctcttcctagccgccgacttggcacttggcagctgttgctcctgtaatgcgttgttatctcttatctcttgagatgtactatgattttgaggctgtttgacttgtgccagattgccagtgctgatgctatattatctcaggtttttatgctagtatatgttttactgtgtgctgcctgtgtcgagttacgtaatctattgaaccgctatgcgtgttgatgccctgttgttgcttgccagattgatgcccctgttgcttgcagcttgcaagctgtagtgaaatcctaaaattcgaaaccaaatctattctgaacttttgaagatctgtgatgtccggaagaaaagattcaaacagataaacgggactctccagaatctataaaataaatgatcgacaaacgctttgctttggtaggcttcctagttagttagcggaccgggatccgacggcgtcttcaccgccccgccgccgcccgagccggacttgtcgctgccgccgccgctgctcatcttgcgcgcttgtgtccctccctcagtccctgcgttcgcggatcgcgggcgggtgcgacccgtttggactccggccggtagccttcgtgccgacctcgctcggtccaccggtttgtcggggacccacatgtcagtgaaggtacgcgtccacgtccacagaccctactaccccagacgagtccaaatcgctgttccctcacactctcgtgtaccagcgcgcggcggaaagcacctttccaacaaccgccgacacgtcggtcccacgtcggcatgctccaccggtcagtgtttggcgtgtacggctcccggcgacgaacgagtgtggcctaagctttcctactcccatcccatctgagccacacatctctctcacgccacgcgcacaaaacagccaggctcccacgcgcatcaaccggctctccctttccgtgccactcgcccccaagccccaaaccctcgccgccgcctccgagacagccgccgccacctaggccatggccaccgccgccgccgcgtctaccgcgctcactggcgccactaccgctgcgcccaaggcgaggcgccgggcgcacctcctggccacccgccgcgccctcgccgcgcccatcaggtgctcagcggcgtcacccgccatgccgatggctcccccggccaccccgctccggccgtggggccccaccgagccccgcaagggtgctgacatcctcgtcgagtccctcgagcgctgcggcgtccgcgacgtcttcgcctaccccggcggcgcgtcgatggagatccaccaggcactcacccgctcccccgtcatcgccaaccacctcttccgccacgagcaaggggaggcctttgccgcctccggctacgcgcgctcctcgggccgcgtcggcgtctgcatcgccacctccggccccggcgccaccaacctagtctccgcgctcgccgacgcgctgctcgattccgtcccgatggtcgccatcacgggacaggtggcgcgacgcatgattggcaccgacgccttccaggagacgcccatcgtcgaggtcacgcgctccatcaccaagcacaactacctggtcctcgacgtcgacgacatcccccgcgtcgtgcaggaggctttcttcctcgcctcctctggtcgaccagggccggtgcttgtcgacatccccaaggacatccagcagcagatggcggtgcctgtctgggacaagcccatgagtctgcctgggtacattgcgcgccttcccaagccccctgcgactgagttgcttgagcaggtgctgcgtcttgttggtgaatcgcggcgccctgttctttatgtgggcggtggctgcgcagcatctggtgaggagttgcgacgctttgtggagctgactggaatcccggtcacaactactcttatgggcctcggcaacttccccagcgacgacccactgtctctgcgcatgctaggtatgcatgggacggtgtatgcaaattatgcagtggataaggccgatctgttgcttgcacttggtgtgcggtttgatgatcgcgtgacagggaagattgaggcttttgcaagcagggctaagattgtgcacgttgatattgatccggctgagattggcaagaacaagcagccacatgtgtccatctgtgcagatgttaagcttgctttgcagggcatgaatgctcttcttgaaggaagcacatcaaagaagagctttgactttggctcatggaacgatgagttggatcagcagaagagggaattcccccttgggtataaaacatctaatgaggagatccagccacaatatgctattcaggttcttgatgagctgacgaaaggcgaggccatcatcggcacaggtgttgggcagcaccagatgtgggcggcacagtactacacttacaagcggccaaggcagtggttgtcttcagctggtcttggggctatgggatttggtttgccggctgctgctggtgcttctgtggcaaacccaggtgtcactgttgttgacatcgatggagatggtagctttctcatgaacgttcaggagctagctatgatccgaattgagaacctcccagtgaaggtctttgtgctaaacaaccagcacctggggatggtggtgcagttggaggacaggttctataaggccaacagagcgcacacatacttgggaaacccagagaatgaaagtgagatatatccagatttcgtgacgatcgccaaagggttcaacattccagccgtccgtgtgacaaagaagaacgaagtccgcgcagcgataaagaagatgctcgagactccagggccgtacctcttggatataatcgtcccacaccaggagcatgtgttgcctatgatccctagtggtggggctttcaaggatatgatcctggatggtgatggcaggactgtgtactgacttcgaataggtacccggggatcctctagtgccgtgggtcgtttaagctgccgctgtacctgtgtcgtctggtgccttctggtgtacctgggaggttgtcgtctatcaagtatctgtggttggtgtcatgagtcagtgagtcccaatactgttcgtgtcctgtgtgcattatacccaaaactgttatgggcaaatcatgaataagcttgatgttcgaacttaaaagtctctgctcaatatggtattatggttgtttttgttcgtctcctaatatttgcctgggatcaaattttattggctggtgttcatttgacctccatgttcttgctaggctccattttttactctacagccataatatgtttgattgtttggtttgttctttgttgtacacctggttctgtcgagcttagttttcgacactggcttacagcttaacatgttgctattttattgggttctgattgctattttattgggttctgattgctagtttttgctgaatccaaaaaccatgttatttatttaagcgatccaggttattattatgatggtggctaagtttttttttttccaagggtaaattttctggattctccagtgtttctgtggccgaattcaatcactagagtcgacctgcaaagcttcggtccgggcctagaaggcccgcgccacttacgcttgattccgatgacttcgtaggttcctagctcaagccgctcgtgtccaagcgtcacttacgattagctaatgattacggcatctaggaccgactagctagctagctaagagctcggtaccgagctcgaattcattccgattaatcgtggcctcttgctcttcaggatgaagagctatgtttaaacgtgcaagcgctactagacaattcagtacattaaaaacgtccgcaatgtgttattaagttgtctaagcgtcaatttgtttacaccacaatatatcctgcca

SEQ ID NO: 80 - DNA, 22133 bp, synthetic construct
  misc_feature 1..22133: note = PHP97453
  source 1..22133: mol_type = other DNA
gtttacccgccaatatatcctgtcaaacactgcggccgcacttgaccgcggatggagccggagctgtggtgaggccatcgacgggaggtgggggagaacacagtctcagtgttctttgtgagtccgcaaggtttttagcttttctgtattaattaaggttgctgttggctgtagaatacggtcgtggaagagctgtatcggtagctactacgtaagctattatatactggaagtctggagctcgtcgatctccggtcgtcttcctccatttctcctcgtcttgctttgactgctgctaccatttgcttctgttttctgatgaagcatgccatgtcggccaccagtgtttgtgtggtttttgcagggaatggctttcaagtgctgtgattgaatggccctcgtcgtcctcggctgagctcacatggacgcgtcatgtgagtgagatatatgatcatatgatgagtggggttcgggtgagtgcgtacttgaagtaggatcccgctttcactcattcattcattggcctttaaaccgggaaattttcgcgaggagatggagggaagcaagcagggtgacgagtgcagagtgccgcgagcgctttgtcaaaaggcaccgccgtaggcaaaaaaatcaatggccctgactgactcgatggtagtactactgtagagactagagagggttgctccccatatcttcgtgtgacttttactccagcattgcatttccgtcattgagacgttaattaatagcagctttcgggacagatgactgtggccatgtttcgtcacggccgcttcgtgccagctgggggtactatagtactgtgattttgttagtaaaaactttcattaggccaccattgacgaccgggccttcgcttttgctgcgctaattaaccatttcccggcgaccgaagggaacatgaacatgccccgacacatgagggcatgaggactagtgttctccctgtcgttcgttgacttgactagtgatagtttaaacgctcttcaactggaagagcggttactaccggttcactagctagctgctaatcgagctagttaccctatgaggtgacatgaagcgctcacggttactatgacggttagcttcacgactgttggtggcagtagcgtacgacttagctatagttccggacttacctagctaataacttcgtatagcatacattatacgaagttatggttaccgaattcgagctcggtaccctggcggaccgaagcttgcatgcctgcagtgcagcgtgacccggtcgtgcccctctctagagataatgagcattgcatgtctaagttataaaaaattaccacatattttttttgtcacacttgtttgaagtgcagtttatctatctttatacatatatttaaactttactctacgaataatataatctatagtactacaataatatcagtgttttagagaatcatataaatgaacagttagacatggtctaaaggacaattgagtattttgacaacaggactctacagttttatctttttagtgtgcatgtgttctcctttttttttgcaaatagcttcacctatataatacttcatccattttattagtacatccatttagggtttagggttaatggtttttatagactaatttttttagtacatctattttattctattttagcctctaaattaagaaaactaaaactctattttagtttttttatttaataatttagatataaaatagaataaaataaagtgactaaaaattaaacaaataccctttaagaaattaaaaaaactaaggaaacatttttcttgtttcgagtagataatgccagcctgttaaacgccgtcgacgagtctaacggacaccaaccagcgaaccagcagcgtcgcgtcgggccaagcgaagcagacggcacggcatctctgtcgctgcctctggacccctctcgagagttccgctccaccgttggacttgctccgctgtcggcatccagaaattgcgtggcggagcggcagacgtgagccggcacggcaggcggcctcctcctcctctcacggcaccggcagctacgggggattcctttcccaccgctccttcgctttcccttcctcgcccgccgtaataaatagacaccccctccacaccctctttccccaacctcgtgttgttcggagcgcacacacacacaaccagatctcccccaaatccacccgtcggcacctccgcttcaagaggtccgccttgtttctcctctgtctcttgatctgactaatcttggtttatgattcgttgagtaattttggggaaagcttcgtccacagttttttttcgatgaacagtgccgcagtggcgctgatcttgtatgctatcctgcaatcgtggtgaacttatttcttttatatcctttactcccatgaaaaggctagtaatctttctcgatgtaacatcgtccagcactgctattaccgtgtggtccatccgacagtctggctgaacacatcatacgatctatggagcaaaaatctatcttccctgttctttaatgaaggacgtcattttcattagtatgatctaggaatgttgcaacttgcaaggaggcgtttctttctttgaatttaactaactcgttgagtggccctgtttctcggacgtaaggcctttgctgctccacacatgtccattcgaattttaccgtgtttagcaagggcgaaaagtttgcatcttgatgatttagcttgactatgcgattgctttcctgaacccgtgcaggatccgcccatggcggccaatgcgggcggcggtggagcgggaggaggcagcggcagcggcagcgtggctgcgccggcggtgtgccgccccagcggctcgcggtggacgccgacgccggagcagatcaggatgctgaaggagctctactacggctgcggcatccggtcgcccagctcggagcagatccagcgcatcaccgccatgctgcggcagcacggcaagatcgagggcaagaacgtcttctactggttccagaaccacaaggcccgcgagcgccagaagcgccgcctcaccagcctcgacgtcaacgtgcccgccgccggcgcggccgacgccaccaccagccaactcggcgtcctctcgctgtcgtcgccgccgccttcaggcgcggcgcctccctcgcccaccctcggcttctacgccgccggcaatggcggcggatcggctgtgctgctggacacgagttccgactggggcagcagcggcgctgctatggccaccgagacatgcttcctgcaggactacatgggcgtgacggacacgggcagctcgtcgcagtggccacgcttctcgtcgtcggacacgataatggcggcggccgcggcgcgggcggcgacgacgcgggcgcccgagacgctccctctcttcccgacctgcggcgacgacggcggcagcggtagcagcagctacttgccgttctggggtgccgcgtccacaactgccggcgccacttcttccgttgcgatccaacagcaacaccagctgcaggagcagtacagcttttacagcaacagcaacagcacccagctggccggcaccggcaaccaagacgtatcggcaacagcagcagcagccgccgccctggagctgagcctcagctcatggtgctccccttaccctgctgcagggagtatgtgagagcaacgcgagctgccactgctcttcactgatgtctctggaatggaaggaggaggaagtgagaacagatcattcgacaaagcagcattagtccgttgatcggtggaagaccactcgtcagtgttgagttgaatgtttgatcaataaaatacggcaatgctgtaagggttgttttttatgccattgataatacactgtactgttcagttgttgaactctatttcttagccatgccaagtgcttttcttattttgaataacattacagcaaaaagttgaaagacaaaaaaaaaaacccccgaacagagtgctttgggtcccaagcttctttagactgtgttcggcgttccccctaaatttctccccctatatctcactcacttgtcacatcagcgttctctttccccctatatctccacgctctacagcagttccacctatatcaaacctctataccccaccacaacaatattatatactttcatcttcaactaactcatgtaccttccaatttttttctactaataattatttacgtgcacagaaacttagcaaggagagagagagcgggaatttaaatgctcggcgttaggcttttagtccgctaggtggctagaccgaggttaggacgctagttcactaggggcctagtggtgttttaagacgtcacggtcaccacgcgtggaccgaagcttgcatgcctgcagtgcagcgtgacccggtcgtgcccctctctagagataatgagcattgcatgtctaagttataaaaaattaccacatattttttttgtcacacttgtttgaagtgcagtttatctatctttatacatatatttaaactttactctacgaataatataatctatagtactacaataatatcagtgttttagagaatcatataaatgaacagttagacatggtctaaaggacaattgagtattttgacaacaggactctacagttttatctttttagtgtgcatgtgttctcctttttttttgcaaatagcttcacctatataatacttcatccattttattagtacatccatttagggtttagggttaatggtttttatagactaatttttttagtacatctattttattctattttagcctctaaattaagaaaactaaaactctattttagtttttttatttaataatttagatataaaatagaataaaataaagtgactaaaaattaaacaaataccctttaagaaattaaaaaaactaaggaaacatttttcttgtttcgagtagataatgccagcctgttaaacgccgtcgacgagtctaacggacaccaaccagcgaaccagcagcgtcgcgtcgggccaagcgaagcagacggcacggcatctctgtcgctgcctctggacccctctcgagagttccgctccaccgttggacttgctccgctgtcggcatccagaaattgcgtggcggagcggcagacgtgagccggcacggcaggcggcctcctcctcctctcacggcaccggcagctacgggggattcctttcccaccgctccttcgcacgtaagcgcttacgcaccgaacaacgtaagcgcttacgcaccgaacaacgtaagcgcttacgctttcccttcctcgcccgccgtaataaatagacaccccctccacaccctctttccccaacctcgtgttgttcggagcgcacacacacacaaccagatctcccccaaatccacccgtcggcacctccgcttcaaggtacgccgctcgtcctcccccccccccctctctaccttctctagatcggcgttccggtccatgcatggttagggcccggtagttctacttctgttcatgtttgtgttagatccgtgtttgtgttagatccgtgctgctagcgttcgtacacggatgcgacctgtacgtcagacacgttctgattgctaacttgccagtgtttctctttggggaatcctgggatggctctagccgttccgcagacgggatcgatttcatgattttttttgtttcgttgcatagggtttggtttgcccttttcctttatttcaatatatgccgtgcacttgtttgtcgggtcatcttttcatgcttttttttgtcttggttgtgatgatgtggtctggttgggcggtcgttctagatcggagtagaattctgtttcaaactacctggtggatttattaattttggatctgtatgtgtgtgccatacatattcatagttacgaattgaagatgatggatggaaatatcgatctaggataggtatacatgttgatgcgggttttactgatgcatatacagagatgctttttgttcgcttggttgtgatgatgtggtgtggttgggcggtcgttcattcgttctagatcggagtagaatactgtttcaaactacctggtgtatttattaattttggaactgtatgtgtgtgtcatacatcttcatagttacgagtttaagatggatggaaatatcgatctaggataggtatacatgttgatgtgggttttactgatgcatatacatgatggcatatgcagcatctattcatatgctctaaccttgagtacctatctattataataaacaagtatgttttataattattttgatcttgatatacttggatgatggcatatgcagcagctatatgtggatttttttagccctgccttcatacgctatttatttgcttggtactgtttcttttgtcgatgctcaccctgttgtttggtgttacttctgcaggtcgactttaacttagcctaggatccatggccactgtgaacaactggctcgctttctccctctccccgcaggagctgccgccctcccagacgacggactccacactcatctcggccgccaccgccgaccatgtctccggcgatgtctgcttcaacatcccccaagattggagcatgaggggatcagagctttcggcgctcgtcgcggagccgaagctggaggacttcctcggcggcatctccttctccgagcagcatcacaaggccaactgcaacatgatacccagcactagcagcacagtttgctacgcgagctcaggtgctagcaccggctaccatcaccagctgtaccaccagcccaccagctcagcgctccacttcgcggactccgtaatggtggcttcctcggccggtgtccacgacggcggtgccatgctcagcgcggccgccgctaacggtgtcgctggcgctgccagtgccaacggcggcggcatcgggctgtccatgattaagaactggctgcggagccaaccggcgcccatgcagccgagggtggcggcggctgagggcgcgcaggggctctctttgtccatgaacatggcggggacgacccaaggcgctgctggcatgccacttctcgctggagagcgcgcacgggcgcccgagagtgtatcgacgtcagcacagggtggagccgtcgtcgtcacggcgccgaaggaggatagcggtggcagcggtgttgccggcgctctagtagccgtgagcacggacacgggtggcagcggcggcgcgtcggctgacaacacggcaaggaagacggtggacacgttcgggcagcgcacgtcgatttaccgtggcgtgacaaggcatagatggactgggagatatgaggcacatctttgggataacagttgcagaagggaagggcaaactcgtaagggtcgtcaagtctatttaggtggctatgataaagaggagaaagctgctagggcttatgatcttgctgctctgaagtactggggtgccacaacaacaacaaattttccagtgagtaactacgaaaaggagctcgaggacatgaagcacatgacaaggcaggagtttgtagcgtctctgagaaggaagagcagtggtttctccagaggtgcatccatttacaggggagtgactaggcatcaccaacatggaagatggcaagcacggattggacgagttgcagggaacaaggatctttacttgggcaccttcagcacccaggaggaggcagcggaggcgtacgacatcgcggcgatcaagttccgcggcctcaacgccgtcaccaacttcgacatgagccgctacgacgtgaagagcatcctggacagcagcgccctccccatcggcagcgccgccaagcgcctcaaggaggccgaggccgcagcgtccgcgcagcaccaccacgccggcgtggtgagctacgacgtcggccgcatcgcctcgcagctcggcgacggcggagccctggcggcggcgtacggcgcgcactaccacggcgccgcctggccgaccatcgcgttccagccgggcgccgccagcacaggcctgtaccacccgtacgcgcagcagccaatgcgcggcggcgggtggtgcaagcaggagcaggaccacgcggtgatcgcggccgcgcacagcctgcaggacctccaccacctgaacctgggcgcggccggcgcgcacgactttttctcggcagggcagcaggccgccgccgctgcgatgcacggcctgggtagcatcgacagtgcgtcgctcgagcacagcaccggctccaactccgtcgtctacaacggcggggtcggcgacagcaacggcgccagcgccgtcggcggcagtggcggtggctacatgatgccgatgagcgctgccggagcaaccactacatcggcaatggtgagccacgagcaggtgcatgcacgggcctacgacgaagccaagcaggctgctcagatggggtacgagagctacctggtgaacgcggagaacaatggtggcggaaggatgtctgcatgggggactgtcgtgtctgcagccgcggcggcagcagcaagcagcaacgacaacatggccgccgacgtcgggcatggcggcgcgcagctcttcagtgtctggaacgacacttaagcgtacctagtggtacctgacatcttatagtctgcaacctctcgtgtctgaattcctatctttatcaagtgttattgcttccacgactataggacagctttcgtcgaaagcttttgctcatgtgatctcgaaggattcatctagtctgatttttcgtgacttgtatcggttttattggattcatccaacatatatcaataaaaaatgagttgtgtttcctttcttcctagttcagttaaaattatttccctcctgcgcttgtgctgtaattgtctgtgtacctgttgtttgtgactgtgttagttcccttggatatgatttcgtatttgatatgtacatggagatagcttagcttcattattggagtatgaagttagtatgacatagtcactctcctggaaaattgacactgcaaaccatatttttattctgaaccacaaatcctagtcagtccgctggcatatgccgtccgtttgctgaatccagaacgtgggtttggagatgtacggctgagatgcctctatgcgaaggggatttcgtggtgaaacgagatgggagtagagcaacgcccgtggaagatgcttcaaacttccacacttttgagcaacgatcggcagtagtaaggtagacgatttcaagatcaaagcatatgaagataaacaacatcaacaacaaaatttgttggggttctatagagagaaacagagctacatacatacactgttttgtatctaccatctgagatgatgaaaagatgaaaaactaaagaatgccccggcgccaacgccaggacacgccgcgcgcgcgtcacccgagccatctcttgacccagccggcgctgtatatttacacacgttgcagcatcgatcaccacctgttcgatcgcgtcgccgtcaccggcgcgccgcgacttattgaactagtctagggcgcggctaacaacctagcttagattgccttgtctaaacccttaaggctaacgcgccactctagattcttatgtgcttctagtctccaaatgtggttgatagttattttgctctaagatcaacagtaatgaagtataaatcatcgttgtggtgtgctactcggttaattgagcattaacacacacaaacatgacgaggatggtataatctccaaaaatgtgtactttgttaggtgggaccctatagccttgattaatgtgctatgttaggcatgcctggaaacgtgtgacgcatatgttttgtgaacctgttgatattatatgtgcttttatattaccatattttattaaaatactaatatttattactagtaagatataacattctatctagcttaaaaactaaccataaatattccataataactagatttaccaaactaatatactaaatatacataataaatacaaaattaacaagacaataatcaatatttatgagcttaatatatttagacattatggttggtcgacgataatcatgctaacttttcgtaattgcttgattgaaatatgcttagaataatgcctctttgttctacatggcaaatagggaccattatggtgtaacaccctgggaaccacaaacaccccgaaatgctactaaactacacaactaaccttcatatataaaatttcgacagcatctcctttgaaaatttgcatagacgtggaagcaacagagtataaacagatatcatgataagaaaacatactagacattaataatctgctagaaatgggaagaatcgagctcggtaccctggttcacaaactcaatacaacacacagtggagtagggtattacgctccggcggcccgaaccactctaaatccttgtgtcctcgtgtgctcttccaccattaatgactgtaattgcagggacacgaagagttgtagcgcttttgccaacaagatccgctatatgctagtagagtggaacctgcacagcaacaagcatccaataatctgagaataagaattatgtgtggtgatggttctcatctctgcaactcgccattttcgcgagagaaccaaatccaagttggtgaagatcatgatttgggctcatgggctggcatagtagctattacctttgcaattgtggttcgaatctatccgatattctccttttcagggagagctaatgcttatgcttattgggtattttggtttgacactgcttcacgcccaaaaaaaggcaactatgtctgagttggatatggcccaaaaaaaggcagctatgtctgagttggatatggaagtcttctttcgtttagggtgaagtaagaccaagctcatgagcttattatcttaggtcggaacaaattagttgataggcatggcacatttatcaaattataatgattttaacagaaaagcaacacctctttttcagcagcaccagctttgcaagctgcaattgacactccaagcatagtatttgctccaaactcagcctgcatttcgcacaatatcatatctatttccatttggataaaatatattttccagaaatatgggaacagaatcaagatacagaaaaaagttgtggtagtagtggtaagtggaaacacaagtacagtgaaaagatagcattatttctgaacagtcaaattaaccgaaataagtagtatcacatactgcccctaaattgactacacccaatgtaaagaattgcttgagcatattgagccatcagttgtttgtttgtgtaacggatttgacaatgcagagttcaggagcaaaaaaccgcaaaggagagaaagagggaaaggatctcctagtatcccaccttgtggcgcgccctgtcaagtgcatgatggcctggtcgatctgcgtctgctgctgcggttccatcccaacgagtgcctccgacaccttgtcgttgatcacccgcaccgcgtaggcgacccccctggcgaggaacttccgcctctcggaggccccggccgcgtcggcggcggcgccctcgagcgcgcccacgctagccgtagatgctcggtgcacggccttgttggtgtgcaactcgacctcaacggccggtgcgctacgcccgtcaaggatctggcgcgcccgcaccctcgtgatcacggtgggcgcctcccgcctcatgtggccgacgatgaaaagcgccgggttaggggccttggcgcgcaccgccgtattcagggcctcctcgctcttgcgcgagagcaggtgcttccccaggtactcctgcactgacaaggctgccacagcggtggaatttgtcctcacgacttcgccacgtcgtcctcacctccctggcttcccacgactccgccgtatcgaggtgctcggtgggtcgtcttaatccgaagtccgaactaggaagacgagacagagaggtctgaggaatgggcctcgtttgatgttgagctgaattatttttccagcataagcccaggtcttggtccatgaacaaaattactagaaacccagcccagtactacgatctaaaagagggactgccactggatagctctctctagcattctccacgctccaatacagcggcgtcgtgtctatccgggtctatccgcgaacacgtgagaactctccagaaactgctttctcctccacttcatctctctcgctttccctctataaaaagaccccttctaggaattgagggagacagcaagcaccaagcagcgatccgaagctcaatcaattcactcaaacctcttccccaaatcttcgattagatcttcgttgacaagaagactagaaccgaacctgacatgtccaacctgctcacggttcaccagaaccttccggctcttccagtggacgcgacgtccgatgaagtcaggaagaacctcatggacatgttccgcgacaggcaagcgttcagcgagcacacctggaagatgctgctctccgtctgccgctcctgggctgcatggtgcaagctgaacaacaggaagtggttccccgctgagcccgaggacgtgagggattaccttctgtacctgcaagcgcgaggtttgtttctgcttctacctttgatatatatataataattatcattaattagtagtaatataatatttcaaatatttttttcaaaataaaagaatgtagtatatagcaattgcttttctgtagtttataagtgtgtatattttaatttataacttttctaatatatgaccaaaacatggtgatgcctaggtctggcagtgaagaccatccagcaacaccttggacaactgaacatgcttcacaggcgctccggcctcccgcgccccagcgactcgaacgccgtgagcctcgtcatgcgccgcatcaggaaggaaaacgtcgatgccggcgaaagggcaaagcaggccctcgcgttcgagaggaccgatttcgaccaggtccgcagcctgatggagaacagcgacaggtgccaggacattaggaacctggcgttcctcggaattgcatacaacacgctcctcaggatcgcggaaattgcccgcattcgcgtgaaggacattagccgcaccgacggcggcaggatgcttatccacattggcaggaccaagacgctcgtttccaccgcaggcgtcgaaaaggccctcagcctcggagtgaccaagctcgtcgaacgctggatctccgtgtccggcgtcgcggacgacccaaacaactacctcttctgccgcgtccgcaagaacggggtggctgcccctagcgccaccagccaactcagcacgagggccttggaaggtattttcgaggccacccaccgcctgatctacggcgcgaaggatgacagcggtcaacgctacctcgcatggtccgggcactccgcccgcgttggagctgctagggacatggcccgcgccggtgtttccatccccgaaatcatgcaggcgggtggatggacgaacgtgaacattgtcatgaactacattcgcaaccttgacagcgagacgggcgcaatggttcgcctcctggaagatggtgactgaggtacccaacctagacttgtccatcttctggattggccaacttaattaatgtatgaaataaaaggatgcacacatagtgacatgctaatcactataatgtgggcatcaaagttgtgtgttatgtgtaattactagttatctgaataaaagagaaagagatcatccatatttcttatcctaaatgaatgtcacgtgtctttataattctttgatgaaccagatgcatttcattaaccaaatccatatacatataaatattaatcatatataattaatatcaattgggttagcaaaacaaatctagtctaggtgtgttttgcgatccgatatcgacgtctaaaaacggcccctaactaacgcttagttgcccgctagattagtcccccgttagtgcctagttagacacacgacgaactaggggctagccccgggataacttcgtatagcatacattatacgaagttatgaattccggaccgggttaccgaattcctgcccttaaggccaattgttcaagattcattcaacaattgaaacatctcccatgattaaatcagtataaggttgctatggtcttgcttgacaaagtttttttttgagggaatttcaactaaatttttgagtgaaactatcaaatactgattttaaaaaatttttataaaaggaagcgcagagataaaaggccatctatgctacaaaagtacccaaaaatgtaatcctaaagtatgaattgcattttttttttgtttggacgaaaggaaaggagtattaccacaagaatgatatcatcttcatatttagatcttttttgggtaaagcttgagattctctaaatatagagaaatcagaagaaaaaaaaaccgtgttttggtggttttgatttctagcctccacaataactttgacggcgtcgacaagtctaacggacaccaagcagcgaaccaccagcgccgagccaagcgaagcagacggccgagacgttgacaccttcggcgcggcatctctcgagagttccgctccggcgctccacctccaccgctggcggtttcttattccgttccgttccgcctcctgctctgctcctctccacaccacacggcacgaaaccgttacggcaccggcagcacccagcacgggagaggggattcctttcccaccgttccttccctttccgccccgccgctataaatagccagccccatccccagcttttttccccaatctcatctcctctctcctgttgttcggagcacacgcacaatccgatcgatccccaaatccccttcgtctctcctcgcgagcctcgtggatcccagcttcaaggtacggcgatcgatcatcccccctccttctctctaccttcttttctctagactacatcggatggcgatccatggttagggcctgctagtttcccttcctgttttgtcgatggctgcgaggcacaatagatctgatggcgttatgacggctaacttgtcatgttgttgcgatttatagtccctttaggagatcagtttaatttctcggatggttcgagatcggtggtccatggttagtaccctaagatccgcgctgttagggttcgtagatggaggcgacctgttctgattgttaacttgtcagtacctgggaaatcctgggatggttctagctcgtccgcagatgagatcgatttcatgatcctctgtatcttgtttcgttgcctaggttccgtctaatctatccgtggtatgatgtagatgttttgatcgtgctaactacgtcttgtaaagttaattgtcaggtcataatttttagcatgcctttttttttgtttggttttgtctaattgggctgtcgttctagatcagagtagaagactgttccaaactacctgctggatttattgaacttggatctgtatgtgtgtcacatatcttcataaattcatgattaagatggattgaaatatcttttatctttttggtatggatagttctatatgttggtgtggctttgttagatgtatacatgcttagatacatgaagcaacgtgctgctactgtttagtaattgctgttcatttgtctaataaacagataaggatatgtatttatgttgctgttggttttgctggtactttgttggatacaaatgcttcaatacagaaaacagcatgctgctacgatttaccatttatctaatcttatcatatgtctaatctaataaacaaacatgcttttaaattatcttcatatgcttggatgatggcatacacagcggctatgtgtggttttttaaatacccagcatcatgggcatgcatgacactgctttaatatgctttttatttgcttgagactgtttcttttgtttatactgaccctttagttcggtgactcttctgcaggtcgactttaacttagcctaggatccatggcccagtccaagcacggcctgaccaaggagatgaccatgaagtaccgcatggagggctgcgtggacggccacaagttcgtgatcaccggcgagggcatcggctaccccttcaagggcaagcaggccatcaacctgtgcgtggtggagggcggccccttgcccttcgccgaggacatcttgtccgccgccttcatgtacggcaaccgcgtgttcaccgagtacccccaggacatcgtcgactacttcaagaactcctgccccgccggctacacctgggaccgctccttcctgttcgaggacggcgccgtgtgcatctgcaacgccgacatcaccgtgagcgtggaggagaactgcatgtaccacgagtccaagttctacggcgtgaacttccccgccgacggccccgtgatgaagaagatgaccgacaactgggagccctcctgcgagaagatcatccccgtgcccaagcagggcatcttgaagggcgacgtgagcatgtacctgctgctgaaggacggtggccgcttgcgctgccagttcgacaccgtgtacaaggccaagtccgtgccccgcaagatgcccgactggcacttcatccagcacaagctgacccgcgaggaccgcagcgacgccaagaaccagaagtggcacctgaccgagcacgccatcgcctccggctccgccttgccctccggactcagatctcgatagggtaccaatggccagttaacagatccagctgctgctgttctagggttcacaagtctgcctatttgtcttccccaatggagctatggttgtctggtctggtccttggtcgtgtcccgtttcattgtgtactatttacctgtaatgtgtatccttaagtctggtttgatggtgtctgaaacgttttgctgtggtagagcagcatggaagaactataatgaataagtgatccctaatcattgtgtccaaattttgcttctgctatacccttttgtgctgtttcttatgttttgcttaaaaatttgatctgacaaacaaatttgtctaaattatgctcttgttctgactgtgtactgtacacatttgtattgctaccggtttggcacatagttttctctttgattgcagatcaaacccttctgattgcagattgcttggctatggctgatgtgctcactgttcttctttagcttgtatattgctgatggtggcttggctacggctgaaaaagttgctgctgcgccgacttggcaactgttgctccagtaatgctttgtcctctcttcctagccgccgacttggcacttggcagctgttgctcctgtaatgcgttgttatctcttatctcttgagatgtactatgattttgaggctgtttgacttgtgccagattgccagtgctgatgctatattatctcaggtttttatgctagtatatgttttactgtgtgctgcctgtgtcgagttacgtaatctattgaaccgctatgcgtgttgatgccctgttgttgcttgccagattgatgcccctgttgcttgcagcttgcaagctgtagtgaaatcctaaaattcgaaaccaaatctattctgaacttttgaagatctgtgatgtccggaagaaaagattcaaacagataaacgggactctccagaatctataaaataaatgatcgacaaacgctttgctttggtaggcttcctagttagttagcggaccgaagcttcggtccgggcctagaaggccagcttcggccgcccctcggtaccctgggatctgcccttactttaacgcctctaaccaacacccctttatctttataaggaacaataaacagaatttgccccactgttctaaatcacctaataatatccccagctaaaaacaataaaggtttcctagaattaagacaagcatgactgttcctccaggagggtttggaacattgttgcagtcttgcagatacgggcgaagggtgagaaacagagcggagggctggaggtgacctcggtagtcgacgccggagttgagcttgacaacgacggggcggcccctgatggacttgaggaagtccgatggcgtcttcaccgtcccgccggcgcccgaggcgggcctgtcgctgccgccgccgccgctgctcatcttgcgcgctgtgcccccggcggtgtccctgtgttgcggatcgcgggtgggccaggtggatgcgagggcgacccgtttggactccggccggagccgccggatccctggtcggtgtcagtgccgtttactctgggccccacgtgtcagtaccgtctgtagatgacaacaacccgtcgtccacagtcatgtccaaaatatcctttcttcttttttttcgattcggatatctatcttccttttttttttccaaaaatcttcttgacgcaccagcgcgcacgtttgtggtaaacgccgacacgtcggtcccacgtcgatagaccccacccaccagtgagtagcgtgtacgtattcgggggtgacggacgtgtcgccgtcgtcttgctagtcccattcccatctgagccacacatctctgaacaaaaaaaaggagggaggcctccacgcacatccccctccgtgccacccgccccaaaccctcgcgccgcctccgagacagccgccgcaaccatggccaccgccgccgccgcgtctaccgcgctcactggcgccactaccgctgcgcccaaggcgaggcgccgggcgcacctcctggccacccgccgcgccctcgccgcgcccatcaggtgctcagcggcgtcacccgccatgccgatggctcccccggccaccccgctccggccgtggggccccaccgagccccgcaagggtgctgacatcctcgtcgagtccctcgagcgctgcggcgtccgcgacgtcttcgcctaccccggcggcgcgtccatggagatccaccaggcactcacccgctcccccgtcatcgccaaccacctcttccgccacgagcaaggggaggcctttgccgcctccggctacgcgcgctcctcgggccgcgtcggcgtctgcatcgccacctccggccccggcgccaccaacctagtctccgcgctcgccgacgcgctgctcgattccgtccccatggtcgccatcacgggacaggtggcgcgacgcatgattggcaccgacgccttccaggagacgcccatcgtcgaggtcacccgctccatcaccaagcacaactacctggtcctcgacgtcgacgacatcccccgcgtcgtgcaggaggctttcttcctcgcctcctctggtcgaccagggccggtgcttgtcgacatccccaaggacatccagcagcagatggcggtgcctgtctgggacaagcccatgagtctgcctgggtacattgcgcgccttcccaagccccctgcgactgagttgcttgagcaggtgctgcgtcttgttggtgaatcgcggcgccctgttctttatgtgggcggtggctgcgcagcatctggtgaggagttgcgacgctttgtggagctgactggaatcccggtcacaactactcttatgggcctcggcaacttccccagcgacgacccactgtctctgcgcatgctaggtatgcatgggacggtgtatgcaaattatgcagtggataaggccgatctgttgcttgcacttggtgtgcggtttgatgatcgcgtgacagggaagattgaggcttttgcaagcagggctaagattgtgcacgttgatattgatccggctgagattggcaagaacaagcagccacatgtgtccatctgtgcagatgttaagcttgctttgcagggcatgaatgctcttcttgaaggaagcacatcaaagaagagctttgactttggctcatggaacgatgagttggatcagcagaagagggaattcccccttgggtataaaacatctaatgaggagatccagccacaatatgctattcaggttcttgatgagctgacgaaaggcgaggccatcatcggcacaggtgttgggcagcaccagatgtgggcggcacagtactacacttacaagcggccaaggcagtggttgtcttcagctggtcttggggctatgggatttggtttgccggctgctgctggtgcttctgtggcaaacccaggtgtcactgttgttgacatcgatggagatggtagctttctcatgaacgttcaggagctagctatgatccgaattgagaacctcccagtgaaggtctttgtgctaaacaaccagcacctggggatggtggtgcagttggaggacaggttctataaggccaacagagcgcacacatacttgggaaacccagagaatgaaagtgagatatatccagatttcgtgacgatcgccaaagggttcaacattccagcggtccgtgtgacaaagaagaacgaagtccgcgcagcgataaagaagatgctcgagactccagggccgtacctcttggatataatcgtcccacaccaggagcatgtgttgcctatgatccctagtggtggggctttcaaggatatgatcctggatggtgatggcaggactgtgtactgactagctagtcagttaacagatcctctagtgccgtgggtcgtttaagctgccgctgtacctgtgtcgtctggtgccttctggtgtacctgggaggttgtcgtctatcaagtatctgtggttggtgtcatgagtcagtgagtcccaatactgttcgtgtcctgtgtgcattatacccaaaactgttatgggcaaatcatgaataagcttgatgttcgaacttaaaagtctctgctcaatatggtattatggttgtttttgttcgtctcctaatatttgcctgggatcaaattttattggctggtgttcatttgacctccatgttcttgctaggctccattttttactctacagccataatatgtttgattgtttggtttgttctttgttgtacacctggttctgtcgagcttagttttcgacactggcttacagcttaacatgttgctattttattgggttctgattgctattttattgggttctgattgctagtttttgctgaatccaaaaaccatgttatttatttaagcgatccaggttattattatgatggtggctaagtttttttttttccaagggtaaattttctggattctccagtgtttctgtggccgaattcaatcactagagtcgacctgcaggccggtccgggcctagaaggcccgcgccacttacgcttgattccgatgacttcgtaggttcctagctcaagccgctcgtgtccaagcgtcacttacgattagctaatgattacggcatctaggaccgactagttcttatgtgcttctagtctccaaatgtggttgatagttattttgctctaagatcaacagtaatgaagtataaatcatcgttgtggtgtgctactcggttaattgagcattaacacacacaaacatgacgaggatggtataatctccaaaaatgtgtactttgttaggtgggaccctatagccttgattaatgtgctatgttaggcatgcctggaaacgtgtgacgcatatgttttgtgaacctgttgatattatatgtgcttttatattaccatattttattaaaatactaatatttattactagtaagatataacattctatctagcttaaaaactaaccataaatattccataataactagatttaccaaactaatatactaaatatacataataaatacaaaattaacaagacaataatcaatatttatgagcttaatatatttagacattatggttggtcgacgataatcatgctaacttttcgtaattgcttgattgaaatatgcttagaataatgcctctttgttctacatggcaaatagggaccattatggtgtaacaccctgggaaccacaaacaccccgaaatgctactaaactacacaactaaccttcatatataaaatttcgacagcatctcctttgaaaatttgcatagacgtggaagcaacagagtataaacagatctgcgtttaaacgtgcaagcgctactagacaattcagtacattaaaaacgtccgcaatgtgttattaagttgtctaagcgtcaatttgtttacaccacaatatatcctgcca

SEQ ID NO: 81 - DNA, 23834 bp, synthetic construct
  misc_feature 1..23834: note = PHP97458
  source 1..23834: mol_type = other DNA
gtttacccgccaatatatcctgtcaaacactgatagtttaaactgaaggcgggaaacgacaatctgatcatgagcggagaattaagggagtcacgttatgacccccgccgatgacgcgggacaagccgttttacgtttggaactgacagaaccgcaacgttgaaggagccactcagcaagctggtacgattgtaatacgactcactatagggcgaattgagcgctgtttaaacgctcttcaactggaagagcggttacgctgtttaaacgctcttcaactggaagagcggttactaccggttcactagctagctgctaatcgagctagttaccctatgaggtgacatgaagcgctcacggttactatgacggttagcttcacgactgttggtggcagtagcgtacgacttagctatagttccggacttacccttaagcgatttaaatctgcggttaccgaattcgagctcggtacctagtacccttgtacttttggtttcacctgcatagagaaaacccacaagaatatgacagtctgatttgtcagtctcattctcaagcaacatttctctatccgttactttcatggtgaataacacaatccatcatcaatactttgtgttactcagaaactgaaagttattccgagtcttgcatatctttggacctactcgtttttctaccattattgctgattgttaagctctcgctacttgaatcggcattgttggagtgggaaggttcaaaaaattggagttatgactagttgtctctttctatgtacgatggagaaaatgaataaacaactgagaaaatggctcttgtttagttgatgatgctcttaagctttccactggttgccatatatgatttgggcatttcactttgatcttaatgggccttgtaaagcccaagactcatgattatctttagttgatgctcttaattaggtgtgggcaaataattcaaactgtatgtacccgaccaaaaccaaagcaaaaataatcgaaccaaaccgaaaatttaaaaataaccgaatgaaaactaaatcctataactgaaagaactgaaaccgaatcaaaatatttaatgtaaccaaaaatatccgaaatataattatattgtcaaaaatattaataatttctagattaaataattaaaaatacttaaaaatttatataaaatagtaaaaatactcgaaaataaccacaaatattcaaaaacaaccgaaatatcccaaaatattcaaagcaaaataaccgaatggataccaaattttaaaaccgaaaaaactggaacaaaaccaaaatcgaaccaaaatttcaaaaatcgaataaatactaaactttagaacaaaaaaaaacgataaccgaatgtatacgaaccaaagccgaattagataaccgaacgtccaggactactcttaatctttccgccacttatgatttgggctattactttgtttataatgagccttttcaagctcaagttcatgattgtccgtgagatgagaaactgacttgttggattcgaaaccctagctagtattggttaatacttaatacataaatgacctgcattgacatcatcatccaagaaaataaaaattgtatgcttgagatatttagttttcctagctaggttttctttattttagtaccgaatctttaggtgtgccacgttaatttagacccattttttcatacttaccaactgagtctagtttaatcatgactataatcgtataaaatgattcagtcgacgtcattgcgaacgtatataaaatcatccaaattgacgtcattccaaagaggtaagcatgcttatctaagagtccgagcatactaaacaagacgacattttatttgcactccaaatcaaattttgtattgcctaaagaaaaacaatcaaactcaagtttcttaaaattaatttcattcaaactaatcactttcaatatctcacatattattcatgccatttctatttgtctaaacatgatttaaaaaaaaaagtaaaatacaaagattactatgcaaaaactctataaaaaaaaattcaaatttcttatttatttgtgacatcaaattttcaaaataatttttttaattatcggttgatccggtcagtcgataaaaacataaactttcagcgaccgttaaaactttcctactaccgatttagagaaaatcttagcttgaaacgtaattgtaacctgccttcatgcaagtcgcaagatatgtcatcctaagttgtatatgttttctcaaaagatgtatttacttgagaaaatacgtttcaacgttgatggacaaccaattaagaatcaagcacctttcgtaatcaatttaggcttatcgtctaaggtatactgatttacgacagttgactagacttataaggaacaaaataatagaatagtttctaaacacttcacctaatcatagagactaagatggtaattcgtaaacgacaaagcctagtgacactgtccattgtaaaattccacatcatattagtattaaacatatacatgtagtttcctgaacacatgtagtatcaaacacacttcgtggcttcttcctcgaaacctgcggccgcgctatagttccggacttacccttaagataacttcgtatagcatacattatacgaagttatgggcccacgcgtgaagagcggttaccagagctggtcacctttgtccaccaagatggaactgtcttcggccagaatggccatctggattcagcaggcctagaaggccatttatcgctatcaactttgtatagaaaagttgggccgaattcgagctcggtacggccagaatggcccggaccgaagcttgtgaatttatgagagctgtacttactcactaaaacaaacaaacactgatagtttaaactgaaggcgggaaacgacaatctgatcatgagcggagaattaagggagtcacgttatgacccccgccgatgacgcgggacaagccgttttacgtttggaactgacagaaccgcaacgattgaaggagccactcagccgcgggtttctggagtttaatgagctaagcacatacgtcagaaaccattattgcgcgttcaaaagtcgcctaaggtcactatcagctagcaaatatttcttgtcaaaaatgctccactgacgttccataaattcccctcggtatccaattagagtctcatattcactccccgggggatctcgactctagaggatcgctcaggaaggccgctgagatagaggcatggcggccaatgcgggcggcggtggagcgggaggaggcagcggcagcggcagcgtggctgcgccggcggtgtgccgccccagcggctcgcggtggacgccgacgccggagcagatcaggatgctgaaggagctctactacggctgcggcatccggtcgcccagctcggagcagatccagcgcatcaccgccatgctgcggcagcacggcaagatcgagggcaagaacgtcttctactggttccagaaccacaaggcccgcgagcgccagaagcgccgcctcaccagcctcgacgtcaacgtgcccgccgccggcgcggccgacgccaccaccagccaactcggcgtcctctcgctgtcgtcgccgccgccttcaggcgcggcgcctccctcgcccaccctcggcttctacgccgccggcaatggcggcggatcggctgtgctgctggacacgagttccgactggggcagcagcggcgctgccatggccaccgagacatgcttcctgcaggactacatgggcgtgacggacacgggcagctcgtcgcagtggccacgcttctcgtcgtcggacacgataatggcggcggccgcggcgcgggcggcgacgacgcgggcgcccgagacgctccctctcttcccgacctgcggcgacgacggcggcagcggtagcagcagctacttgccgttctggggtgccgcgtccacaactgccggcgccacttcttccgttgcgatccagcagcaacaccagctgcaggagcagtacagcttttacagcaacagcaacagcacccagctggccggcaccggcaaccaagacgtatcggcaacagcagcagcagccgccgccctggagctgagcctcagctcatggtgctccccttaccctgctgcagggagtatgtgagagcaacgcgagctgccactgctcttcactgatgtctctggaatggaaggaggaggaagtgagcatagcgttggtgcgttgctgtcaagggcgaattcacatggttaacctagacttgtccatcttctggattggccaacttaattaatgtatgaaataaaaggatgcacacatagtgacatgctaatcactataatgtgggcatcaaagttgtgtgttatgtgtaattactagttatctgaataaaagagaaagagatcatccatatttcttatcctaaatgaatgtcacgtgtctttataattctttgatgaaccagatgcatttcattaaccaaatccatatacatataaatattaatcatatataattaatatcaattgggttagcaaaacaaatctagtctaggtgtgttttgcgaatgcggccgccaccggtcaccacgcgtggaccgaagcttgcatgcctgcagtgcagcgtgacccggtcgtgcccctctctagagataatgagcattgcatgtctaagttataaaaaattaccacatattttttttgtcacacttgtttgaagtgcagtttatctatctttatacatatatttaaactttactctacgaataatataatctatagtactacaataatatcagtgttttagagaatcatataaatgaacagttagacatggtctaaaggacaattgagtattttgacaacaggactctacagttttatctttttagtgtgcatgtgttctcctttttttttgcaaatagcttcacctatataatacttcatccattttattagtacatccatttagggtttagggttaatggtttttatagactaatttttttagtacatctattttattctattttagcctctaaattaagaaaactaaaactctattttagtttttttatttaataatttagatataaaatagaataaaataaagtgactaaaaattaaacaaataccctttaagaaattaaaaaaactaaggaaacatttttcttgtttcgagtagataatgccagcctgttaaacgccgtcgacgagtctaacggacaccaaccagcgaaccagcagcgtcgcgtcgggccaagcgaagcagacggcacggcatctctgtcgctgcctctggacccctctcgagagttccgctccaccgttggacttgctccgctgtcggcatccagaaattgcgtggcggagcggcagacgtgagccggcacggcaggcggcctcctcctcctctcacggcaccggcagctacgggggattcctttcccaccgctccttcgcacgtaagcgcttacgcaccgaacaacgtaagcgcttacgcaccgaacaacgtaagcgcttacgctttcccttcctcgcccgccgtaataaatagacaccccctccacaccctctttccccaacctcgtgttgttcggagcgcacacacacacaaccagatctcccccaaatccacccgtcggcacctccgcttcaaggtacgccgctcgtcctcccccccccccctctctaccttctctagatcggcgttccggtccatgcatggttagggcccggtagttctacttctgttcatgtttgtgttagatccgtgtttgtgttagatccgtgctgctagcgttcgtacacggatgcgacctgtacgtcagacacgttctgattgctaacttgccagtgtttctctttggggaatcctgggatggctctagccgttccgcagacgggatcgatttcatgattttttttgtttcgttgcatagggtttggtttgcccttttcctttatttcaatatatgccgtgcacttgtttgtcgggtcatcttttcatgcttttttttgtcttggttgtgatgatgtggtctggttgggcggtcgttctagatcggagtagaattctgtttcaaactacctggtggatttattaattttggatctgtatgtgtgtgccatacatattcatagttacgaattgaagatgatggatggaaatatcgatctaggataggtatacatgttgatgcgggttttactgatgcatatacagagatgctttttgttcgcttggttgtgatgatgtggtgtggttgggcggtcgttcattcgttctagatcggagtagaatactgtttcaaactacctggtgtatttattaattttggaactgtatgtgtgtgtcatacatcttcatagttacgagtttaagatggatggaaatatcgatctaggataggtatacatgttgatgtgggttttactgatgcatatacatgatggcatatgcagcatctattcatatgctctaaccttgagtacctatctattataataaacaagtatgttttataattattttgatcttgatatacttggatgatggcatatgcagcagctatatgtggatttttttagccctgccttcatacgctatttatttgcttggtactgtttcttttgtcgatgctcaccctgttgtttggtgttacttctgcaggtcgactttaacttagcctaggatccatggccactgtgaacaactggctcgctttctccctctccccgcaggagctgccgccctcccagacgacggactccacactcatctcggccgccaccgccgaccatgtctccggcgatgtctgcttcaacatcccccaagattggagcatgaggggatcagagctttcggcgctcgtcgcggagccgaagctggaggacttcctcggcggcatctccttctccgagcagcatcacaaggccaactgcaacatgatacccagcactagcagcacagtttgctacgcgagctcaggtgctagcaccggctaccatcaccagctgtaccaccagcccaccagctcagcgctccacttcgcggactccgtaatggtggcttcctcggccggtgtccacgacggcggtgccatgctcagcgcggccgccgctaacggtgtcgctggcgctgccagtgccaacggcggcggcatcgggctgtccatgattaagaactggctgcggagccaaccggcgcccatgcagccgagggtggcggcggctgagggcgcgcaggggctctctttgtccatgaacatggcggggacgacccaaggcgctgctggcatgccacttctcgctggagagcgcgcacgggcgcccgagagtgtatcgacgtcagcacagggtggagccgtcgtcgtcacggcgccgaaggaggatagcggtggcagcggtgttgccggcgctctagtagccgtgagcacggacacgggtggcagcggcggcgcgtcggctgacaacacggcaaggaagacggtggacacgttcgggcagcgcacgtcgatttaccgtggcgtgacaaggcatagatggactgggagatatgaggcacatctttgggataacagttgcagaagggaagggcaaactcgtaagggtcgtcaagtctatttaggtggctatgataaagaggagaaagctgctagggcttatgatcttgctgctctgaagtactggggtgccacaacaacaacaaattttccagtgagtaactacgaaaaggagctcgaggacatgaagcacatgacaaggcaggagtttgtagcgtctctgagaaggaagagcagtggtttctccagaggtgcatccatttacaggggagtgactaggcatcaccaacatggaagatggcaagcacggattggacgagttgcagggaacaaggatctttacttgggcaccttcagcacccaggaggaggcagcggaggcgtacgacatcgcggcgatcaagttccgcggcctcaacgccgtcaccaacttcgacatgagccgctacgacgtgaagagcatcctggacagcagcgccctccccatcggcagcgccgccaagcgcctcaaggaggccgaggccgcagcgtccgcgcagcaccaccacgccggcgtggtgagctacgacgtcggccgcatcgcctcgcagctcggcgacggcggagccctggcggcggcgtacggcgcgcactaccacggcgccgcctggccgaccatcgcgttccagccgggcgccgccagcacaggcctgtaccacccgtacgcgcagcagccaatgcgcggcggcgggtggtgcaagcaggagcaggaccacgcggtgatcgcggccgcgcacagcctgcaggacctccaccacctgaacctgggcgcggccggcgcgcacgactttttctcggcagggcagcaggccgccgccgctgcgatgcacggcctgggtagcatcgacagtgcgtcgctcgagcacagcaccggctccaactccgtcgtctacaacggcggggtcggcgacagcaacggcgccagcgccgtcggcggcagtggcggtggctacatgatgccgatgagcgctgccggagcaaccactacatcggcaatggtgagccacgagcaggtgcatgcacgggcctacgacgaagccaagcaggctgctcagatggggtacgagagctacctggtgaacgcggagaacaatggtggcggaaggatgtctgcatgggggactgtcgtgtctgcagccgcggcggcagcagcaagcagcaacgacaacatggccgccgacgtcgggcatggcggcgcgcagctcttcagtgtctggaacgacacttaagcgtacctagtggtacctgacatcttatagtctgcaacctctcgtgtctgaattcctatctttatcaagtgttattgcttccacgactataggacagctttcgtcgaaagcttttgctcatgtgatctcgaaggattcatctagtctgatttttcgtgacttgtatcggttttattggattcatccaacatatatcaataaaaaatgagttgtgtttcctttcttcctagttcagttaaaattatttccctcctgcgcttgtgctgtaattgtctgtgtacctgttgtttgtgactgtgttagttcccttggatatgatttcgtatttgatatgtacatggagatagcttagcttcattattggagtatgaagttagtatgacatagtcactctcctggaaaattgacactgcaaaccatatttttattctgaaccacaaatcctagtcagtccgctggcatatgccgtccgtttgctgaatccagaacgtgggtttggagatgtacggctgagatgcctctatgcgaaggggatttcgtggtgaaacgagatgggagtagagcaacgcccgtggaagatgcttcaaacttccacacttttgagcaacgatcggcagtagtaaggtagacgatttcaagatcaaagcatatgaagataaacaacatcaacaacaaaatttgttggggttctatagagagaaacagagctacatacatacactgttttgtatctaccatctgagatgatgaaaagatgaaaaactaaagaatgccccggcgccaacgccaggacacgccgcgcgcgcgtcacccgagccatctcttgacccagccggcgctgtatatttacacacgttgcagcatcgatcaccacctgttcgatcgcgtcgccgtcaccggcgcgccgcgacttattgaactagtctagggcgcggctaacaacctagcttagattgccttgtctaaacccttaggctaacgcgccactctagaaggccgatctcccccgaacgcgccagatcttgaagaaactatgtgctgtagtatagccgctgcccgctggctagctagctagttgagtcatttagcggcgatgattgagtaataatgtgtcacgcatcaccatgcatgggtggcagtgtcagtgtgagcaatgacctgaatgaacaattgaaatgaaaagaaaaaagtattgttccaaattaaacgttttaaccttttaataggtttatacaataattgatatatgttttctgtatatgtctaatttgttatcatccatttagatatagacaaaaaaaatctaagaactaaaacaaatgctaatttgaaatgaagggagtatatattgggataatgtcgatgagatccctcgtaatatcaccgacatcacacgtgtccagttaatgtatcagtgatacgtgtattcacatttgttgcgcgtaggcgtacccaacaattttgatcgactatcagaaagtcaacggaagcgagtcgacctcgagggggggccccggccgaagcttcggccggggcccatcgataacgagtatcggtccccattgacacatctactcctaacgctaacaacattcttcacttctagtgtatggcatcgacaattggtactttaatcttgggtcttcacttttacaactaaacaacccaaatataaatattatttgagtgggtttggtgttcatcagaacattcccatctttggtaatgctacctagcataaaagtgagctatcacgttgggcagcccattccatgcaatttttaccttcctcaaaaaaaatctttgatatatttatggtataataatttaaacttcacattgatcataattttttcagcaaataagttccataatttggtgtttgcaatatcgaaattgttactcatagggtccagttgatttaatgacattagtgttgttaagttcacatgcttcaaagaattctacatgtctacaatgctgcatttgtctgtaaaatttgggttcttgtaaaaaatacatgtgttgaatatttaccaaaaaaatataatgcgatatgactttgtgtgagcatgtttggacacagttacaagtttacttctaaacttatattatgttttgcttcgtgcaagtacaagtgatttgaatatccaaggccaaagcatgtgtccatcactatatcaaatcaacataccatatatgtatatactcaacaaaaagcacaaataatcacatctatgttataaacacacccccacacaaccaaacattaacattcaataggttgtgctaggacatcattgggatgatgaagtaatattgtattatctatgtattgaccaagcatgagtttaaaattacgatttgatgttttcagttatttatatgatgaacatagttcagaaatatatcgagataaatctcaatcaatatattgattatttctaggaaacacatgccggtatgagggcaccattgtcgagtacatcttaagtgagttaacggatcctctagagtcgacctgcaggcatgcccgcggatatcgatgggccccggccgaagcttcaagtttgtacaaaaaagcaggctccggccagaatggcccggaccgggttaccgaattcgagctcggtaccctgggatccgatatcgatgggccctggccgaagcttggtcacccggtccgggcctagaaggccgatctcccgggcacccagctttcttgtacaaagtggccgttaacggatcggccagaatggcccggaccgggttaccgaattcgagctcggtaccctggttcacaaactcaatacaacacacagtggagtagggtattacgctccggcggcccgaaccactctaaatccttgtgtcctcgtgtgctcttccaccattaatgactgtaattgcagggacacgaagagttgtagcgcttttgccaacaagatccgctatatgctagtagagtggaacctgcacagcaacaagcatccaataatctgagaataagaattatgtgtggtgatggttctcatctctgcaactcgccattttcgcgagagaaccaaatccaagttggtgaagatcatgatttgggctcatgggctggcatagtagctattacctttgcaattgtggttcgaatctatccgatattctccttttcagggagagctaatgcttatgcttattgggtattttggtttgacactgcttcacgcccaaaaaaaggcaactatgtctgagttggatatggcccaaaaaaaggcagctatgtctgagttggatatggaagtcttctttcgtttagggtgaagtaagaccaagctcatgagcttattatcttaggtcggaacaaattagttgataggcatggcacatttatcaaattataatgattttaacagaaaagcaacacctctttttcagcagcaccagctttgcaagctgcaattgacactccaagcatagtatttgctccaaactcagcctgcatttcgcacaatatcatatctatttccatttggataaaatatattttccagaaatatgggaacagaatcaagatacagaaaaaagttgtggtagtagtggtaagtggaaacacaagtacagtgaaaagatagcattatttctgaacagtcaaattaaccgaaataagtagtatcacatactgcccctaaattgactacacccaatgtaaagaattgcttgagcatattgagccatcagttgtttgtttgtgtaacggatttgacaatgcagagttcaggagcaaaaaaccgcaaaggagagaaagagggaaaggatctcctagtatcccaccttgtggcgcgccctgtcaagtgcatgatggcctggtcgatctgcgtctgctgctgcggttccatcccaacgagtgcctccgacaccttgtcgttgatcacccgcaccgcgtaggcgacccccctggcgaggaacttccgcctctcggaggccccggccgcgtcggcggcggcgccctcgagcgcgcccacgctagccgtagatgctcggtgcacggccttgttggtgtgcaactcgacctcaacggccggtgcgctacgcccgtcaaggatctggcgcgcccgcaccctcgtgatcacggtgggcgcctcccgcctcatgtggccgacgatgaaaagcgccgggttaggggccttggcgcgcaccgccgtattcagggcctcctcgctcttgcgcgagagcaggtgcttccccaggtactcctgcactgacaaggctgccacagcggtggaatttgtcctcacgacttcgccacgtcgtcctcacctccctggcttcccacgactccgccgtatcgaggtgctcggtgggtcgtcttaatccgaagtccgaactaggaagacgagacagagaggtctgaggaatgggcctcgtttgatgttgagctgaattatttttccagcataagcccaggtcttggtccatgaacaaaattactagaaacccagcccagtactacgatctaaaagagggactgccactggatagctctctctagcattctccacgctccaatacagcggcgtcgtgtctatccgggtctatccgcgaacacgtgagaactctccagaaactgctttctcctccacttcatctctctcgctttccctctataaaaagaccccttctaggaattgagggagacagcaagcaccaagcagcgatccgaagctcaatcaattcactcaaacctcttccccaaatcttcgattagatcttcgttgacaagaagactagaaccgaacctgacatgtccaacctgctcacggttcaccagaaccttccggctcttccagtggacgcgacgtccgatgaagtcaggaagaacctcatggacatgttccgcgacaggcaagcgttcagcgagcacacctggaagatgctgctctccgtctgccgctcctgggctgcatggtgcaagctgaacaacaggaagtggttccccgctgagcccgaggacgtgagggattaccttctgtacctgcaagcgcgaggtttgtttctgcttctacctttgatatatatataataattatcattaattagtagtaatataatatttcaaatatttttttcaaaataaaagaatgtagtatatagcaattgcttttctgtagtttataagtgtgtatattttaatttataacttttctaatatatgaccaaaacatggtgatgcctaggtctggcagtgaagaccatccagcaacaccttggacaactgaacatgcttcacaggcgctccggcctcccgcgccccagcgactcgaacgccgtgagcctcgtcatgcgccgcatcaggaaggaaaacgtcgatgccggcgaaagggcaaagcaggccctcgcgttcgagaggaccgatttcgaccaggtccgcagcctgatggagaacagcgacaggtgccaggacattaggaacctggcgttcctcggaattgcatacaacacgctcctcaggatcgcggaaattgcccgcattcgcgtgaaggacattagccgcaccgacggcggcaggatgcttatccacattggcaggaccaagacgctcgtttccaccgcaggcgtcgaaaaggccctcagcctcggagtgaccaagctcgtcgaacgctggatctccgtgtccggcgtcgcggacgacccaaacaactacctcttctgccgcgtccgcaagaacggggtggctgcccctagcgccaccagccaactcagcacgagggccttggaaggtattttcgaggccacccaccgcctgatctacggcgcgaaggatgacagcggtcaacgctacctcgcatggtccgggcactccgcccgcgttggagctgctagggacatggcccgcgccggtgtttccatccccgaaatcatgcaggcgggtggatggacgaacgtgaacattgtcatgaactacattcgcaaccttgacagcgagacgggcgcaatggttcgcctcctggaagatggtgactgaggtacccaacctagacttgtccatcttctggattggccaacttaattaatgtatgaaataaaaggatgcacacatagtgacatgctaatcactataatgtgggcatcaaagttgtgtgttatgtgtaattactagttatctgaataaaagagaaagagatcatccatatttcttatcctaaatgaatgtcacgtgtctttataattctttgatgaaccagatgcatttcattaaccaaatccatatacatataaatattaatcatatataattaatatcaattgggttagcaaaacaaatctagtctaggtgtgttttgcgatccgatatcgaattggccacggtaccagctgctgctgttctagggttcacaagtctgcctatttgtcttccccaatggagctatggttgtctggtctggtccttggtcgtgtcccgtttcattgtgtactatttacctgtaatgtgtatccttaagtctggtttgatggtgtctgaaacgttttgctgtggtagagcagcatggaagaactataatgaataagtgatccctaatcattgtgtccaaattttgcttctgctatacccttttgtgctgtttcttatgttttgcttaaaaatttgatctgacaaacaaatttgtctaaattatgctcttgttctgactgtgtactgtacacatttgtattgctaccggtttggcacatagttttctctttgattgcagatcaaacccttctgattgcagattgcttggctatggctgatgtgctcactgttcttctttagcttgtatattgctgatggtggcttggctacggctgaaaaagttgctgctgcgccgacttggcaactgttgctccagtaatgctttgtcctctcttcctagccgccgacttggcacttggcagctgttgctcctgtaatgcgttgttatctcttatctcttgagatgtactatgattttgaggctgtttgacttgtgccagattgccagtgctgatgctatattatctcaggtttttatgctagtatatgttttactgtgtgctgcctgtgtcgagttacgtaatctattgaaccgctatgcgtgttgatgccctgttgttgcttgccagattgatgcccctgttgcttgcagcttgcaagctgtagtgaaatcctaaaattccaaaccaaatctattctgaacttttgaagatctgtgatgtccggaagaaaagattcaaacagataaacgggactctccagaatctataaaataaatgatcgacaaacgctttgctttggtaggcttcaagcttggtcacccggtccgggcctagaaggccagcttcggccgccccgggcaactttattatacaaagttgatagataaatcagatatctggttcctaaggacccggcggaccgattaaactgattcggtccgacgcgttacctaataacttcgtatagcatacattatacgaagttattagctaactaactagtaagcttaagccatgggtcgacggatccgttaactagcgtggcatttggcaccgccgcacactatgcgagctaggagtgctagtttacagatgaaactatgaaaccaagaaaacacaattgtccgtagctagcgcgtggcgtcgtgtcaagcttcacacagtatcttcgttcttcactataaatcgcgcctgttgttcgtgagacccaccaccgtggataacagtcccctaataataagcgatcaacagcactgctgatggctgaacaccgaggcgccgccgcgcgtaaccatccgccggagcagcccgtcgtgccggcgaacgacgccttccccgaccgcgcccagcagctctgcctcgacgccgggcgcgcgctcgcgatgtgcggcgtgctcgtcgccgtccctcccgcattttacgcgtcgacgtcgcggacgacaccgcacttgccttcgtcggcttcgtcctctggatcatcggtgcgtggctgtgcctcctggcgctcacgcccttggctccacgggcggtgagggcgggcggggccgccgccagcaccttgctgatcaggtgcctgtccctttcatgaactactagcgcccgcgcccgcggccgccgggcacaagagaacacatcgatgttcgctgcgtacgtcagcaataaggcactctttgtcagtagtcgagtgcatatgttgggtgtttgccctgggagatttcaagtgttgtggccattatcccgcaggataaaaaatcggcggcttttggattgatacggaaaataacgatgtttcatgctcgtgttgtgtgtgtgacatcttgtcagccaagtttttaaccgttgctactccccctctgtgggctcagtgtgtggaccggaatacgtcgtacataggccgtagcctaagcccaatatgccgtttttcaggttggcctgtgtgacgacaagcgggtctcaaaagcccatcacgcaactggcctgcaattattggaggagagcgcgtcgagttggttccagaggctgcgtggtggggccggactctgcgacgacctctcgttcgcgtccgatttggttgccgtgagccgtgacgtaacgcctccttccgttcctccctatataagttccacccccgggtccggtttccccaagccccagtgacccccgatcccgatcgcgaaatctccgcacccgccggcaagggaccgaagcaagcctctctcccgaccgtcgcatcaaggtacgcgtccgctcgatctgtcctcttccttctcgatttgacttgctgtggtgcccgatcacgggatcagaatcgcaccagtgtagatttcgcatgttctaagatgtgttagtttccaggctaatccagttctcttgacgcccgatccgatcgagctccgtgtttatttcagcctaatcgtagtattcccctaaaatttcctcattagggggttcgcaagattgttggtcgacaggttcacttatgctcgatcgcttacttttagtcgattcatgctgcgtactattgttgccccccgtggttttatcttttctcgtgtgaaatccagtagatatagtagatatcgtagcattaggttttaattcaatcgattgattattgtatcatcaaaattgagaagttcgaatcatgcctatcatgctgcctcaaccgaaatcctgtatattgaagtttcaattcaattgattgatcattcattagattcaaccaaaatctagaaggttagatgacgcatgtcatgctgcctgcgtagtttacctttgatctgtttatgattaccttatcagtaggatatttgtgattttgggaagtagcactaactgattcatgctgacatgatgttccctttcagattatactgttgagtcctatctaattgatgctttgtatgctatatgaatacgtcatggtaaattagcagttaattagcatattagcaattgggcgtacctcatcaggattgctcttgtagatgtgtgtggtgatgtttcttgttcaattcatgttctgctttaaaagtatgtgttctctgtttgttaattaagattcatggttataatgatttggacctaattaatcagggttgcccttttagatgcgtggttacttgttgagttcatttttttcctgctatagttgtatgcgtttgttcattcatggttagatttgatttgtttcttctctattccatgccttccatatacttcaattgtagcttaacatgagatttctgtatatgcaggtcgaccgccggggatccacacgacaccatggcccagtccaagcacggcctgaccaaggagatgaccatgaagtaccgcatggagggctgcgtggacggccacaagttcgtgatcaccggcgagggcatcggctaccccttcaagggcaagcaggccatcaacctgtgcgtggtggagggcggccccttgcccttcgccgaggacatcttgtccgccgccttcatgtacggcaaccgcgtgttcaccgagtacccccaggacatcgtcgactacttcaagaactcctgccccgccggctacacctgggaccgctccttcctgttcgaggacggcgccgtgtgcatctgcaacgccgacatcaccgtgagcgtggaggagaactgcatgtaccacgagtccaagttctacggcgtgaacttccccgccgacggccccgtgatgaagaagatgaccgacaactgggagccctcctgcgagaagatcatccccgtgcccaagcagggcatcttgaagggcgacgtgagcatgtacctgctgctgaaggacggtggccgcttgcgctgccagttcgacaccgtgtacaaggccaagtccgtgccccgcaagatgcccgactggcacttcatccagcacaagctgacccgcgaggaccgcagcgacgccaagaaccagaagtggcacctgaccgagcacgccatcgcctccggctccgccttgccctccggactcagatctcgatagagtcaacctagacttgtccatcttctggattggccaacttaattaatgtatgaaataaaaggatgcacacatagtgacatgctaatcactataatgtgggcatcaaagttgtgtgttatgtgtaattactagttatctgaataaaagagaaagagatcatccatatttcttatcctaaatgaatgtcacgtgtctttataattctttgatgaaccagatgcatttcattaaccaaatccatatacatataaatattaatcatatataattaatatcaattgggttagcaaaacaaatctagtctaggtgtgttttgcgaattgcggcgcccttactttaacgcctctaaccaacacccctttatctttataaggaacaataaacagaatttgccccactgttctaaatcacctaataatatccccagctaaaaacaataaaggtttcctagaattaagacaagcatgactgttcctccaggagggtttggaacattgttgcagtcttgcagatacgggcgaagggtgagaaacagagcggagggctggaggtgacctcggtagtcgacgccggagttgagcttgacaacgacggggcggcccctgatggacttgaggaagtccgatggcgtcttcaccgtcccgccggcgcccgaggcgggcctgtcgctgccgccgccgccgctgctcatcttgcgcgctgtgcccccggcggtgtccctgtgttgcggatcgcgggtgggccaggtggatgcgagggcgacccgtttggactccggccggagccgccggatccctggtcggtgtcagtgccgtttactctgggccccacgtgtcagtaccgtctgtagatgacaacaacccgtcgtccacagtcatgtccaaaatatcctttcttcttttttttcgattcggatatctatcttccttttttttttccaaaaatcttcttgacgcaccagcgcgcacgtttgtggtaaacgccgacacgtcggtcccacgtcgatagaccccacccaccagtgagtagcgtgtacgtattcgggggtgacggacgtgtcgccgtcgtcttgctagtcccattcccatctgagccacacatctctgaacaaaaaaaaggagggaggcctccacgcacatccccctccgtgccacccgccccaaaccctcgcgccgcctccgagacagccgccgcaaccatggccaccgccgccgccgcgtctaccgcgctcactggcgccactaccgctgcgcccaaggcgaggcgccgggcgcacctcctggccacccgccgcgccctcgccgcgcccatcaggtgctcagcggcgtcacccgccatgccgatggctcccccggccaccccgctccggccgtggggccccaccgagccccgcaagggtgctgacatcctcgtcgagtccctcgagcgctgcggcgtccgcgacgtcttcgcctaccccggcggcgcgtccatggagatccaccaggcactcacccgctcccccgtcatcgccaaccacctcttccgccacgagcaaggggaggcctttgccgcctccggctacgcgcgctcctcgggccgcgtcggcgtctgcatcgccacctccggccccggcgccaccaacctagtctccgcgctcgccgacgcgctgctcgattccgtccccatggtcgccatcacgggacaggtggcgcgacgcatgattggcaccgacgccttccaggagacgcccatcgtcgaggtcacccgctccatcaccaagcacaactacctggtcctcgacgtcgacgacatcccccgcgtcgtgcaggaggctttcttcctcgcctcctctggtcgaccagggccggtgcttgtcgacatccccaaggacatccagcagcagatggcggtgcctgtctgggacaagcccatgagtctgcctgggtacattgcgcgccttcccaagccccctgcgactgagttgcttgagcaggtgctgcgtcttgttggtgaatcgcggcgccctgttctttatgtgggcggtggctgcgcagcatctggtgaggagttgcgacgctttgtggagctgactggaatcccggtcacaactactcttatgggcctcggcaacttccccagcgacgacccactgtctctgcgcatgctaggtatgcatgggacggtgtatgcaaattatgcagtggataaggccgatctgttgcttgcacttggtgtgcggtttgatgatcgcgtgacagggaagattgaggcttttgcaagcagggctaagattgtgcacgttgatattgatccggctgagattggcaagaacaagcagccacatgtgtccatctgtgcagatgttaagcttgctttgcagggcatgaatgctcttcttgaaggaagcacatcaaagaagagctttgactttggctcatggaacgatgagttggatcagcagaagagggaattcccccttgggtataaaacatctaatgaggagatccagccacaatatgctattcaggttcttgatgagctgacgaaaggcgaggccatcatcggcacaggtgttgggcagcaccagatgtgggcggcacagtactacacttacaagcggccaaggcagtggttgtcttcagctggtcttggggctatgggatttggtttgccggctgctgctggtgcttctgtggcaaacccaggtgtcactgttgttgacatcgatggagatggtagctttctcatgaacgttcaggagctagctatgatccgaattgagaacctcccagtgaaggtctttgtgctaaacaaccagcacctggggatggtggtgcagttggaggacaggttctataaggccaacagagcgcacacatacttgggaaacccagagaatgaaagtgagatatatccagatttcgtgacgatcgccaaagggttcaacattccagcggtccgtgtgacaaagaagaacgaagtccgcgcagcgataaagaagatgctcgagactccagggccgtacctcttggatataatcgtcccacaccaggagcatgtgttgcctatgatccctagtggtggggctttcaaggatatgatcctggatggtgatggcaggactgtgtactgactagctagtcagttaacagatctgccagatcctcggtgtacaaataacccgtcttatcctatgagacgggccggcgtcagtgtgttctggaggaatttttatgtcagagcctttttctttgtgtgcttgatgtagatgccaagggaagcttattggctgttgaagcttgatgcaaaataaattatggaactctgttttttgtttatctaataataactagcaaatatgcttccattgcattgaaactaacagccttttgtgtttccaagttttattttgtgacaatgtcatctatttcaattagttgtggaatcggaaacttgcaggactaacttggaaactccaatccctcagcatcctggactttttcctggtgtaatccatgtagatattattttaatcatcattttagttctggaggtttttccatctccggttttgctcccctttcttcaaaaaaaaaaaaaaaatgccgtaggcgccgcaacgcccacctgttgttcaaactcatgggcacgagtggctcgaagattttatacaacaattgctgtagtttcaccgttgctggtgaagaagcatttttttaaaaaaatatagtggtattcattttaattagtttagttgtgcagcgagcaaaatttggacatgctctgctcggaatctgatcgacctagacacagattagcagcagtagctttgtcatctgttccaagagttgcgatctgatagaagaaaaaaaaaccttcccttcaatgtaaaaccgaaactaacaagaaagaagcacagtgccgtttaggcaagtatggagtacgtattaagcatgtagaaggccatgcatgaaccactaacaagaaagaagcgcagtgccattcaggcaagcataagcatgtagattggcatgcatgaacaactaacagtagatcgtctctggtctgattagaagttttttgggaagccaagaaatcatgtacaactggttccatctcaaattccgtggcaaaaagaggcctaagcaacatacctcgagtagatcacattcaagcttggtcacccggtccgtcaatattctgattccgatgacttcgtaggttcctagctcaagccgctcgtgtccaagcgtcacttacgattagctaatgattacggcatctaggaccgactagtggcgcgccgactagctagctaaggtaccgagctcgaattcattccgattaatcgtggcctcttgctcttcaggatgaagagctatgtttaaacgtgcaagcgctactagacaattcagtacattaaaaacgtccgcaatgtgttattaagttgtctaagcgtcaatttgtttacaccacaatatatcctgcca

SEQ ID NO: 82 - DNA, 20809 bp, synthetic construct
  misc_feature 1..20809: note = PHP97725
  source 1..20809: mol_type = other DNA
gtttacccgccaatatatcctgtcaaacactgcggccgcacttgaccgcggatggagccggagctgtggtgaggccatcgacgggaggtgggggagaacacagtctcagtgttctttgtgagtccgcaaggtttttagcttttctgtattaattaaggttgctgttggctgtagaatacggtcgtggaagagctgtatcggtagctactacgtaagctattatatactggaagtctggagctcgtcgatctccggtcgtcttcctccatttctcctcgtcttgctttgactgctgctaccatttgcttctgttttctgatgaagcatgccatgtcggccaccagtgtttgtgtggtttttgcagggaatggctttcaagtgctgtgattgaatggccctcgtcgtcctcggctgagctcacatggacgcgtcatgtgagtgagatatatgatcatatgatgagtggggttcgggtgagtgcgtacttgaagtaggatcccgctttcactcattcattcattggcctttaaaccgggaaattttcgcgaggagatggagggaagcaagcagggtgacgagtgcagagtgccgcgagcgctttgtcaaaaggcaccgccgtaggcaaaaaaatcaatggccctgactgactcgatggtagtactactgtagagactagagagggttgctccccatatcttcgtgtgacttttactccagcattgcatttccgtcattgagacgttaattaatagcagctttcgggacagatgactgtggccatgtttcgtcacggccgcttcgtgccagctgggggtactatagtactgtgattttgttagtaaaaactttcattaggccaccattgacgaccgggccttcgcttttgctgcgctaattaaccatttcccggcgaccgaagggaacatgaacatgccccgacacatgagggcatgaggactagtgttctccctgtcgttcgttgacttgactagtgatagtttaaacgctcttcaactggaagagcggttactaccggttcactagctagctgctaatcgagctagttaccctatgaggtgacatgaagcgctcacggttactatgacggttagcttcacgactgttggtggcagtagcgtacgacttagctatagttccggacttacctagctaataacttcgtatagcatacattatacgaagttatggttaccgagctccaccttgctagttggatattacctcttctcttcaaagtatccttgaacgctcaccggttatcaaatctctacactatagctctgtagtcttgctagatagttagttctttagctctctctagaggttcacaaactcaatacaacacacagtggagtagggtattacgctccggcggcccgaaccactctaaatccttgtgtcctcgtgtgctcttccaccattaatgactgtaattgcagggacacgaagagttgtagcgcttttgccaacaagatccgctatatgctagtagagtggaacctgcacagcaacaagcatccaataatctgagaataagaattatgtgtggtgatggttctcatctctgcaactcgccattttcgcgagagaaccaaatccaagttggtgaagatcatgatttgggctcatgggctggcatagtagctattacctttgcaattgtggttcgaatctatccgatattctccttttcagggagagctaatgcttatgcttattgggtattttggtttgacactgcttcacgcccaaaaaaaggcaactatgtctgagttggatatggcccaaaaaaaggcagctatgtctgagttggatatggaagtcttctttcgtttagggtgaagtaagaccaagctcatgagcttattatcttaggtcggaacaaattagttgataggcatggcacatttatcaaattataatgattttaacagaaaagcaacacctctttttcagcagcaccagctttgcaagctgcaattgacactccaagcatagtatttgctccaaactcagcctgcatttcgcacaatatcatatctatttccatttggataaaatatattttccagaaatatgggaacagaatcaagatacagaaaaaagttgtggtagtagtggtaagtggaaacacaagtacagtgaaaagatagcattatttctgaacagtcaaattaaccgaaataagtagtatcacatactgcccctaaattgactacacccaatgtaaagaattgcttgagcatattgagccatcagttgtttgtttgtgtaacggatttgacaatgcagagttcaggagcaaaaaaccgcaaaggagagaaagagggaaaggatctcctagtatcccaccttgtggcgcgccctgtcaagtgcatgatggcctggtcgatctgcgtctgctgctgcggttccatcccaacgagtgcctccgacaccttgtcgttgatcacccgcaccgcgtaggcgacccccctggcgaggaacttccgcctctcggaggccccggccgcgtcggcggcggcgccctcgagcgcgcccacgctagccgtagatgctcggtgcacggccttgttggtgtgcaactcgacctcaacggccggtgcgctacgcccgtcaaggatctggcgcgcccgcaccctcgtgatcacggtgggcgcctcccgcctcatgtggccgacgatgaaaagcgccgggttaggggccttggcgcgcaccgccgtattcagggcctcctcgctcttgcgcgagagcaggtgcttccccaggtactcctgcactgacaaggctgccacagcggtggaatttgtcctcacgacttcgccacgtcgtcctcacctccctggcttcccacgactccgccgtatcgaggtgctcggtgggtcgtcttaatccgaagtccgaactaggaagacgagacagagaggtctgaggaatgggcctcgtttgatgttgagctgaattatttttccagcataagcccaggtcttggtccatgaacaaaattactagaaacccagcccagtactacgatctaaaagagggactgccactggatagctctctctagcattctccacgctccaatacagcggcgtcgtgtctatccgggtctatccgcgaacacgtgagaactctccagaaactgctttctcctccacttcatctctctcgctttccctctataaaaagaccccttctaggaattgagggagacagcaagcaccaagcagcgatccgaagctcaatcaattcactcaaacctcttccccaaatcttcgattagatcttcgttgacaagaagactagaaccgaacctgacatgtccaacctgctcacggttcaccagaaccttccggctcttccagtggacgcgacgtccgatgaagtcaggaagaacctcatggacatgttccgcgacaggcaagcgttcagcgagcacacctggaagatgctgctctccgtctgccgctcctgggctgcatggtgcaagctgaacaacaggaagtggttccccgctgagcccgaggacgtgagggattaccttctgtacctgcaagcgcgaggtttgtttctgcttctacctttgatatatatataataattatcattaattagtagtaatataatatttcaaatatttttttcaaaataaaagaatgtagtatatagcaattgcttttctgtagtttataagtgtgtatattttaatttataacttttctaatatatgaccaaaacatggtgatgcctaggtctggcagtgaagaccatccagcaacaccttggacaactgaacatgcttcacaggcgctccggcctcccgcgccccagcgactcgaacgccgtgagcctcgtcatgcgccgcatcaggaaggaaaacgtcgatgccggcgaaagggcaaagcaggccctcgcgttcgagaggaccgatttcgaccaggtccgcagcctgatggagaacagcgacaggtgccaggacattaggaacctggcgttcctcggaattgcatacaacacgctcctcaggatcgcggaaattgcccgcattcgcgtgaaggacattagccgcaccgacggcggcaggatgcttatccacattggcaggaccaagacgctcgtttccaccgcaggcgtcgaaaaggccctcagcctcggagtgaccaagctcgtcgaacgctggatctccgtgtccggcgtcgcggacgacccaaacaactacctcttctgccgcgtccgcaagaacggggtggctgcccctagcgccaccagccaactcagcacgagggccttggaaggtattttcgaggccacccaccgcctgatctacggcgcgaaggatgacagcggtcaacgctacctcgcatggtccgggcactccgcccgcgttggagctgctagggacatggcccgcgccggtgtttccatccccgaaatcatgcaggcgggtggatggacgaacgtgaacattgtcatgaactacattcgcaaccttgacagcgagacgggcgcaatggttcgcctcctggaagatggtgactgaggtacccaacctagacttgtccatcttctggattggccaacttaattaatgtatgaaataaaaggatgcacacatagtgacatgctaatcactataatgtgggcatcaaagttgtgtgttatgtgtaattactagttatctgaataaaagagaaagagatcatccatatttcttatcctaaatgaatgtcacgtgtctttataattctttgatgaaccagatgcatttcattaaccaaatccatatacatataaatattaatcatatataattaatatcaattgggttagcaaaacaaatctagtctaggtgtgttttgcgatccggtctaaaaacggcccctaactaacgcttagttgcccgctagattagtcccccgttagtgcctagttagacacacgacgaactaggggctaatatcgatcaccttgctagttggatattacctcttctcttcaaagtatccttgaacgctcaccggttatcaaatctctacactatagctctgtagtcttgctagatagttagttctttagctctcggttaccaagcggccgcacactgatagtttaaactgaaggcgggaaacgacaatctgatcatgagcggagaattaagggagtcacgttatgacccccgccgatgacgcgggacaagccgttttacgtttggaactgacagaaccgcaacgattgaaggagccactcagccgcgggtttctggagtttaatgagctaagcacatacgtcagaaaccattattgcgcgttcaaaagtcgcctaaggtcactatcagctagcaaatatttcttgtcaaaaatgctccactgacgttccataaattcccctcggtatccaattagagtctcatattcactcccatggcggccaatgcgggcggcggtggagcgggaggaggcagcggcagcggcagcgtggctgcgccggcggtgtgccgccccagcggctcgcggtggacgccgacgccggagcagatcaggatgctgaaggagctctactacggctgcggcatccggtcgcccagctcggagcagatccagcgcatcaccgccatgctgcggcagcacggcaagatcgagggcaagaacgtcttctactggttccagaaccacaaggcccgcgagcgccagaagcgccgcctcaccagcctcgacgtcaacgtgcccgccgccggcgcggccgacgccaccaccagccaactcggcgtcctctcgctgtcgtcgccgccgccttcaggcgcggcgcctccctcgcccaccctcggcttctacgccgccggcaatggcggcggatcggctgtgctgctggacacgagttccgactggggcagcagcggcgctgctatggccaccgagacatgcttcctgcaggactacatgggcgtgacggacacgggcagctcgtcgcagtggccacgcttctcgtcgtcggacacgataatggcggcggccgcggcgcgggcggcgacgacgcgggcgcccgagacgctccctctcttcccgacctgcggcgacgacggcggcagcggtagcagcagctacttgccgttctggggtgccgcgtccacaactgccggcgccacttcttccgttgcgatccaacagcaacaccagctgcaggagcagtacagcttttacagcaacagcaacagcacccagctggccggcaccggcaaccaagacgtatcggcaacagcagcagcagccgccgccctggagctgagcctcagctcatggtgctccccttaccctgctgcagggagtatgtgagagcaacgcgagctgccactgctcttcactgatgtctctggaatggaaggaggaggaagtgagaacagatcattcgacaaagcagcattagtccgttgatcggtggaagaccactcgtcagtgttgagttgaatgtttgatcaataaaatacggcaatgctgtaagggttgttttttatgccattgataatacactgtactgttcagttgttgaactctatttcttagccatgccaagtgcttttcttattttgaataacattacagcaaaaagttgaaagacaaaaaaaaaaacccccgaacagagtgctttgggtcccaagcttctttagactgtgttcggcgttccccctaaatttctccccctatatctcactcacttgtcacatcagcgttctctttccccctatatctccacgctctacagcagttccacctatatcaaacctctataccccaccacaacaatattatatactttcatcttcaactaactcatgtaccttccaatttttttctactaataattatttacgtgcacagaaacttagcaaggagagagagagcgggaatttaaatgctcggcgttaggcttttagtccgctaggtggctagaccgaggttaggacgctagttcactaggggcctagtggtgttttaagacgtcacggtcaccaccttgctagttggatattacctcttctcttcaaagtatccttgaacgctcaccggttatcaaatctctacactatagctctgtagtcttgctagatagttagttctttagctctccgcgaccgaagcttgcatgggccgcatcgagcagctggcttgtggggaccagacaaaaaaggaatggtgcagaattgttaggcgcacctaccaaaagcatctttgcctttattgcaaagataaagcagattcctctagtacaagtggggaacaaaataacgtggaaaagagctgtcctgacagcccactcactaatgcgtatgacgaacgcagtgacgaccacaaaactcgagcaacgagatcatgagccaatcaaagaggagtgatgtagacctaaagcaataatggagccatgacgtaagggcttacgcccatacgaaataattaaaggctgatgtgacctgtcggtctctcagaacctttactttttatgtttggcgtgtatttttaaatttccacggcaatgacgatgtgaccgtcgacccactaaaacattgctttgtcaaaagctaaaaaagatgatgcccgacagccacttgtgtgaagcatgagaagccggtccctccactaagaaaattagtgaagcatcttccagtggtccctccactcacagctcaatcagtgagcaacaggacgaaggaaatgacgtaagccatgacgtctaatcccagggccagcttgcatgcctgcagtgcagcgtgacccggtcgtgcccctctctagagataatgagcattgcatgtctaagttataaaaaattaccacatattttttttgtcacacttgtttgaagtgcagtttatctatctttatacatatatttaaactttactctacgaataatataatctatagtactacaataatatcagtgttttagagaatcatataaatgaacagttagacatggtctaaaggacaattgagtattttgacaacaggactctacagttttatctttttagtgtgcatgtgttctcctttttttttgcaaatagcttcacctatataatacttcatccattttattagtacatccatttagggtttagggttaatggtttttatagactaatttttttagtacatctattttattctattttagcctctaaattaagaaaactaaaactctattttagtttttttatttaataatttagatataaaatagaataaaataaagtgactaaaaattaaacaaataccctttaagaaattaaaaaaactaaggaaacatttttcttgtttcgagtagataatgccagcctgttaaacgccgtcgacgagtctaacggacaccaaccagcgaaccagcagcgtcgcgtcgggccaagcgaagcagacggcacggcatctctgtcgctgcctctggacccctctcgagagttccgctccaccgttggacttgctccgctgtcggcatccagaaattgcgtggcggagcggcagacgtgagccggcacggcaggcggcctcctcctcctctcacggcaccggcagctacgggggattcctttcccaccgctccttcgctttcccttcctcgcccgccgtaataaatagacaccccctccacaccctctttccccaacctcgtgttgttcggagcgcacacacacacaaccagatctcccccaaatccacccgtcggcacctccgcttcaaggtacgccgctcgtcctcccccccccccctctctaccttctctagatcggcgttccggtccatgcatggttagggcccggtagttctacttctgttcatgtttgtgttagatccgtgtttgtgttagatccgtgctgctagcgttcgtacacggatgcgacctgtacgtcagacacgttctgattgctaacttgccagtgtttctctttggggaatcctgggatggctctagccgttccgcagacgggatcgatttcatgattttttttgtttcgttgcatagggtttggtttgcccttttcctttatttcaatatatgccgtgcacttgtttgtcgggtcatcttttcatgcttttttttgtcttggttgtgatgatgtggtctggttgggcggtcgttctagatcggagtagaattctgtttcaaactacctggtggatttattaattttggatctgtatgtgtgtgccatacatattcatagttacgaattgaagatgatggatggaaatatcgatctaggataggtatacatgttgatgcgggttttactgatgcatatacagagatgctttttgttcgcttggttgtgatgatgtggtgtggttgggcggtcgttcattcgttctagatcggagtagaatactgtttcaaactacctggtgtatttattaattttggaactgtatgtgtgtgtcatacatcttcatagttacgagtttaagatggatggaaatatcgatctaggataggtatacatgttgatgtgggttttactgatgcatatacatgatggcatatgcagcatctattcatatgctctaaccttgagtacctatctattataataaacaagtatgttttataattattttgatcttgatatacttggatgatggcatatgcagcagctatatgtggatttttttagccctgccttcatacgctatttatttgcttggtactgtttcttttgtcgatgctcaccctgttgtttggtgttacttctgcaggtcgactttaacttagcctaggatccatggccactgtgaacaactggctcgctttctccctctccccgcaggagctgccgccctcccagacgacggactccacactcatctcggccgccaccgccgaccatgtctccggcgatgtctgcttcaacatcccccaagattggagcatgaggggatcagagctttcggcgctcgtcgcggagccgaagctggaggacttcctcggcggcatctccttctccgagcagcatcacaaggccaactgcaacatgatacccagcactagcagcacagtttgctacgcgagctcaggtgctagcaccggctaccatcaccagctgtaccaccagcccaccagctcagcgctccacttcgcggactccgtaatggtggcttcctcggccggtgtccacgacggcggtgccatgctcagcgcggccgccgctaacggtgtcgctggcgctgccagtgccaacggcggcggcatcgggctgtccatgattaagaactggctgcggagccaaccggcgcccatgcagccgagggtggcggcggctgagggcgcgcaggggctctctttgtccatgaacatggcggggacgacccaaggcgctgctggcatgccacttctcgctggagagcgcgcacgggcgcccgagagtgtatcgacgtcagcacagggtggagccgtcgtcgtcacggcgccgaaggaggatagcggtggcagcggtgttgccggcgctctagtagccgtgagcacggacacgggtggcagcggcggcgcgtcggctgacaacacggcaaggaagacggtggacacgttcgggcagcgcacgtcgatttaccgtggcgtgacaaggcatagatggactgggagatatgaggcacatctttgggataacagttgcagaagggaagggcaaactcgtaagggtcgtcaagtctatttaggtggctatgataaagaggagaaagctgctagggcttatgatcttgctgctctgaagtactggggtgccacaacaacaacaaattttccagtgagtaactacgaaaaggagctcgaggacatgaagcacatgacaaggcaggagtttgtagcgtctctgagaaggaagagcagtggtttctccagaggtgcatccatttacaggggagtgactaggcatcaccaacatggaagatggcaagcacggattggacgagttgcagggaacaaggatctttacttgggcaccttcagcacccaggaggaggcagcggaggcgtacgacatcgcggcgatcaagttccgcggcctcaacgccgtcaccaacttcgacatgagccgctacgacgtgaagagcatcctggacagcagcgccctccccatcggcagcgccgccaagcgcctcaaggaggccgaggccgcagcgtccgcgcagcaccaccacgccggcgtggtgagctacgacgtcggccgcatcgcctcgcagctcggcgacggcggagccctggcggcggcgtacggcgcgcactaccacggcgccgcctggccgaccatcgcgttccagccgggcgccgccagcacaggcctgtaccacccgtacgcgcagcagccaatgcgcggcggcgggtggtgcaagcaggagcaggaccacgcggtgatcgcggccgcgcacagcctgcaggacctccaccacctgaacctgggcgcggccggcgcgcacgactttttctcggcagggcagcaggccgccgccgctgcgatgcacggcctgggtagcatcgacagtgcgtcgctcgagcacagcaccggctccaactccgtcgtctacaacggcggggtcggcgacagcaacggcgccagcgccgtcggcggcagtggcggtggctacatgatgccgatgagcgctgccggagcaaccactacatcggcaatggtgagccacgagcaggtgcatgcacgggcctacgacgaagccaagcaggctgctcagatggggtacgagagctacctggtgaacgcggagaacaatggtggcggaaggatgtctgcatgggggactgtcgtgtctgcagccgcggcggcagcagcaagcagcaacgacaacatggccgccgacgtcgggcatggcggcgcgcagctcttcagtgtctggaacgacacttaagcgtacctagtggtacctgacatcttatagtctgcaacctctcgtgtctgaattcctatctttatcaagtgttattgcttccacgactataggacagctttcgtcgaaagcttttgctcatgtgatctcgaaggattcatctagtctgatttttcgtgacttgtatcggttttattggattcatccaacatatatcaataaaaaatgagttgtgtttcctttcttcctagttcagttaaaattatttccctcctgcgcttgtgctgtaattgtctgtgtacctgttgtttgtgactgtgttagttcccttggatatgatttcgtatttgatatgtacatggagatagcttagcttcattattggagtatgaagttagtatgacatagtcactctcctggaaaattgacactgcaaaccatatttttattctgaaccacaaatcctagtcagtccgctggcatatgccgtccgtttgctgaatccagaacgtgggtttggagatgtacggctgagatgcctctatgcgaaggggatttcgtggtgaaacgagatgggagtagagcaacgcccgtggaagatgcttcaaacttccacacttttgagcaacgatcggcagtagtaaggtagacgatttcaagatcaaagcatatgaagataaacaacatcaacaacaaaatttgttggggttctatagagagaaacagagctacatacatacactgttttgtatctaccatctgagatgatgaaaagatgaaaaactaaagaatgccccggcgccaacgccaggacacgccgcgcgcgcgtcacccgagccatctcttgacccagccggcgctgtatatttacacacgttgcagcatcgatcaccacctgttcgatcgcgtcgccgtcaccggcgcgccgcgacttattgaactagtctagggcgcggctaacaacctagcttagattgccttgtctaaacccttaggctaacgcgccactctagaaggccgatctcccccgaacgcgccagatccgatatcgatgggccctggccgaagcttggtcacccgctagacgtgcgcacgataacttcgtatagcatacattatacgaagttataacagcggaccgggttaccgaattcctgcccttaaggccaattgttcaagattcattcaacaattgaaacatctcccatgattaaatcagtataaggttgctatggtcttgcttgacaaagtttttttttgagggaatttcaactaaatttttgagtgaaactatcaaatactgattttaaaaaatttttataaaaggaagcgcagagataaaaggccatctatgctacaaaagtacccaaaaatgtaatcctaaagtatgaattgcattttttttttgtttggacgaaaggaaaggagtattaccacaagaatgatatcatcttcatatttagatcttttttgggtaaagcttgagattctctaaatatagagaaatcagaagaaaaaaaaaccgtgttttggtggttttgatttctagcctccacaataactttgacggcgtcgacaagtctaacggacaccaagcagcgaaccaccagcgccgagccaagcgaagcagacggccgagacgttgacaccttcggcgcggcatctctcgagagttccgctccggcgctccacctccaccgctggcggtttcttattccgttccgttccgcctcctgctctgctcctctccacaccacacggcacgaaaccgttacggcaccggcagcacccagcacgggagaggggattcctttcccaccgttccttccctttccgccccgccgctataaatagccagccccatccccagcttttttccccaatctcatctcctctctcctgttgttcggagcacacgcacaatccgatcgatccccaaatccccttcgtctctcctcgcgagcctcgtggatcccagcttcaaggtacggcgatcgatcatcccccctccttctctctaccttcttttctctagactacatcggatggcgatccatggttagggcctgctagtttcccttcctgttttgtcgatggctgcgaggcacaatagatctgatggcgttatgacggctaacttgtcatgttgttgcgatttatagtccctttaggagatcagtttaatttctcggatggttcgagatcggtggtccatggttagtaccctaagatccgcgctgttagggttcgtagatggaggcgacctgttctgattgttaacttgtcagtacctgggaaatcctgggatggttctagctcgtccgcagatgagatcgatttcatgatcctctgtatcttgtttcgttgcctaggttccgtctaatctatccgtggtatgatgtagatgttttgatcgtgctaactacgtcttgtaaagttaattgtcaggtcataatttttagcatgcctttttttttgtttggttttgtctaattgggctgtcgttctagatcagagtagaagactgttccaaactacctgctggatttattgaacttggatctgtatgtgtgtcacatatcttcataaattcatgattaagatggattgaaatatcttttatctttttggtatggatagttctatatgttggtgtggctttgttagatgtatacatgcttagatacatgaagcaacgtgctgctactgtttagtaattgctgttcatttgtctaataaacagataaggatatgtatttatgttgctgttggttttgctggtactttgttggatacaaatgcttcaatacagaaaacagcatgctgctacgatttaccatttatctaatcttatcatatgtctaatctaataaacaaacatgcttttaaattatcttcatatgcttggatgatggcatacacagcggctatgtgtggttttttaaatacccagcatcatgggcatgcatgacactgctttaatatgctttttatttgcttgagactgtttcttttgtttatactgaccctttagttcggtgactcttctgcaggtcgactttaacttagcctaggatccatggcccagtccaagcacggcctgaccaaggagatgaccatgaagtaccgcatggagggctgcgtggacggccacaagttcgtgatcaccggcgagggcatcggctaccccttcaagggcaagcaggccatcaacctgtgcgtggtggagggcggccccttgcccttcgccgaggacatcttgtccgccgccttcatgtacggcaaccgcgtgttcaccgagtacccccaggacatcgtcgactacttcaagaactcctgccccgccggctacacctgggaccgctccttcctgttcgaggacggcgccgtgtgcatctgcaacgccgacatcaccgtgagcgtggaggagaactgcatgtaccacgagtccaagttctacggcgtgaacttccccgccgacggccccgtgatgaagaagatgaccgacaactgggagccctcctgcgagaagatcatccccgtgcccaagcagggcatcttgaagggcgacgtgagcatgtacctgctgctgaaggacggtggccgcttgcgctgccagttcgacaccgtgtacaaggccaagtccgtgccccgcaagatgcccgactggcacttcatccagcacaagctgacccgcgaggaccgcagcgacgccaagaaccagaagtggcacctgaccgagcacgccatcgcctccggctccgccttgccctccggactcagatctcgatagggtaccaatggccagttaacagatccagctgctgctgttctagggttcacaagtctgcctatttgtcttccccaatggagctatggttgtctggtctggtccttggtcgtgtcccgtttcattgtgtactatttacctgtaatgtgtatccttaagtctggtttgatggtgtctgaaacgttttgctgtggtagagcagcatggaagaactataatgaataagtgatccctaatcattgtgtccaaattttgcttctgctatacccttttgtgctgtttcttatgttttgcttaaaaatttgatctgacaaacaaatttgtctaaattatgctcttgttctgactgtgtactgtacacatttgtattgctaccggtttggcacatagttttctctttgattgcagatcaaacccttctgattgcagattgcttggctatggctgatgtgctcactgttcttctttagcttgtatattgctgatggtggcttggctacggctgaaaaagttgctgctgcgccgacttggcaactgttgctccagtaatgctttgtcctctcttcctagccgccgacttggcacttggcagctgttgctcctgtaatgcgttgttatctcttatctcttgagatgtactatgattttgaggctgtttgacttgtgccagattgccagtgctgatgctatattatctcaggtttttatgctagtatatgttttactgtgtgctgcctgtgtcgagttacgtaatctattgaaccgctatgcgtgttgatgccctgttgttgcttgccagattgatgcccctgttgcttgcagcttgcaagctgtagtgaaatcctaaaattcgaaaccaaatctattctgaacttttgaagatctgtgatgtccggaagaaaagattcaaacagataaacgggactctccagaatctataaaataaatgatcgacaaacgctttgctttggtaggcttcctagttagttagcggaccgaagcttcggtccgggcctagaaggccagcttcggccgcccctcggtaccctgggatcttccgacggcgtcttcaccgccccgccgccgcccgagccggacttgtcgctgccgccgccgctgctcatcttgcgcgcttgtgtccctccctcagtccctgcgttcgcggatcgcgggcgggtgcgacccgtttggactccggccggtagccttcgtgccgacctcgctcggtccaccggtttgtcggggacccacatgtcagtgaaggtacgcgtccacgtccacagaccctactaccccagacgagtccaaatcgctgttccctcacactctcgtgtaccagcgcgcggcggaaagcacctttccaacaaccgccgacacgtcggtcccacgtcggcatgctccaccggtcagtgtttggcgtgtacggctcccggcgacgaacgagtgtggcctaagctttcctactcccatcccatctgagccacacatctctctcacgccacgcgcacaaaacagccaggctcccacgcgcatcaaccggctctccctttccgtgccactcgcccccaagccccaaaccctcgccgccgcctccgagacagccgccgccacctaggccatggccaccgccgccgccgcgtctaccgcgctcactggcgccactaccgctgcgcccaaggcgaggcgccgggcgcacctcctggccacccgccgcgccctcgccgcgcccatcaggtgctcagcggcgtcacccgccatgccgatggctcccccggccaccccgctccggccgtggggccccaccgagccccgcaagggtgctgacatcctcgtcgagtccctcgagcgctgcggcgtccgcgacgtcttcgcctaccccggcggcgcgtcgatggagatccaccaggcactcacccgctcccccgtcatcgccaaccacctcttccgccacgagcaaggggaggcctttgccgcctccggctacgcgcgctcctcgggccgcgtcggcgtctgcatcgccacctccggccccggcgccaccaacctagtctccgcgctcgccgacgcgctgctcgattccgtcccgatggtcgccatcacgggacaggtggcgcgacgcatgattggcaccgacgccttccaggagacgcccatcgtcgaggtcacgcgctccatcaccaagcacaactacctggtcctcgacgtcgacgacatcccccgcgtcgtgcaggaggctttcttcctcgcctcctctggtcgaccagggccggtgcttgtcgacatccccaaggacatccagcagcagatggcggtgcctgtctgggacaagcccatgagtctgcctgggtacattgcgcgccttcccaagccccctgcgactgagttgcttgagcaggtgctgcgtcttgttggtgaatcgcggcgccctgttctttatgtgggcggtggctgcgcagcatctggtgaggagttgcgacgctttgtggagctgactggaatcccggtcacaactactcttatgggcctcggcaacttccccagcgacgacccactgtctctgcgcatgctaggtatgcatgggacggtgtatgcaaattatgcagtggataaggccgatctgttgcttgcacttggtgtgcggtttgatgatcgcgtgacagggaagattgaggcttttgcaagcagggctaagattgtgcacgttgatattgatccggctgagattggcaagaacaagcagccacatgtgtccatctgtgcagatgttaagcttgctttgcagggcatgaatgctcttcttgaaggaagcacatcaaagaagagctttgactttggctcatggaacgatgagttggatcagcagaagagggaattcccccttgggtataaaacatctaatgaggagatccagccacaatatgctattcaggttcttgatgagctgacgaaaggcgaggccatcatcggcacaggtgttgggcagcaccagatgtgggcggcacagtactacacttacaagcggccaaggcagtggttgtcttcagctggtcttggggctatgggatttggtttgccggctgctgctggtgcttctgtggcaaacccaggtgtcactgttgttgacatcgatggagatggtagctttctcatgaacgttcaggagctagctatgatccgaattgagaacctcccagtgaaggtctttgtgctaaacaaccagcacctggggatggtggtgcagttggaggacaggttctataaggccaacagagcgcacacatacttgggaaacccagagaatgaaagtgagatatatccagatttcgtgacgatcgccaaagggttcaacattccagccgtccgtgtgacaaagaagaacgaagtccgcgcagcgataaagaagatgctcgagactccagggccgtacctcttggatataatcgtcccacaccaggagcatgtgttgcctatgatccctagtggtggggctttcaaggatatgatcctggatggtgatggcaggactgtgtactgacttcgaataggtacccggggatcctctagtgccgtgggtcgtttaagctgccgctgtacctgtgtcgtctggtgccttctggtgtacctgggaggttgtcgtctatcaagtatctgtggttggtgtcatgagtcagtgagtcccaatactgttcgtgtcctgtgtgcattatacccaaaactgttatgggcaaatcatgaataagcttgatgttcgaacttaaaagtctctgctcaatatggtattatggttgtttttgttcgtctcctaatatttgcctgggatcaaattttattggctggtgttcatttgacctccatgttcttgctaggctccattttttactctacagccataatatgtttgattgtttggtttgttctttgttgtacacctggttctgtcgagcttagttttcgacactggcttacagcttaacatgttgctattttattgggttctgattgctattttattgggttctgattgctagtttttgctgaatccaaaaaccatgttatttatttaagcgatccaggttattattatgatggtggctaagtttttttttttccaagggtaaattttctggattctccagtgtttctgtggccgaattcaatcactagagtcgacctgcaaagcttcggtccgggcctagaaggcccgcgccacttacgcttgattccgatgacttcgtaggttcctagctcaagccgctcgtgtccaagcgtcacttacgattagctaatgattacggcatctaggaccgactagttcttatgtgcttctagtctccaaatgtggttgatagttattttgctctaagatcaacagtaatgaagtataaatcatcgttgtggtgtgctactcggttaattgagcattaacacacacaaacatgacgaggatggtataatctccaaaaatgtgtactttgttaggtgggaccctatagccttgattaatgtgctatgttaggcatgcctggaaacgtgtgacgcatatgttttgtgaacctgttgatattatatgtgcttttatattaccatattttattaaaatactaatatttattactagtaagatataacattctatctagcttaaaaactaaccataaatattccataataactagatttaccaaactaatatactaaatatacataataaatacaaaattaacaagacaataatcaatatttatgagcttaatatatttagacattatggttggtcgacgataatcatgctaacttttcgtaattgcttgattgaaatatgcttagaataatgcctctttgttctacatggcaaatagggaccattatggtgtaacaccctgggaaccacaaacaccccgaaatgctactaaactacacaactaaccttcatatataaaatttcgacagcatctcctttgaaaatttgcatagacgtggaagcaacagagtataaacagatctgcgtttaaacgtgcaagcgctactagacaattcagtacattaaaaacgtccgcaatgtgttattaagttgtctaagcgtcaatttgtttacaccacaatatatcctgcca

SEQ ID NO: 83 - DNA, 20692 bp, synthetic construct
  misc_feature 1..20692: note = PHP97725
  source 1..20692: mol_type = other DNA
gtttacccgccaatatatcctgtcaaacactgcggccgcacttgaccgcggatggagccggagctgtggtgaggccatcgacgggaggtgggggagaacacagtctcagtgttctttgtgagtccgcaaggtttttagcttttctgtattaattaaggttgctgttggctgtagaatacggtcgtggaagagctgtatcggtagctactacgtaagctattatatactggaagtctggagctcgtcgatctccggtcgtcttcctccatttctcctcgtcttgctttgactgctgctaccatttgcttctgttttctgatgaagcatgccatgtcggccaccagtgtttgtgtggtttttgcagggaatggctttcaagtgctgtgattgaatggccctcgtcgtcctcggctgagctcacatggacgcgtcatgtgagtgagatatatgatcatatgatgagtggggttcgggtgagtgcgtacttgaagtaggatcccgctttcactcattcattcattggcctttaaaccgggaaattttcgcgaggagatggagggaagcaagcagggtgacgagtgcagagtgccgcgagcgctttgtcaaaaggcaccgccgtaggcaaaaaaatcaatggccctgactgactcgatggtagtactactgtagagactagagagggttgctccccatatcttcgtgtgacttttactccagcattgcatttccgtcattgagacgttaattaatagcagctttcgggacagatgactgtggccatgtttcgtcacggccgcttcgtgccagctgggggtactatagtactgtgattttgttagtaaaaactttcattaggccaccattgacgaccgggccttcgcttttgctgcgctaattaaccatttcccggcgaccgaagggaacatgaacatgccccgacacatgagggcatgaggactagtgttctccctgtcgttcgttgacttgactagtgatagtttaaacgctcttcaactggaagagcggttactaccggttcactagctagctgctaatcgagctagttaccctatgaggtgacatgaagcgctcacggttactatgacggttagcttcacgactgttggtggcagtagcgtacgacttagctatagttccggacttacctagctaataacttcgtatagcatacattatacgaagttatggttaccgagctccaccttgctagttggatattacctcttctcttcaaagtatccttgaacgctcaccggttatcaaatctctacactatagctctgtagtcttgctagatagttagttctttagctctctctagaggttcacaaactcaatacaacacacagtggagtagggtattacgctccggcggcccgaaccactctaaatccttgtgtcctcgtgtgctcttccaccattaatgactgtaattgcagggacacgaagagttgtagcgcttttgccaacaagatccgctatatgctagtagagtggaacctgcacagcaacaagcatccaataatctgagaataagaattatgtgtggtgatggttctcatctctgcaactcgccattttcgcgagagaaccaaatccaagttggtgaagatcatgatttgggctcatgggctggcatagtagctattacctttgcaattgtggttcgaatctatccgatattctccttttcagggagagctaatgcttatgcttattgggtattttggtttgacactgcttcacgcccaaaaaaaggcaactatgtctgagttggatatggcccaaaaaaaggcagctatgtctgagttggatatggaagtcttctttcgtttagggtgaagtaagaccaagctcatgagcttattatcttaggtcggaacaaattagttgataggcatggcacatttatcaaattataatgattttaacagaaaagcaacacctctttttcagcagcaccagctttgcaagctgcaattgacactccaagcatagtatttgctccaaactcagcctgcatttcgcacaatatcatatctatttccatttggataaaatatattttccagaaatatgggaacagaatcaagatacagaaaaaagttgtggtagtagtggtaagtggaaacacaagtacagtgaaaagatagcattatttctgaacagtcaaattaaccgaaataagtagtatcacatactgcccctaaattgactacacccaatgtaaagaattgcttgagcatattgagccatcagttgtttgtttgtgtaacggatttgacaatgcagagttcaggagcaaaaaaccgcaaaggagagaaagagggaaaggatctcctagtatcccaccttgtggcgcgccctgtcaagtgcatgatggcctggtcgatctgcgtctgctgctgcggttccatcccaacgagtgcctccgacaccttgtcgttgatcacccgcaccgcgtaggcgacccccctggcgaggaacttccgcctctcggaggccccggccgcgtcggcggcggcgccctcgagcgcgcccacgctagccgtagatgctcggtgcacggccttgttggtgtgcaactcgacctcaacggccggtgcgctacgcccgtcaaggatctggcgcgcccgcaccctcgtgatcacggtgggcgcctcccgcctcatgtggccgacgatgaaaagcgccgggttaggggccttggcgcgcaccgccgtattcagggcctcctcgctcttgcgcgagagcaggtgcttccccaggtactcctgcactgacaaggctgccacagcggtggaatttgtcctcacgacttcgccacgtcgtcctcacctccctggcttcccacgactccgccgtatcgaggtgctcggtgggtcgtcttaatccgaagtccgaactaggaagacgagacagagaggtctgaggaatgggcctcgtttgatgttgagctgaattatttttccagcataagcccaggtcttggtccatgaacaaaattactagaaacccagcccagtactacgatctaaaagagggactgccactggatagctctctctagcattctccacgctccaatacagcggcgtcgtgtctatccgggtctatccgcgaacacgtgagaactctccagaaactgctttctcctccacttcatctctctcgctttccctctataaaaagaccccttctaggaattgagggagacagcaagcaccaagcagcgatccgaagctcaatcaattcactcaaacctcttccccaaatcttcgattagatcttcgttgacaagaagactagaaccgaacctgacatgtccaacctgctcacggttcaccagaaccttccggctcttccagtggacgcgacgtccgatgaagtcaggaagaacctcatggacatgttccgcgacaggcaagcgttcagcgagcacacctggaagatgctgctctccgtctgccgctcctgggctgcatggtgcaagctgaacaacaggaagtggttccccgctgagcccgaggacgtgagggattaccttctgtacctgcaagcgcgaggtttgtttctgcttctacctttgatatatatataataattatcattaattagtagtaatataatatttcaaatatttttttcaaaataaaagaatgtagtatatagcaattgcttttctgtagtttataagtgtgtatattttaatttataacttttctaatatatgaccaaaacatggtgatgcctaggtctggcagtgaagaccatccagcaacaccttggacaactgaacatgcttcacaggcgctccggcctcccgcgccccagcgactcgaacgccgtgagcctcgtcatgcgccgcatcaggaaggaaaacgtcgatgccggcgaaagggcaaagcaggccctcgcgttcgagaggaccgatttcgaccaggtccgcagcctgatggagaacagcgacaggtgccaggacattaggaacctggcgttcctcggaattgcatacaacacgctcctcaggatcgcggaaattgcccgcattcgcgtgaaggacattagccgcaccgacggcggcaggatgcttatccacattggcaggaccaagacgctcgtttccaccgcaggcgtcgaaaaggccctcagcctcggagtgaccaagctcgtcgaacgctggatctccgtgtccggcgtcgcggacgacccaaacaactacctcttctgccgcgtccgcaagaacggggtggctgcccctagcgccaccagccaactcagcacgagggccttggaaggtattttcgaggccacccaccgcctgatctacggcgcgaaggatgacagcggtcaacgctacctcgcatggtccgggcactccgcccgcgttggagctgctagggacatggcccgcgccggtgtttccatccccgaaatcatgcaggcgggtggatggacgaacgtgaacattgtcatgaactacattcgcaaccttgacagcgagacgggcgcaatggttcgcctcctggaagatggtgactgaggtacccaacctagacttgtccatcttctggattggccaacttaattaatgtatgaaataaaaggatgcacacatagtgacatgctaatcactataatgtgggcatcaaagttgtgtgttatgtgtaattactagttatctgaataaaagagaaagagatcatccatatttcttatcctaaatgaatgtcacgtgtctttataattctttgatgaaccagatgcatttcattaaccaaatccatatacatataaatattaatcatatataattaatatcaattgggttagcaaaacaaatctagtctaggtgtgttttgcgatccggtctaaaaacggcccctaactaacgcttagttgcccgctagattagtcccccgttagtgcctagttagacacacgacgaactaggggctaatatcgatggttaccaagcggccgcacactgatagtttaaactgaaggcgggaaacgacaatctgatcatgagcggagaattaagggagtcacgttatgacccccgccgatgacgcgggacaagccgttttacgtttggaactgacagaaccgcaacgattgaaggagccactcagccgcgggtttctggagtttaatgagctaagcacatacgtcagaaaccattattgcgcgttcaaaagtcgcctaaggtcactatcagctagcaaatatttcttgtcaaaaatgctccactgacgttccataaattcccctcggtatccaattagagtctcatattcactcccatggcggccaatgcgggcggcggtggagcgggaggaggcagcggcagcggcagcgtggctgcgccggcggtgtgccgccccagcggctcgcggtggacgccgacgccggagcagatcaggatgctgaaggagctctactacggctgcggcatccggtcgcccagctcggagcagatccagcgcatcaccgccatgctgcggcagcacggcaagatcgagggcaagaacgtcttctactggttccagaaccacaaggcccgcgagcgccagaagcgccgcctcaccagcctcgacgtcaacgtgcccgccgccggcgcggccgacgccaccaccagccaactcggcgtcctctcgctgtcgtcgccgccgccttcaggcgcggcgcctccctcgcccaccctcggcttctacgccgccggcaatggcggcggatcggctgtgctgctggacacgagttccgactggggcagcagcggcgctgctatggccaccgagacatgcttcctgcaggactacatgggcgtgacggacacgggcagctcgtcgcagtggccacgcttctcgtcgtcggacacgataatggcggcggccgcggcgcgggcggcgacgacgcgggcgcccgagacgctccctctcttcccgacctgcggcgacgacggcggcagcggtagcagcagctacttgccgttctggggtgccgcgtccacaactgccggcgccacttcttccgttgcgatccaacagcaacaccagctgcaggagcagtacagcttttacagcaacagcaacagcacccagctggccggcaccggcaaccaagacgtatcggcaacagcagcagcagccgccgccctggagctgagcctcagctcatggtgctccccttaccctgctgcagggagtatgtgagagcaacgcgagctgccactgctcttcactgatgtctctggaatggaaggaggaggaagtgagaacagatcattcgacaaagcagcattagtccgttgatcggtggaagaccactcgtcagtgttgagttgaatgtttgatcaataaaatacggcaatgctgtaagggttgttttttatgccattgataatacactgtactgttcagttgttgaactctatttcttagccatgccaagtgcttttcttattttgaataacattacagcaaaaagttgaaagacaaaaaaaaaaacccccgaacagagtgctttgggtcccaagcttctttagactgtgttcggcgttccccctaaatttctccccctatatctcactcacttgtcacatcagcgttctctttccccctatatctccacgctctacagcagttccacctatatcaaacctctataccccaccacaacaatattatatactttcatcttcaactaactcatgtaccttccaatttttttctactaataattatttacgtgcacagaaacttagcaaggagagagagagcgggaatttaaatgctcggcgttaggcttttagtccgctaggtggctagaccgaggttaggacgctagttcactaggggcctagtggtgttttaagacgtcacggtcaccaccttgctagttggatattacctcttctcttcaaagtatccttgaacgctcaccggttatcaaatctctacactatagctctgtagtcttgctagatagttagttctttagctctccgcgaccgaagcttgcatgggccgcatcgagcagctggcttgtggggaccagacaaaaaaggaatggtgcagaattgttaggcgcacctaccaaaagcatctttgcctttattgcaaagataaagcagattcctctagtacaagtggggaacaaaataacgtggaaaagagctgtcctgacagcccactcactaatgcgtatgacgaacgcagtgacgaccacaaaactcgagcaacgagatcatgagccaatcaaagaggagtgatgtagacctaaagcaataatggagccatgacgtaagggcttacgcccatacgaaataattaaaggctgatgtgacctgtcggtctctcagaacctttactttttatgtttggcgtgtatttttaaatttccacggcaatgacgatgtgaccgtcgacccactaaaacattgctttgtcaaaagctaaaaaagatgatgcccgacagccacttgtgtgaagcatgagaagccggtccctccactaagaaaattagtgaagcatcttccagtggtccctccactcacagctcaatcagtgagcaacaggacgaaggaaatgacgtaagccatgacgtctaatcccagggccagcttgcatgcctgcagtgcagcgtgacccggtcgtgcccctctctagagataatgagcattgcatgtctaagttataaaaaattaccacatattttttttgtcacacttgtttgaagtgcagtttatctatctttatacatatatttaaactttactctacgaataatataatctatagtactacaataatatcagtgttttagagaatcatataaatgaacagttagacatggtctaaaggacaattgagtattttgacaacaggactctacagttttatctttttagtgtgcatgtgttctcctttttttttgcaaatagcttcacctatataatacttcatccattttattagtacatccatttagggtttagggttaatggtttttatagactaatttttttagtacatctattttattctattttagcctctaaattaagaaaactaaaactctattttagtttttttatttaataatttagatataaaatagaataaaataaagtgactaaaaattaaacaaataccctttaagaaattaaaaaaactaaggaaacatttttcttgtttcgagtagataatgccagcctgttaaacgccgtcgacgagtctaacggacaccaaccagcgaaccagcagcgtcgcgtcgggccaagcgaagcagacggcacggcatctctgtcgctgcctctggacccctctcgagagttccgctccaccgttggacttgctccgctgtcggcatccagaaattgcgtggcggagcggcagacgtgagccggcacggcaggcggcctcctcctcctctcacggcaccggcagctacgggggattcctttcccaccgctccttcgctttcccttcctcgcccgccgtaataaatagacaccccctccacaccctctttccccaacctcgtgttgttcggagcgcacacacacacaaccagatctcccccaaatccacccgtcggcacctccgcttcaaggtacgccgctcgtcctcccccccccccctctctaccttctctagatcggcgttccggtccatgcatggttagggcccggtagttctacttctgttcatgtttgtgttagatccgtgtttgtgttagatccgtgctgctagcgttcgtacacggatgcgacctgtacgtcagacacgttctgattgctaacttgccagtgtttctctttggggaatcctgggatggctctagccgttccgcagacgggatcgatttcatgattttttttgtttcgttgcatagggtttggtttgcccttttcctttatttcaatatatgccgtgcacttgtttgtcgggtcatcttttcatgcttttttttgtcttggttgtgatgatgtggtctggttgggcggtcgttctagatcggagtagaattctgtttcaaactacctggtggatttattaattttggatctgtatgtgtgtgccatacatattcatagttacgaattgaagatgatggatggaaatatcgatctaggataggtatacatgttgatgcgggttttactgatgcatatacagagatgctttttgttcgcttggttgtgatgatgtggtgtggttgggcggtcgttcattcgttctagatcggagtagaatactgtttcaaactacctggtgtatttattaattttggaactgtatgtgtgtgtcatacatcttcatagttacgagtttaagatggatggaaatatcgatctaggataggtatacatgttgatgtgggttttactgatgcatatacatgatggcatatgcagcatctattcatatgctctaaccttgagtacctatctattataataaacaagtatgttttataattattttgatcttgatatacttggatgatggcatatgcagcagctatatgtggatttttttagccctgccttcatacgctatttatttgcttggtactgtttcttttgtcgatgctcaccctgttgtttggtgttacttctgcaggtcgactttaacttagcctaggatccatggccactgtgaacaactggctcgctttctccctctccccgcaggagctgccgccctcccagacgacggactccacactcatctcggccgccaccgccgaccatgtctccggcgatgtctgcttcaacatcccccaagattggagcatgaggggatcagagctttcggcgctcgtcgcggagccgaagctggaggacttcctcggcggcatctccttctccgagcagcatcacaaggccaactgcaacatgatacccagcactagcagcacagtttgctacgcgagctcaggtgctagcaccggctaccatcaccagctgtaccaccagcccaccagctcagcgctccacttcgcggactccgtaatggtggcttcctcggccggtgtccacgacggcggtgccatgctcagcgcggccgccgctaacggtgtcgctggcgctgccagtgccaacggcggcggcatcgggctgtccatgattaagaactggctgcggagccaaccggcgcccatgcagccgagggtggcggcggctgagggcgcgcaggggctctctttgtccatgaacatggcggggacgacccaaggcgctgctggcatgccacttctcgctggagagcgcgcacgggcgcccgagagtgtatcgacgtcagcacagggtggagccgtcgtcgtcacggcgccgaaggaggatagcggtggcagcggtgttgccggcgctctagtagccgtgagcacggacacgggtggcagcggcggcgcgtcggctgacaacacggcaaggaagacggtggacacgttcgggcagcgcacgtcgatttaccgtggcgtgacaaggcatagatggactgggagatatgaggcacatctttgggataacagttgcagaagggaagggcaaactcgtaagggtcgtcaagtctatttaggtggctatgataaagaggagaaagctgctagggcttatgatcttgctgctctgaagtactggggtgccacaacaacaacaaattttccagtgagtaactacgaaaaggagctcgaggacatgaagcacatgacaaggcaggagtttgtagcgtctctgagaaggaagagcagtggtttctccagaggtgcatccatttacaggggagtgactaggcatcaccaacatggaagatggcaagcacggattggacgagttgcagggaacaaggatctttacttgggcaccttcagcacccaggaggaggcagcggaggcgtacgacatcgcggcgatcaagttccgcggcctcaacgccgtcaccaacttcgacatgagccgctacgacgtgaagagcatcctggacagcagcgccctccccatcggcagcgccgccaagcgcctcaaggaggccgaggccgcagcgtccgcgcagcaccaccacgccggcgtggtgagctacgacgtcggccgcatcgcctcgcagctcggcgacggcggagccctggcggcggcgtacggcgcgcactaccacggcgccgcctggccgaccatcgcgttccagccgggcgccgccagcacaggcctgtaccacccgtacgcgcagcagccaatgcgcggcggcgggtggtgcaagcaggagcaggaccacgcggtgatcgcggccgcgcacagcctgcaggacctccaccacctgaacctgggcgcggccggcgcgcacgactttttctcggcagggcagcaggccgccgccgctgcgatgcacggcctgggtagcatcgacagtgcgtcgctcgagcacagcaccggctccaactccgtcgtctacaacggcggggtcggcgacagcaacggcgccagcgccgtcggcggcagtggcggtggctacatgatgccgatgagcgctgccggagcaaccactacatcggcaatggtgagccacgagcaggtgcatgcacgggcctacgacgaagccaagcaggctgctcagatggggtacgagagctacctggtgaacgcggagaacaatggtggcggaaggatgtctgcatgggggactgtcgtgtctgcagccgcggcggcagcagcaagcagcaacgacaacatggccgccgacgtcgggcatggcggcgcgcagctcttcagtgtctggaacgacacttaagcgtacctagtggtacctgacatcttatagtctgcaacctctcgtgtctgaattcctatctttatcaagtgttattgcttccacgactataggacagctttcgtcgaaagcttttgctcatgtgatctcgaaggattcatctagtctgatttttcgtgacttgtatcggttttattggattcatccaacatatatcaataaaaaatgagttgtgtttcctttcttcctagttcagttaaaattatttccctcctgcgcttgtgctgtaattgtctgtgtacctgttgtttgtgactgtgttagttcccttggatatgatttcgtatttgatatgtacatggagatagcttagcttcattattggagtatgaagttagtatgacatagtcactctcctggaaaattgacactgcaaaccatatttttattctgaaccacaaatcctagtcagtccgctggcatatgccgtccgtttgctgaatccagaacgtgggtttggagatgtacggctgagatgcctctatgcgaaggggatttcgtggtgaaacgagatgggagtagagcaacgcccgtggaagatgcttcaaacttccacacttttgagcaacgatcggcagtagtaaggtagacgatttcaagatcaaagcatatgaagataaacaacatcaacaacaaaatttgttggggttctatagagagaaacagagctacatacatacactgttttgtatctaccatctgagatgatgaaaagatgaaaaactaaagaatgccccggcgccaacgccaggacacgccgcgcgcgcgtcacccgagccatctcttgacccagccggcgctgtatatttacacacgttgcagcatcgatcaccacctgttcgatcgcgtcgccgtcaccggcgcgccgcgacttattgaactagtctagggcgcggctaacaacctagcttagattgccttgtctaaacccttaggctaacgcgccactctagaaggccgatctcccccgaacgcgccagatccgatatcgatgggccctggccgaagcttggtcacccgctagacgtgcgcacgataacttcgtatagcatacattatacgaagttataacagcggaccgggttaccgaattcctgcccttaaggccaattgttcaagattcattcaacaattgaaacatctcccatgattaaatcagtataaggttgctatggtcttgcttgacaaagtttttttttgagggaatttcaactaaatttttgagtgaaactatcaaatactgattttaaaaaatttttataaaaggaagcgcagagataaaaggccatctatgctacaaaagtacccaaaaatgtaatcctaaagtatgaattgcattttttttttgtttggacgaaaggaaaggagtattaccacaagaatgatatcatcttcatatttagatcttttttgggtaaagcttgagattctctaaatatagagaaatcagaagaaaaaaaaaccgtgttttggtggttttgatttctagcctccacaataactttgacggcgtcgacaagtctaacggacaccaagcagcgaaccaccagcgccgagccaagcgaagcagacggccgagacgttgacaccttcggcgcggcatctctcgagagttccgctccggcgctccacctccaccgctggcggtttcttattccgttccgttccgcctcctgctctgctcctctccacaccacacggcacgaaaccgttacggcaccggcagcacccagcacgggagaggggattcctttcccaccgttccttccctttccgccccgccgctataaatagccagccccatccccagcttttttccccaatctcatctcctctctcctgttgttcggagcacacgcacaatccgatcgatccccaaatccccttcgtctctcctcgcgagcctcgtggatcccagcttcaaggtacggcgatcgatcatcccccctccttctctctaccttcttttctctagactacatcggatggcgatccatggttagggcctgctagtttcccttcctgttttgtcgatggctgcgaggcacaatagatctgatggcgttatgacggctaacttgtcatgttgttgcgatttatagtccctttaggagatcagtttaatttctcggatggttcgagatcggtggtccatggttagtaccctaagatccgcgctgttagggttcgtagatggaggcgacctgttctgattgttaacttgtcagtacctgggaaatcctgggatggttctagctcgtccgcagatgagatcgatttcatgatcctctgtatcttgtttcgttgcctaggttccgtctaatctatccgtggtatgatgtagatgttttgatcgtgctaactacgtcttgtaaagttaattgtcaggtcataatttttagcatgcctttttttttgtttggttttgtctaattgggctgtcgttctagatcagagtagaagactgttccaaactacctgctggatttattgaacttggatctgtatgtgtgtcacatatcttcataaattcatgattaagatggattgaaatatcttttatctttttggtatggatagttctatatgttggtgtggctttgttagatgtatacatgcttagatacatgaagcaacgtgctgctactgtttagtaattgctgttcatttgtctaataaacagataaggatatgtatttatgttgctgttggttttgctggtactttgttggatacaaatgcttcaatacagaaaacagcatgctgctacgatttaccatttatctaatcttatcatatgtctaatctaataaacaaacatgcttttaaattatcttcatatgcttggatgatggcatacacagcggctatgtgtggttttttaaatacccagcatcatgggcatgcatgacactgctttaatatgctttttatttgcttgagactgtttcttttgtttatactgaccctttagttcggtgactcttctgcaggtcgactttaacttagcctaggatccatggcccagtccaagcacggcctgaccaaggagatgaccatgaagtaccgcatggagggctgcgtggacggccacaagttcgtgatcaccggcgagggcatcggctaccccttcaagggcaagcaggccatcaacctgtgcgtggtggagggcggccccttgcccttcgccgaggacatcttgtccgccgccttcatgtacggcaaccgcgtgttcaccgagtacccccaggacatcgtcgactacttcaagaactcctgccccgccggctacacctgggaccgctccttcctgttcgaggacggcgccgtgtgcatctgcaacgccgacatcaccgtgagcgtggaggagaactgcatgtaccacgagtccaagttctacggcgtgaacttccccgccgacggccccgtgatgaagaagatgaccgacaactgggagccctcctgcgagaagatcatccccgtgcccaagcagggcatcttgaagggcgacgtgagcatgtacctgctgctgaaggacggtggccgcttgcgctgccagttcgacaccgtgtacaaggccaagtccgtgccccgcaagatgcccgactggcacttcatccagcacaagctgacccgcgaggaccgcagcgacgccaagaaccagaagtggcacctgaccgagcacgccatcgcctccggctccgccttgccctccggactcagatctcgatagggtaccaatggccagttaacagatccagctgctgctgttctagggttcacaagtctgcctatttgtcttccccaatggagctatggttgtctggtctggtccttggtcgtgtcccgtttcattgtgtactatttacctgtaatgtgtatccttaagtctggtttgatggtgtctgaaacgttttgctgtggtagagcagcatggaagaactataatgaataagtgatccctaatcattgtgtccaaattttgcttctgctatacccttttgtgctgtttcttatgttttgcttaaaaatttgatctgacaaacaaatttgtctaaattatgctcttgttctgactgtgtactgtacacatttgtattgctaccggtttggcacatagttttctctttgattgcagatcaaacccttctgattgcagattgcttggctatggctgatgtgctcactgttcttctttagcttgtatattgctgatggtggcttggctacggctgaaaaagttgctgctgcgccgacttggcaactgttgctccagtaatgctttgtcctctcttcctagccgccgacttggcacttggcagctgttgctcctgtaatgcgttgttatctcttatctcttgagatgtactatgattttgaggctgtttgacttgtgccagattgccagtgctgatgctatattatctcaggtttttatgctagtatatgttttactgtgtgctgcctgtgtcgagttacgtaatctattgaaccgctatgcgtgttgatgccctgttgttgcttgccagattgatgcccctgttgcttgcagcttgcaagctgtagtgaaatcctaaaattcgaaaccaaatctattctgaacttttgaagatctgtgatgtccggaagaaaagattcaaacagataaacgggactctccagaatctataaaataaatgatcgacaaacgctttgctttggtaggcttcctagttagttagcggaccgaagcttcggtccgggcctagaaggccagcttcggccgcccctcggtaccctgggatcttccgacggcgtcttcaccgccccgccgccgcccgagccggacttgtcgctgccgccgccgctgctcatcttgcgcgcttgtgtccctccctcagtccctgcgttcgcggatcgcgggcgggtgcgacccgtttggactccggccggtagccttcgtgccgacctcgctcggtccaccggtttgtcggggacccacatgtcagtgaaggtacgcgtccacgtccacagaccctactaccccagacgagtccaaatcgctgttccctcacactctcgtgtaccagcgcgcggcggaaagcacctttccaacaaccgccgacacgtcggtcccacgtcggcatgctccaccggtcagtgtttggcgtgtacggctcccggcgacgaacgagtgtggcctaagctttcctactcccatcccatctgagccacacatctctctcacgccacgcgcacaaaacagccaggctcccacgcgcatcaaccggctctccctttccgtgccactcgcccccaagccccaaaccctcgccgccgcctccgagacagccgccgccacctaggccatggccaccgccgccgccgcgtctaccgcgctcactggcgccactaccgctgcgcccaaggcgaggcgccgggcgcacctcctggccacccgccgcgccctcgccgcgcccatcaggtgctcagcggcgtcacccgccatgccgatggctcccccggccaccccgctccggccgtggggccccaccgagccccgcaagggtgctgacatcctcgtcgagtccctcgagcgctgcggcgtccgcgacgtcttcgcctaccccggcggcgcgtcgatggagatccaccaggcactcacccgctcccccgtcatcgccaaccacctcttccgccacgagcaaggggaggcctttgccgcctccggctacgcgcgctcctcgggccgcgtcggcgtctgcatcgccacctccggccccggcgccaccaacctagtctccgcgctcgccgacgcgctgctcgattccgtcccgatggtcgccatcacgggacaggtggcgcgacgcatgattggcaccgacgccttccaggagacgcccatcgtcgaggtcacgcgctccatcaccaagcacaactacctggtcctcgacgtcgacgacatcccccgcgtcgtgcaggaggctttcttcctcgcctcctctggtcgaccagggccggtgcttgtcgacatccccaaggacatccagcagcagatggcggtgcctgtctgggacaagcccatgagtctgcctgggtacattgcgcgccttcccaagccccctgcgactgagttgcttgagcaggtgctgcgtcttgttggtgaatcgcggcgccctgttctttatgtgggcggtggctgcgcagcatctggtgaggagttgcgacgctttgtggagctgactggaatcccggtcacaactactcttatgggcctcggcaacttccccagcgacgacccactgtctctgcgcatgctaggtatgcatgggacggtgtatgcaaattatgcagtggataaggccgatctgttgcttgcacttggtgtgcggtttgatgatcgcgtgacagggaagattgaggcttttgcaagcagggctaagattgtgcacgttgatattgatccggctgagattggcaagaacaagcagccacatgtgtccatctgtgcagatgttaagcttgctttgcagggcatgaatgctcttcttgaaggaagcacatcaaagaagagctttgactttggctcatggaacgatgagttggatcagcagaagagggaattcccccttgggtataaaacatctaatgaggagatccagccacaatatgctattcaggttcttgatgagctgacgaaaggcgaggccatcatcggcacaggtgttgggcagcaccagatgtgggcggcacagtactacacttacaagcggccaaggcagtggttgtcttcagctggtcttggggctatgggatttggtttgccggctgctgctggtgcttctgtggcaaacccaggtgtcactgttgttgacatcgatggagatggtagctttctcatgaacgttcaggagctagctatgatccgaattgagaacctcccagtgaaggtctttgtgctaaacaaccagcacctggggatggtggtgcagttggaggacaggttctataaggccaacagagcgcacacatacttgggaaacccagagaatgaaagtgagatatatccagatttcgtgacgatcgccaaagggttcaacattccagccgtccgtgtgacaaagaagaacgaagtccgcgcagcgataaagaagatgctcgagactccagggccgtacctcttggatataatcgtcccacaccaggagcatgtgttgcctatgatccctagtggtggggctttcaaggatatgatcctggatggtgatggcaggactgtgtactgacttcgaataggtacccggggatcctctagtgccgtgggtcgtttaagctgccgctgtacctgtgtcgtctggtgccttctggtgtacctgggaggttgtcgtctatcaagtatctgtggttggtgtcatgagtcagtgagtcccaatactgttcgtgtcctgtgtgcattatacccaaaactgttatgggcaaatcatgaataagcttgatgttcgaacttaaaagtctctgctcaatatggtattatggttgtttttgttcgtctcctaatatttgcctgggatcaaattttattggctggtgttcatttgacctccatgttcttgctaggctccattttttactctacagccataatatgtttgattgtttggtttgttctttgttgtacacctggttctgtcgagcttagttttcgacactggcttacagcttaacatgttgctattttattgggttctgattgctattttattgggttctgattgctagtttttgctgaatccaaaaaccatgttatttatttaagcgatccaggttattattatgatggtggctaagtttttttttttccaagggtaaattttctggattctccagtgtttctgtggccgaattcaatcactagagtcgacctgcaaagcttcggtccgggcctagaaggcccgcgccacttacgcttgattccgatgacttcgtaggttcctagctcaagccgctcgtgtccaagcgtcacttacgattagctaatgattacggcatctaggaccgactagttcttatgtgcttctagtctccaaatgtggttgatagttattttgctctaagatcaacagtaatgaagtataaatcatcgttgtggtgtgctactcggttaattgagcattaacacacacaaacatgacgaggatggtataatctccaaaaatgtgtactttgttaggtgggaccctatagccttgattaatgtgctatgttaggcatgcctggaaacgtgtgacgcatatgttttgtgaacctgttgatattatatgtgcttttatattaccatattttattaaaatactaatatttattactagtaagatataacattctatctagcttaaaaactaaccataaatattccataataactagatttaccaaactaatatactaaatatacataataaatacaaaattaacaagacaataatcaatatttatgagcttaatatatttagacattatggttggtcgacgataatcatgctaacttttcgtaattgcttgattgaaatatgcttagaataatgcctctttgttctacatggcaaatagggaccattatggtgtaacaccctgggaaccacaaacaccccgaaatgctactaaactacacaactaaccttcatatataaaatttcgacagcatctcctttgaaaatttgcatagacgtggaagcaacagagtataaacagatctgcgtttaaacgtgcaagcgctactagacaattcagtacattaaaaacgtccgcaatgtgttattaagttgtctaagcgtcaatttgtttacaccacaatatatcctgcca

SEQ ID NO: 84 - DNA, 31400 bp, synthetic construct
  misc_feature 1..31400: note = PHP97933
  source 1..31400: mol_type = other DNA
gtttacccgccaatatatcctgtcaaacactgcggccgcacttgaccgcggatggagccggagctgtggtgaggccatcgacgggaggtgggggagaacacagtctcagtgttctttgtgagtccgcaaggtttttagcttttctgtattaattaaggttgctgttggctgtagaatacggtcgtggaagagctgtatcggtagctactacgtaagctattatatactggaagtctggagctcgtcgatctccggtcgtcttcctccatttctcctcgtcttgctttgactgctgctaccatttgcttctgttttctgatgaagcatgccatgtcggccaccagtgtttgtgtggtttttgcagggaatggctttcaagtgctgtgattgaatggccctcgtcgtcctcggctgagctcacatggacgcgtcatgtgagtgagatatatgatcatatgatgagtggggttcgggtgagtgcgtacttgaagtaggatcccgctttcactcattcattcattggcctttaaaccgggaaattttcgcgaggagatggagggaagcaagcagggtgacgagtgcagagtgccgcgagcgctttgtcaaaaggcaccgccgtaggcaaaaaaatcaatggccctgactgactcgatggtagtactactgtagagactagagagggttgctccccatatcttcgtgtgacttttactccagcattgcatttccgtcattgagacgttaattaatagcagctttcgggacagatgactgtggccatgtttcgtcacggccgcttcgtgccagctgggggtactatagtactgtgattttgttagtaaaaactttcattaggccaccattgacgaccgggccttcgcttttgctgcgctaattaaccatttcccggcgaccgaagggaacatgaacatgccccgacacatgagggcatgaggactagtgttctccctgtcgttcgttgacttgactagtgatagtttaaacgctcttcaactggaagagcggttactaccggttcactagctagctgctaatcgagctagttaccctatgaggtgacatgaagcgctcacggttactatgacggttagcttcacgactgttggtggcagtagcgtacgacttagctatagttccggacttacctagctaataacttcgtatagcatacattatacgaagttatggttaccgagctgttaccaagcggccgcacactgatagtttaaactgaaggcgggaaacgacaatctgatcatgagcggagaattaagggagtcacgttatgacccccgccgatgacgcgggacaagccgttttacgtttggaactgacagaaccgcaacgattgaaggagccactcagccgcgggtttctggagtttaatgagctaagcacatacgtcagaaaccattattgcgcgttcaaaagtcgcctaaggtcactatcagctagcaaatatttcttgtcaaaaatgctccactgacgttccataaattcccctcggtatccaattagagtctcatattcactcccatggcggccaatgcgggcggcggtggagcgggaggaggcagcggcagcggcagcgtggctgcgccggcggtgtgccgccccagcggctcgcggtggacgccgacgccggagcagatcaggatgctgaaggagctctactacggctgcggcatccggtcgcccagctcggagcagatccagcgcatcaccgccatgctgcggcagcacggcaagatcgagggcaagaacgtcttctactggttccagaaccacaaggcccgcgagcgccagaagcgccgcctcaccagcctcgacgtcaacgtgcccgccgccggcgcggccgacgccaccaccagccaactcggcgtcctctcgctgtcgtcgccgccgccttcaggcgcggcgcctccctcgcccaccctcggcttctacgccgccggcaatggcggcggatcggctgtgctgctggacacgagttccgactggggcagcagcggcgctgctatggccaccgagacatgcttcctgcaggactacatgggcgtgacggacacgggcagctcgtcgcagtggccacgcttctcgtcgtcggacacgataatggcggcggccgcggcgcgggcggcgacgacgcgggcgcccgagacgctccctctcttcccgacctgcggcgacgacggcggcagcggtagcagcagctacttgccgttctggggtgccgcgtccacaactgccggcgccacttcttccgttgcgatccaacagcaacaccagctgcaggagcagtacagcttttacagcaacagcaacagcacccagctggccggcaccggcaaccaagacgtatcggcaacagcagcagcagccgccgccctggagctgagcctcagctcatggtgctccccttaccctgctgcagggagtatgtgagagcaacgcgagctgccactgctcttcactgatgtctctggaatggaaggaggaggaagtgagaacagatcattcgacaaagcagcattagtccgttgatcggtggaagaccactcgtcagtgttgagttgaatgtttgatcaataaaatacggcaatgctgtaagggttgttttttatgccattgataatacactgtactgttcagttgttgaactctatttcttagccatgccaagtgcttttcttattttgaataacattacagcaaaaagttgaaagacaaaaaaaaaaacccccgaacagagtgctttgggtcccaagcttctttagactgtgttcggcgttccccctaaatttctccccctatatctcactcacttgtcacatcagcgttctctttccccctatatctccacgctctacagcagttccacctatatcaaacctctataccccaccacaacaatattatatactttcatcttcaactaactcatgtaccttccaatttttttctactaataattatttacgtgcacagaaacttagcaaggagagagagagcgggaatttaaatgctcggcgttaggcttttagtccgctaggtggctagaccgaggttaggacgctagttcactaggggcctagtggtgttttaagacgtcacggtcactacgaatcgaccgaagcttgcatgggccgcatcgagcagctggcttgtggggaccagacaaaaaaggaatggtgcagaattgttaggcgcacctaccaaaagcatctttgcctttattgcaaagataaagcagattcctctagtacaagtggggaacaaaataacgtggaaaagagctgtcctgacagcccactcactaatgcgtatgacgaacgcagtgacgaccacaaaactcgagcaacgagatcatgagccaatcaaagaggagtgatgtagacctaaagcaataatggagccatgacgtaagggcttacgcccatacgaaataattaaaggctgatgtgacctgtcggtctctcagaacctttactttttatgtttggcgtgtatttttaaatttccacggcaatgacgatgtgaccgtcgacccactaaaacattgctttgtcaaaagctaaaaaagatgatgcccgacagccacttgtgtgaagcatgagaagccggtccctccactaagaaaattagtgaagcatcttccagtggtccctccactcacagctcaatcagtgagcaacaggacgaaggaaatgacgtaagccatgacgtctaatcccagggccagcttgcatgcctgcagtgcagcgtgacccggtcgtgcccctctctagagataatgagcattgcatgtctaagttataaaaaattaccacatattttttttgtcacacttgtttgaagtgcagtttatctatctttatacatatatttaaactttactctacgaataatataatctatagtactacaataatatcagtgttttagagaatcatataaatgaacagttagacatggtctaaaggacaattgagtattttgacaacaggactctacagttttatctttttagtgtgcatgtgttctcctttttttttgcaaatagcttcacctatataatacttcatccattttattagtacatccatttagggtttagggttaatggtttttatagactaatttttttagtacatctattttattctattttagcctctaaattaagaaaactaaaactctattttagtttttttatttaataatttagatataaaatagaataaaataaagtgactaaaaattaaacaaataccctttaagaaattaaaaaaactaaggaaacatttttcttgtttcgagtagataatgccagcctgttaaacgccgtcgacgagtctaacggacaccaaccagcgaaccagcagcgtcgcgtcgggccaagcgaagcagacggcacggcatctctgtcgctgcctctggacccctctcgagagttccgctccaccgttggacttgctccgctgtcggcatccagaaattgcgtggcggagcggcagacgtgagccggcacggcaggcggcctcctcctcctctcacggcaccggcagctacgggggattcctttcccaccgctccttcgctttcccttcctcgcccgccgtaataaatagacaccccctccacaccctctttccccaacctcgtgttgttcggagcgcacacacacacaaccagatctcccccaaatccacccgtcggcacctccgcttcaaggtacgccgctcgtcctcccccccccccctctctaccttctctagatcggcgttccggtccatgcatggttagggcccggtagttctacttctgttcatgtttgtgttagatccgtgtttgtgttagatccgtgctgctagcgttcgtacacggatgcgacctgtacgtcagacacgttctgattgctaacttgccagtgtttctctttggggaatcctgggatggctctagccgttccgcagacgggatcgatttcatgattttttttgtttcgttgcatagggtttggtttgcccttttcctttatttcaatatatgccgtgcacttgtttgtcgggtcatcttttcatgcttttttttgtcttggttgtgatgatgtggtctggttgggcggtcgttctagatcggagtagaattctgtttcaaactacctggtggatttattaattttggatctgtatgtgtgtgccatacatattcatagttacgaattgaagatgatggatggaaatatcgatctaggataggtatacatgttgatgcgggttttactgatgcatatacagagatgctttttgttcgcttggttgtgatgatgtggtgtggttgggcggtcgttcattcgttctagatcggagtagaatactgtttcaaactacctggtgtatttattaattttggaactgtatgtgtgtgtcatacatcttcatagttacgagtttaagatggatggaaatatcgatctaggataggtatacatgttgatgtgggttttactgatgcatatacatgatggcatatgcagcatctattcatatgctctaaccttgagtacctatctattataataaacaagtatgttttataattattttgatcttgatatacttggatgatggcatatgcagcagctatatgtggatttttttagccctgccttcatacgctatttatttgcttggtactgtttcttttgtcgatgctcaccctgttgtttggtgttacttctgcaggtcgactttaacttagcctaggatccatggccactgtgaacaactggctcgctttctccctctccccgcaggagctgccgccctcccagacgacggactccacactcatctcggccgccaccgccgaccatgtctccggcgatgtctgcttcaacatcccccaagattggagcatgaggggatcagagctttcggcgctcgtcgcggagccgaagctggaggacttcctcggcggcatctccttctccgagcagcatcacaaggccaactgcaacatgatacccagcactagcagcacagtttgctacgcgagctcaggtgctagcaccggctaccatcaccagctgtaccaccagcccaccagctcagcgctccacttcgcggactccgtaatggtggcttcctcggccggtgtccacgacggcggtgccatgctcagcgcggccgccgctaacggtgtcgctggcgctgccagtgccaacggcggcggcatcgggctgtccatgattaagaactggctgcggagccaaccggcgcccatgcagccgagggtggcggcggctgagggcgcgcaggggctctctttgtccatgaacatggcggggacgacccaaggcgctgctggcatgccacttctcgctggagagcgcgcacgggcgcccgagagtgtatcgacgtcagcacagggtggagccgtcgtcgtcacggcgccgaaggaggatagcggtggcagcggtgttgccggcgctctagtagccgtgagcacggacacgggtggcagcggcggcgcgtcggctgacaacacggcaaggaagacggtggacacgttcgggcagcgcacgtcgatttaccgtggcgtgacaaggcatagatggactgggagatatgaggcacatctttgggataacagttgcagaagggaagggcaaactcgtaagggtcgtcaagtctatttaggtggctatgataaagaggagaaagctgctagggcttatgatcttgctgctctgaagtactggggtgccacaacaacaacaaattttccagtgagtaactacgaaaaggagctcgaggacatgaagcacatgacaaggcaggagtttgtagcgtctctgagaaggaagagcagtggtttctccagaggtgcatccatttacaggggagtgactaggcatcaccaacatggaagatggcaagcacggattggacgagttgcagggaacaaggatctttacttgggcaccttcagcacccaggaggaggcagcggaggcgtacgacatcgcggcgatcaagttccgcggcctcaacgccgtcaccaacttcgacatgagccgctacgacgtgaagagcatcctggacagcagcgccctccccatcggcagcgccgccaagcgcctcaaggaggccgaggccgcagcgtccgcgcagcaccaccacgccggcgtggtgagctacgacgtcggccgcatcgcctcgcagctcggcgacggcggagccctggcggcggcgtacggcgcgcactaccacggcgccgcctggccgaccatcgcgttccagccgggcgccgccagcacaggcctgtaccacccgtacgcgcagcagccaatgcgcggcggcgggtggtgcaagcaggagcaggaccacgcggtgatcgcggccgcgcacagcctgcaggacctccaccacctgaacctgggcgcggccggcgcgcacgactttttctcggcagggcagcaggccgccgccgctgcgatgcacggcctgggtagcatcgacagtgcgtcgctcgagcacagcaccggctccaactccgtcgtctacaacggcggggtcggcgacagcaacggcgccagcgccgtcggcggcagtggcggtggctacatgatgccgatgagcgctgccggagcaaccactacatcggcaatggtgagccacgagcaggtgcatgcacgggcctacgacgaagccaagcaggctgctcagatggggtacgagagctacctggtgaacgcggagaacaatggtggcggaaggatgtctgcatgggggactgtcgtgtctgcagccgcggcggcagcagcaagcagcaacgacaacatggccgccgacgtcgggcatggcggcgcgcagctcttcagtgtctggaacgacacttaagcgtacctagtggtacctgacatcttatagtctgcaacctctcgtgtctgaattcctatctttatcaagtgttattgcttccacgactataggacagctttcgtcgaaagcttttgctcatgtgatctcgaaggattcatctagtctgatttttcgtgacttgtatcggttttattggattcatccaacatatatcaataaaaaatgagttgtgtttcctttcttcctagttcagttaaaattatttccctcctgcgcttgtgctgtaattgtctgtgtacctgttgtttgtgactgtgttagttcccttggatatgatttcgtatttgatatgtacatggagatagcttagcttcattattggagtatgaagttagtatgacatagtcactctcctggaaaattgacactgcaaaccatatttttattctgaaccacaaatcctagtcagtccgctggcatatgccgtccgtttgctgaatccagaacgtgggtttggagatgtacggctgagatgcctctatgcgaaggggatttcgtggtgaaacgagatgggagtagagcaacgcccgtggaagatgcttcaaacttccacacttttgagcaacgatcggcagtagtaaggtagacgatttcaagatcaaagcatatgaagataaacaacatcaacaacaaaatttgttggggttctatagagagaaacagagctacatacatacactgttttgtatctaccatctgagatgatgaaaagatgaaaaactaaagaatgccccggcgccaacgccaggacacgccgcgcgcgcgtcacccgagccatctcttgacccagccggcgctgtatatttacacacgttgcagcatcgatcaccacctgttcgatcgcgtcgccgtcaccggcgcgccgcgacttattgaactagtctagggcgcggctaacaacctagcttagattgccttgtctaaacccttaggctaacgcgccactctagaaggccgatctcccccgaacgcgccagatccgatatcgatgggccctggccgaagcttggtcacccgcaccttgctagttggatattacctcttctcttcaaagtatccttgaacgctcaccggttatcaaatctctacactatagctctgtagtcttgctagatagttagttctttagctctctctagaggttcacaaactcaatacaacacacagtggagtagggtattacgctccggcggcccgaaccactctaaatccttgtgtcctcgtgtgctcttccaccattaatgactgtaattgcagggacacgaagagttgtagcgcttttgccaacaagatccgctatatgctagtagagtggaacctgcacagcaacaagcatccaataatctgagaataagaattatgtgtggtgatggttctcatctctgcaactcgccattttcgcgagagaaccaaatccaagttggtgaagatcatgatttgggctcatgggctggcatagtagctattacctttgcaattgtggttcgaatctatccgatattctccttttcagggagagctaatgcttatgcttattgggtattttggtttgacactgcttcacgcccaaaaaaaggcaactatgtctgagttggatatggcccaaaaaaaggcagctatgtctgagttggatatggaagtcttctttcgtttagggtgaagtaagaccaagctcatgagcttattatcttaggtcggaacaaattagttgataggcatggcacatttatcaaattataatgattttaacagaaaagcaacacctctttttcagcagcaccagctttgcaagctgcaattgacactccaagcatagtatttgctccaaactcagcctgcatttcgcacaatatcatatctatttccatttggataaaatatattttccagaaatatgggaacagaatcaagatacagaaaaaagttgtggtagtagtggtaagtggaaacacaagtacagtgaaaagatagcattatttctgaacagtcaaattaaccgaaataagtagtatcacatactgcccctaaattgactacacccaatgtaaagaattgcttgagcatattgagccatcagttgtttgtttgtgtaacggatttgacaatgcagagttcaggagcaaaaaaccgcaaaggagagaaagagggaaaggatctcctagtatcccaccttgtggcgcgccctgtcaagtgcatgatggcctggtcgatctgcgtctgctgctgcggttccatcccaacgagtgcctccgacaccttgtcgttgatcacccgcaccgcgtaggcgacccccctggcgaggaacttccgcctctcggaggccccggccgcgtcggcggcggcgccctcgagcgcgcccacgctagccgtagatgctcggtgcacggccttgttggtgtgcaactcgacctcaacggccggtgcgctacgcccgtcaaggatctggcgcgcccgcaccctcgtgatcacggtgggcgcctcccgcctcatgtggccgacgatgaaaagcgccgggttaggggccttggcgcgcaccgccgtattcagggcctcctcgctcttgcgcgagagcaggtgcttccccaggtactcctgcactgacaaggctgccacagcggtggaatttgtcctcacgacttcgccacgtcgtcctcacctccctggcttcccacgactccgccgtatcgaggtgctcggtgggtcgtcttaatccgaagtccgaactaggaagacgagacagagaggtctgaggaatgggcctcgtttgatgttgagctgaattatttttccagcataagcccaggtcttggtccatgaacaaaattactagaaacccagcccagtactacgatctaaaagagggactgccactggatagctctctctagcattctccacgctccaatacagcggcgtcgtgtctatccgggtctatccgcgaacacgtgagaactctccagaaactgctttctcctccacttcatctctctcgctttccctctataaaaagaccccttctaggaattgagggagacagcaagcaccaagcagcgatccgaagctcaatcaattcactcaaacctcttccccaaatcttcgattagatcttcgttgacaagaagactagaaccgaacctgacatgtccaacctgctcacggttcaccagaaccttccggctcttccagtggacgcgacgtccgatgaagtcaggaagaacctcatggacatgttccgcgacaggcaagcgttcagcgagcacacctggaagatgctgctctccgtctgccgctcctgggctgcatggtgcaagctgaacaacaggaagtggttccccgctgagcccgaggacgtgagggattaccttctgtacctgcaagcgcgaggtttgtttctgcttctacctttgatatatatataataattatcattaattagtagtaatataatatttcaaatatttttttcaaaataaaagaatgtagtatatagcaattgcttttctgtagtttataagtgtgtatattttaatttataacttttctaatatatgaccaaaacatggtgatgcctaggtctggcagtgaagaccatccagcaacaccttggacaactgaacatgcttcacaggcgctccggcctcccgcgccccagcgactcgaacgccgtgagcctcgtcatgcgccgcatcaggaaggaaaacgtcgatgccggcgaaagggcaaagcaggccctcgcgttcgagaggaccgatttcgaccaggtccgcagcctgatggagaacagcgacaggtgccaggacattaggaacctggcgttcctcggaattgcatacaacacgctcctcaggatcgcggaaattgcccgcattcgcgtgaaggacattagccgcaccgacggcggcaggatgcttatccacattggcaggaccaagacgctcgtttccaccgcaggcgtcgaaaaggccctcagcctcggagtgaccaagctcgtcgaacgctggatctccgtgtccggcgtcgcggacgacccaaacaactacctcttctgccgcgtccgcaagaacggggtggctgcccctagcgccaccagccaactcagcacgagggccttggaaggtattttcgaggccacccaccgcctgatctacggcgcgaaggatgacagcggtcaacgctacctcgcatggtccgggcactccgcccgcgttggagctgctagggacatggcccgcgccggtgtttccatccccgaaatcatgcaggcgggtggatggacgaacgtgaacattgtcatgaactacattcgcaaccttgacagcgagacgggcgcaatggttcgcctcctggaagatggtgactgaggtacccaacctagacttgtccatcttctggattggccaacttaattaatgtatgaaataaaaggatgcacacatagtgacatgctaatcactataatgtgggcatcaaagttgtgtgttatgtgtaattactagttatctgaataaaagagaaagagatcatccatatttcttatcctaaatgaatgtcacgtgtctttataattctttgatgaaccagatgcatttcattaaccaaatccatatacatataaatattaatcatatataattaatatcaattgggttagcaaaacaaatctagtctaggtgtgttttgcgatccgatatcgacgtctaaaaacggcccctaactaacgcttagttgcccgctagattagtcccccgttagtgcctagttagacacacgacgaactaggggctagtgccaccttgctagttggatattacctcttctcttcaaagtatccttgaacgctcaccggttatcaaatctctacactatagctctgtagtcttgctagatagttagttctttagctctcgcacgcaactttgtatagaaaagttgggccgaattcgagctcggtacggccagaatggcccggaccgaagcttgcatgcctgcagtgcagcgtgacccggtcgtgcccctctctagagataatgagcattgcatgtctaagttataaaaaattaccacatattttttttgtcacacttgtttgaagtgcagtttatctatctttatacatatatttaaactttactctacgaataatataatctatagtactacaataatatcagtgttttagagaatcatataaatgaacagttagacatggtctaaaggacaattgagtattttgacaacaggactctacagttttatctttttagtgtgcatgtgttctcctttttttttgcaaatagcttcacctatataatacttcatccattttattagtacatccatttagggtttagggttaatggtttttatagactaatttttttagtacatctattttattctattttagcctctaaattaagaaaactaaaactctattttagtttttttatttaataatttagatataaaatagaataaaataaagtgactaaaaattaaacaaataccctttaagaaattaaaaaaactaaggaaacatttttcttgtttcgagtagataatgccagcctgttaaacgccgtcgacgagtctaacggacaccaaccagcgaaccagcagcgtcgcgtcgggccaagcgaagcagacggcacggcatctctgtcgctgcctctggacccctctcgagagttccgctccaccgttggacttgctccgctgtcggcatccagaaattgcgtggcggagcggcagacgtgagccggcacggcaggcggcctcctcctcctctcacggcaccggcagctacgggggattcctttcccaccgctccttcgctttcccttcctcgcccgccgtaataaatagacaccccctccacaccctctttccccaacctcgtgttgttcggagcgcacacacacacaaccagatctcccccaaatccacccgtcggcacctccgcttcaaggtacgccgctcgtcctcccccccccccctctctaccttctctagatcggcgttccggtccatgcatggttagggcccggtagttctacttctgttcatgtttgtgttagatccgtgtttgtgttagatccgtgctgctagcgttcgtacacggatgcgacctgtacgtcagacacgttctgattgctaacttgccagtgtttctctttggggaatcctgggatggctctagccgttccgcagacgggatcgatttcatgattttttttgtttcgttgcatagggtttggtttgcccttttcctttatttcaatatatgccgtgcacttgtttgtcgggtcatcttttcatgcttttttttgtcttggttgtgatgatgtggtctggttgggcggtcgttctagatcggagtagaattctgtttcaaactacctggtggatttattaattttggatctgtatgtgtgtgccatacatattcatagttacgaattgaagatgatggatggaaatatcgatctaggataggtatacatgttgatgcgggttttactgatgcatatacagagatgctttttgttcgcttggttgtgatgatgtggtgtggttgggcggtcgttcattcgttctagatcggagtagaatactgtttcaaactacctggtgtatttattaattttggaactgtatgtgtgtgtcatacatcttcatagttacgagtttaagatggatggaaatatcgatctaggataggtatacatgttgatgtgggttttactgatgcatatacatgatggcatatgcagcatctattcatatgctctaaccttgagtacctatctattataataaacaagtatgttttataattattttgatcttgatatacttggatgatggcatatgcagcagctatatgtggatttttttagccctgccttcatacgctatttatttgcttggtactgtttcttttgtcgatgctcaccctgttgtttggtgttacttctgcaggtcgactttaacttagcctaggatccatggcaccgaagaagaagcgcaaggtgatggacaagaagtacagcatcggcctcgacatcggcaccaactcggtgggctgggccgtcatcacggacgaatataaggtcccgtcgaagaagttcaaggtcctcggcaatacagaccgccacagcatcaagaaaaacttgatcggcgccctcctgttcgatagcggcgagaccgcggaggcgaccaggctcaagaggaccgccaggagacggtacactaggcgcaagaacaggatctgctacctgcaggagatcttcagcaacgagatggcgaaggtggacgactccttcttccaccgcctggaggaatcattcctggtggaggaggacaagaagcatgagcggcacccaatcttcggcaacatcgtcgacgaggtaagtttctgcttctacctttgatatatatataataattatcattaattagtagtaatataatatttcaaatatttttttcaaaataaaagaatgtagtatatagcaattgcttttctgtagtttataagtgtgtatattttaatttataacttttctaatatatgaccaaaacatggtgatgtgcaggtggcctaccacgagaagtacccgacaatctaccacctccggaagaaactggtggacagcacagacaaggcggacctccggctcatctaccttgccctcgcgcatatgatcaagttccgcggccacttcctcatcgagggcgacctgaacccggacaactccgacgtggacaagctgttcatccagctcgtgcagacgtacaatcaactgttcgaggagaaccccataaacgctagcggcgtggacgccaaggccatcctctcggccaggctctcgaaatcaagaaggctggagaaccttatcgcgcagttgccaggcgaaaagaagaacggcctcttcggcaaccttattgcgctcagcctcggcctgacgccgaacttcaaatcaaacttcgacctcgcggaggacgccaagctccagctctcaaaggacacctacgacgacgacctcgacaacctcctggcccagataggagaccagtacgcggacctcttcctcgccgccaagaacctctccgacgctatcctgctcagcgacatccttcgggtcaacaccgaaattaccaaggcaccgctgtccgccagcatgattaaacgctacgacgagcaccatcaggacctcacgctgctcaaggcactcgtccgccagcagctccccgagaagtacaaggagatcttcttcgaccaatcaaaaaacggctacgcgggatatatcgacggcggtgccagccaggaagagttctacaagttcatcaaaccaatcctggagaagatggacggcaccgaggagttgctggtcaagctcaacagggaggacctcctcaggaagcagaggaccttcgacaacggctccatcccgcatcagatccacctgggcgaactgcatgccatcctgcggcgccaggaggacttctacccgttcctgaaggataaccgggagaagatcgagaagatcttgacgttccgcatcccatactacgtgggcccgctggctcgcggcaactcccggttcgcctggatgacccggaagtcggaggagaccatcacaccctggaactttgaggaggtggtcgataagggcgctagcgctcagagcttcatcgagcgcatgaccaacttcgataaaaacctgcccaatgaaaaagtcctccccaagcactcgctgctctacgagtacttcaccgtgtacaacgagctcaccaaggtcaaatacgtcaccgagggcatgcggaagccggcgttcctgagcggcgagcagaagaaggcgatagtggacctcctcttcaagaccaacaggaaggtgaccgtgaagcaattaaaagaggactacttcaagaaaatagagtgcttcgactccgtggagatctcgggcgtggaggatcggttcaacgcctcactcggcacgtatcacgacctcctcaagatcattaaagacaaggacttcctcgacaacgaggagaacgaggacatcctcgaggacatcgtcctcaccctgaccctgttcgaggaccgcgaaatgatcgaggagaggctgaagacctacgcgcacctgttcgacgacaaggtcatgaaacagctcaagaggcgccgctacactggttggggaaggctgtcccgcaagctcattaatggcatcagggacaagcagagcggcaagaccatcctggacttcctcaagtccgacgggttcgccaaccgcaacttcatgcagctcattcacgacgactcgctcacgttcaaggaagacatccagaaggcacaggtgagcgggcagggtgactccctccacgaacacatcgccaacctggccggctcgccggccattaaaaagggcatcctgcagacggtcaaggtcgtcgacgagctcgtgaaggtgatgggccggcacaagcccgaaaatatcgtcatagagatggccagggagaaccagaccacccaaaaagggcagaagaactcgcgcgagcggatgaaacggatcgaggagggcattaaagagctcgggtcccagatcctgaaggagcaccccgtggaaaatacccagctccagaatgaaaagctctacctctactacctgcagaacggccgcgacatgtacgtggaccaggagctggacattaatcggctatcggactacgacgtcgaccacatcgtgccgcagtcgttcctcaaggacgatagcatcgacaacaaggtgctcacccggtcggataaaaatcggggcaagagcgacaacgtgcccagcgaggaggtcgtgaagaagatgaaaaactactggcgccagctcctcaacgcgaaactgatcacccagcgcaagttcgacaacctgacgaaggcggaacgcggtggcttgagcgaactcgataaggcgggcttcataaaaaggcagctggtcgagacgcgccagatcacgaagcatgtcgcccagatcctggacagccgcatgaatactaagtacgatgaaaacgacaagctgatccgggaggtgaaggtgatcacgctgaagtccaagctcgtgtcggacttccgcaaggacttccagttctacaaggtccgcgagatcaacaactaccaccacgcccacgacgcctacctgaatgcggtggtcgggaccgccctgatcaagaagtacccgaagctggagtcggagttcgtgtacggcgactacaaggtctacgacgtgcgcaaaatgatcgccaagtccgagcaggagatcggcaaggccacggcaaaatacttcttctactcgaacatcatgaacttcttcaagaccgagatcaccctcgcgaacggcgagatccgcaagcgcccgctcatcgaaaccaacggcgagacgggcgagatcgtctgggataagggccgggatttcgcgacggtccgcaaggtgctctccatgccgcaagtcaatatcgtgaaaaagacggaggtccagacgggcgggttcagcaaggagtccatcctcccgaagcgcaactccgacaagctcatcgcgaggaagaaggattgggacccgaaaaaatatggcggcttcgacagcccgaccgtcgcatacagcgtcctcgtcgtggcgaaggtggagaagggcaagtcaaagaagctcaagtccgtgaaggagctgctcgggatcacgattatggagcggtcctccttcgagaagaacccgatcgacttcctagaggccaagggatataaggaggtcaagaaggacctgattattaaactgccgaagtactcgctcttcgagctggaaaacggccgcaagaggatgctcgcctccgcaggcgagttgcagaagggcaacgagctcgccctcccgagcaaatacgtcaatttcctgtacctcgctagccactatgaaaagctcaagggcagcccggaggacaacgagcagaagcagctcttcgtggagcagcacaagcattacctggacgagatcatcgagcagatcagcgagttctcgaagcgggtgatcctcgccgacgcgaacctggacaaggtgctgtcggcatataacaagcaccgcgacaaaccaatacgcgagcaggccgaaaatatcatccacctcttcaccctcaccaacctcggcgctccggcagccttcaagtacttcgacaccacgattgaccggaagcggtacacgagcacgaaggaggtgctcgatgcgacgctgatccaccagagcatcacagggctctatgaaacacgcatcgacctgagccagctgggcggagacaagagaccacgggaccgccacgatggcgagctgggaggccgcaagcgggcaaggtaggtaccgttaacctagacttgtccatcttctggattggccaacttaattaatgtatgaaataaaaggatgcacacatagtgacatgctaatcactataatgtgggcatcaaagttgtgtgttatgtgtaattactagttatctgaataaaagagaaagagatcatccatatttcttatcctaaatgaatgtcacgtgtctttataattctttgatgaaccagatgcatttcattaaccaaatccatatacatataaatattaatcatatataattaatatcaattgggttagcaaaacaaatctagtctaggtgtgttttgccccgggttaacggcaaacgctaattagtcactaggcccaggaaacactaactaagccctagcttatcctagcgcaacctagttaggtcttccccaagtttgtacaaaaaagcaggctccggccagaatggcccggaccgggttaccgaattcgagctcggtaccctgggatccgatatcgatgggccctggccgaagctttgagagtacaatgatgaacctagattaatcaatgccaaagtctgaaaaatgcaccctcagtctatgatccagaaaatcaagattgcttgaggccctgttcggttgttccggattagagccccggattaattcctagccggattacttctctaatttatatagattttgatgagctggaatgaatcctggcttattccggtacaaccgaacaggccctgaaggataccagtaatcgctgagctaaattggcatgctgtcagagtgtcagtattgcagcaaggtagtgagataaccggcatcatggtgccagtttgatggcaccattagggttagagatggtggccatgggcgcatgtcctggccaactttgtatgatatatggcagggtgaataggaaagtaaaattgtattgtaaaaagggatttcttctgtttgttagcgcatgtacaaggaatgcaagttttgagcgagggggcatcaaagatctggctgtgtttccagctgtttttgttagccccatcgaatccttgacataatgatcccgcttaaataagcaacctcgcttgtatagttccttgtgctctaacacacgatgatgataagtcgtaaaatagtggtgtccaaagaatttccaggcccagttgtaaaagctaaaatgctattcgaatttctactagcagtaagtcgtgtttagaaattatttttttatataccttttttccttctatgtacagtaggacacagtgtcagcgccgcgttgacggagaatatttgcaaaaaagtaaaagagaaagtcatagcggcgtatgtgccaaaaacttcgtcacagagagggccataagaaacatggcccacggcccaatacgaagcaccgcgacgaagcccaaacagcagtccgtaggtggagcaaagcgctgggtaatacgcaaacgttttgtcccaccttgactaatcacaagagtggagcgtaccttataaaccgagccgcaagcaccgaattgcccaaaacgctttcccgatgttttagagctagaaatagcaagttaaaataaggctagtccgttatcaacttgaaaaagtggcaccgagtcggtgctttttttttgcggccgcgaattcctgcagggccctcttgtcggaccagttgcccaccacgttggtgaggggcacccagctttcttgtacaaagtggccgttaacggatcggccagaatggcccggaccgggttaccgaattcgagctcggtaccctgggatccgatatcgatgggccctggccgaagctttgagagtacaatgatgaacctagattaatcaatgccaaagtctgaaaaatgcaccctcagtctatgatccagaaaatcaagattgcttgaggccctgttcggttgttccggattagagccccggattaattcctagccggattacttctctaatttatatagattttgatgagctggaatgaatcctggcttattccggtacaaccgaacaggccctgaaggataccagtaatcgctgagctaaattggcatgctgtcagagtgtcagtattgcagcaaggtagtgagataaccggcatcatggtgccagtttgatggcaccattagggttagagatggtggccatgggcgcatgtcctggccaactttgtatgatatatggcagggtgaataggaaagtaaaattgtattgtaaaaagggatttcttctgtttgttagcgcatgtacaaggaatgcaagttttgagcgagggggcatcaaagatctggctgtgtttccagctgtttttgttagccccatcgaatccttgacataatgatcccgcttaaataagcaacctcgcttgtatagttccttgtgctctaacacacgatgatgataagtcgtaaaatagtggtgtccaaagaatttccaggcccagttgtaaaagctaaaatgctattcgaatttctactagcagtaagtcgtgtttagaaattatttttttatataccttttttccttctatgtacagtaggacacagtgtcagcgccgcgttgacggagaatatttgcaaaaaagtaaaagagaaagtcatagcggcgtatgtgccaaaaacttcgtcacagagagggccataagaaacatggcccacggcccaatacgaagcaccgcgacgaagcccaaacagcagtccgtaggtggagcaaagcgctgggtaatacgcaaacgttttgtcccaccttgactaatcacaagagtggagcgtaccttataaaccgagccgcaagcaccgaattgcaatataaaattaccgatgttttagagctagaaatagcaagttaaaataaggctagtccgttatcaacttgaaaaagtggcaccgagtcggtgctttttttttgcggccgcgaattcctgcagggccctcttgtcggaccagttgcccaccacgttggtgaggggcaactttattatacaaagttgatagatatcatttaaatcctaaggacccggcggaccgattaaactgattcggtccgacgcgttacctaataacttcgtatagcatacattatacgaagttattagctaactaactagtaagcttaagccatgggtcgacggatccgttaactcacttaagatgtactcgacaatggtgccctcataccggcatgtgtttcctagaaataatcaatatattgattgagatttatctcgatatatttctgaactatgttcatcatataaataactgaaaacatcaaatcgtaattttaaactcatgcttggtcaatacatagataatacaatattacttcatcatcccaatgatgtcctagcacaacctattgaatgttaatgtttggttgtgtgggggtgtgtttataacatagatgtgattatttgtgctttttgttgagtatatacatatatggtatgttgatttgatatagtgatggacacatgctttggccttggatattcaaatcacttgtacttgcacgaagcaaaacataatataagtttagaagtaaacttgtaactgtgtccaaacatgctcacacaaagtcatatcgcattatatttttttggtaaatattcaacacatgtattttttacaagaacccaaattttacagacaaatgcagcattgtagacatgtagaattctttgaagcatgtgaacttaacaacactaatgtcattaaatcaactggaccctatgagtaacaatttcgatattgcaaacaccaaattatggaacttatttgctgaaaaaattatgatcaatgtgaagtttaaattattataccataaatatatcaaagattttttttgaggaaggtaaaaattgcatggaatgggctgcccaacgtgatagctcacttttatgctaggtagcattaccaaagatgggaatgttctgatgaacaccaaacccactcaaataatatttatatttgggttgtttagttgtaaaagtgaagacccaagattaaagtaccaattgtcgatgccatacactagaagtgaagaatgttgttagcgttaggagtagatgtgtcaatggggaccgatactcgttatcgatgggccgcacgtaagcttgcatgcctgcagtgcagcgtgacccggtcgtgcccctctctagagataatgagcattgcatgtctaagttataaaaaattaccacatattttttttgtcacacttgtttgaagtgcagtttatctatctttatacatatatttaaactttactctacgaataatataatctatagtactacaataatatcagtgttttagagaatcatataaatgaacagttagacatggtctaaaggacaattgagtattttgacaacaggactctacagttttatctttttagtgtgcatgtgttctcctttttttttgcaaatagcttcacctatataatacttcatccattttattagtacatccatttagggtttagggttaatggtttttatagactaatttttttagtacatctattttattctattttagcctctaaattaagaaaactaaaactctattttagtttttttatttaataatttagatataaaatagaataaaataaagtgactaaaaattaaacaaataccctttaagaaattaaaaaaactaaggaaacatttttcttgtttcgagtagataatgccagcctgttaaacgccgtcgacgagtctaacggacaccaaccagcgaaccagcagcgtcgcgtcgggccaagcgaagcagacggcacggcatctctgtcgctgcctctggacccctctcgagagttccgctccaccgttggacttgctccgctgtcggcatccagaaattgcgtggcggagcggcagacgtgagccggcacggcaggcggcctcctcctcctctcacggcaccggcagctacgggggattcctttcccaccgctccttcgctttcccttcctcgcccgccgtaataaatagacaccccctccacaccctctttccccaacctcgtgttgttcggagcgcacacacacacaaccagatctcccccaaatccacccgtcggcacctccgcttcaaggtacgccgctcgtcctcccccccccccctctctaccttctctagatcggcgttccggtccatgcatggttagggcccggtagttctacttctgttcatgtttgtgttagatccgtgtttgtgttagatccgtgctgctagcgttcgtacacggatgcgacctgtacgtcagacacgttctgattgctaacttgccagtgtttctctttggggaatcctgggatggctctagccgttccgcagacgggatcgatttcatgattttttttgtttcgttgcatagggtttggtttgcccttttcctttatttcaatatatgccgtgcacttgtttgtcgggtcatcttttcatgcttttttttgtcttggttgtgatgatgtggtctggttgggcggtcgttctagatcggagtagaattctgtttcaaactacctggtggatttattaattttggatctgtatgtgtgtgccatacatattcatagttacgaattgaagatgatggatggaaatatcgatctaggataggtatacatgttgatgcgggttttactgatgcatatacagagatgctttttgttcgcttggttgtgatgatgtggtgtggttgggcggtcgttcattcgttctagatcggagtagaatactgtttcaaactacctggtgtatttattaattttggaactgtatgtgtgtgtcatacatcttcatagttacgagtttaagatggatggaaatatcgatctaggataggtatacatgttgatgtgggttttactgatgcatatacatgatggcatatgcagcatctattcatatgctctaaccttgagtacctatctattataataaacaagtatgttttataattattttgatcttgatatacttggatgatggcatatgcagcagctatatgtggatttttttagccctgccttcatacgctatttatttgcttggtactgtttcttttgtcgatgctcaccctgttgtttggtgttacttctgcaggtcgactctagaggatccaccatggttgaacaagatggattgcacgcaggttctccggccgcttgggtggagaggctattcggctatgactgggcacaacagacaatcggctgctctgatgccgccgtgttccggctgtcagcgcaggggcgcccggttctttttgtcaagaccgacctgtccggtgccctgaatgaactgcaggacgaggcagcgcggctatcgtggctggccacgacgggcgttccttgcgcagctgtgctcgacgttgtcactgaagcgggaagggactggctgctattgggcgaagtgccggggcaggatctcctgtcatctcaccttgctcctgccgagaaagtatccatcatggctgatgcaatgcggcggctgcatacgcttgatccggctacctgcccattcgaccaccaagcgaaacatcgcatcgagcgagcacgtactcggatggaagccggtcttgtcgatcaggatgatctggacgaagagcatcaggggctcgcgccagccgaactgttcgccaggctcaaggcgcgcatgcccgacggcgatgatctcgtcgtgacccatggcgatgcctgcttgccgaatatcatggtggaaaatggccgcttttctggattcatcgactgtggccggctgggtgtggcggaccgctatcaggacatagcgttggctacccgtgatattgctgaagagcttggcggcgaatgggctgaccgcttcctcgtgctttacggtatcgccgctcccgattcgcagcgcatcgccttctatcgccttcttgacgagttcttctgaggatccaccatggttaacctagacttgtccatcttctggattggccaacttaattaatgtatgaaataaaaggatgcacacatagtgacatgctaatcactataatgtgggcatcaaagttgtgtgttatgtgtaattactagttatctgaataaaagagaaagagatcatccatatttcttatcctaaatgaatgtcacgtgtctttataattctttgatgaaccagatgcatttcattaaccaaatccatatacatataaatattaatcatatataattaatatcaattgggttagcaaaacaaatctagtctaggtgtgttttgcgaatgcgaccttcttatgtgcttctagtctccaaatgtggttgatagttattttgctctaagatcaacagtaatgaagtataaatcatcgttgtggtgtgctactcggttaattgagcattaacacacacaaacatgacgaggatggtataatctccaaaaatgtgtactttgttaggtgggaccctatagccttgattaatgtgctatgttaggcatgcctggaaacgtgtgacgcatatgttttgtgaacctgttgatattatatgtgcttttatattaccatattttattaaaatactaatatttattactagtaagatataacattctatctagcttaaaaactaaccataaatattccataataactagatttaccaaactaatatactaaatatacataataaatacaaaattaacaagacaataatcaatatttatgagcttaatatatttagacattatggttggtcgacgataatcatgctaacttttcgtaattgcttgattgaaatatgcttagaataatgcctctttgttctacatggcaaatagggaccattatggtgtaacaccctgggaaccacaaacaccccgaaatgctactaaactacacaactaaccttcatatataaaatttcgacagcatctcctttgaaaatttgcatagacgtggaagcaacagagtataaacagatatcatgataagaaaacatactagacattaataatctgctagaaatgggaagaatcctaacttgacgactgcgtaactgactagagtcacacttagctgaccctagtcacttactgcccttaaggccaattgttcaagattcattcaacaattgaaacatctcccatgattaaatcagtataaggttgctatggtcttgcttgacaaagtttttttttgagggaatttcaactaaatttttgagtgaaactatcaaatactgattttaaaaaatttttataaaaggaagcgcagagataaaaggccatctatgctacaaaagtacccaaaaatgtaatcctaaagtatgaattgcattttttttttgtttggacgaaaggaaaggagtattaccacaagaatgatatcatcttcatatttagatcttttttgggtaaagcttgagattctctaaatatagagaaatcagaagaaaaaaaaaccgtgttttggtggttttgatttctagcctccacaataactttgacggcgtcgacaagtctaacggacaccaagcagcgaaccaccagcgccgagccaagcgaagcagacggccgagacgttgacaccttcggcgcggcatctctcgagagttccgctccggcgctccacctccaccgctggcggtttcttattccgttccgttccgcctcctgctctgctcctctccacaccacacggcacgaaaccgttacggcaccggcagcacccagcacgggagaggggattcctttcccaccgttccttccctttccgccccgccgctataaatagccagccccatccccagcttttttccccaatctcatctcctctctcctgttgttcggagcacacgcacaatccgatcgatccccaaatccccttcgtctctcctcgcgagcctcgtggatcccagcttcaaggtacggcgatcgatcatcccccctccttctctctaccttcttttctctagactacatcggatggcgatccatggttagggcctgctagtttcccttcctgttttgtcgatggctgcgaggcacaatagatctgatggcgttatgacggctaacttgtcatgttgttgcgatttatagtccctttaggagatcagtttaatttctcggatggttcgagatcggtggtccatggttagtaccctaagatccgcgctgttagggttcgtagatggaggcgacctgttctgattgttaacttgtcagtacctgggaaatcctgggatggttctagctcgtccgcagatgagatcgatttcatgatcctctgtatcttgtttcgttgcctaggttccgtctaatctatccgtggtatgatgtagatgttttgatcgtgctaactacgtcttgtaaagttaattgtcaggtcataatttttagcatgcctttttttttgtttggttttgtctaattgggctgtcgttctagatcagagtagaagactgttccaaactacctgctggatttattgaacttggatctgtatgtgtgtcacatatcttcataaattcatgattaagatggattgaaatatcttttatctttttggtatggatagttctatatgttggtgtggctttgttagatgtatacatgcttagatacatgaagcaacgtgctgctactgtttagtaattgctgttcatttgtctaataaacagataaggatatgtatttatgttgctgttggttttgctggtactttgttggatacaaatgcttcaatacagaaaacagcatgctgctacgatttaccatttatctaatcttatcatatgtctaatctaataaacaaacatgcttttaaattatcttcatatgcttggatgatggcatacacagcggctatgtgtggttttttaaatacccagcatcatgggcatgcatgacactgctttaatatgctttttatttgcttgagactgtttcttttgtttatactgaccctttagttcggtgactcttctgcaggtcgactttaacttagcctaggatccatggcccagtccaagcacggcctgaccaaggagatgaccatgaagtaccgcatggagggctgcgtggacggccacaagttcgtgatcaccggcgagggcatcggctaccccttcaagggcaagcaggccatcaacctgtgcgtggtggagggcggccccttgcccttcgccgaggacatcttgtccgccgccttcatgtacggcaaccgcgtgttcaccgagtacccccaggacatcgtcgactacttcaagaactcctgccccgccggctacacctgggaccgctccttcctgttcgaggacggcgccgtgtgcatctgcaacgccgacatcaccgtgagcgtggaggagaactgcatgtaccacgagtccaagttctacggcgtgaacttccccgccgacggccccgtgatgaagaagatgaccgacaactgggagccctcctgcgagaagatcatccccgtgcccaagcagggcatcttgaagggcgacgtgagcatgtacctgctgctgaaggacggtggccgcttgcgctgccagttcgacaccgtgtacaaggccaagtccgtgccccgcaagatgcccgactggcacttcatccagcacaagctgacccgcgaggaccgcagcgacgccaagaaccagaagtggcacctgaccgagcacgccatcgcctccggctccgccttgccctccggactcagatctcgatagggtaccaatggccagttaacagatccagctgctgctgttctagggttcacaagtctgcctatttgtcttccccaatggagctatggttgtctggtctggtccttggtcgtgtcccgtttcattgtgtactatttacctgtaatgtgtatccttaagtctggtttgatggtgtctgaaacgttttgctgtggtagagcagcatggaagaactataatgaataagtgatccctaatcattgtgtccaaattttgcttctgctatacccttttgtgctgtttcttatgttttgcttaaaaatttgatctgacaaacaaatttgtctaaattatgctcttgttctgactgtgtactgtacacatttgtattgctaccggtttggcacatagttttctctttgattgcagatcaaacccttctgattgcagattgcttggctatggctgatgtgctcactgttcttctttagcttgtatattgctgatggtggcttggctacggctgaaaaagttgctgctgcgccgacttggcaactgttgctccagtaatgctttgtcctctcttcctagccgccgacttggcacttggcagctgttgctcctgtaatgcgttgttatctcttatctcttgagatgtactatgattttgaggctgtttgacttgtgccagattgccagtgctgatgctatattatctcaggtttttatgctagtatatgttttactgtgtgctgcctgtgtcgagttacgtaatctattgaaccgctatgcgtgttgatgccctgttgttgcttgccagattgatgcccctgttgcttgcagcttgcaagctgtagtgaaatcctaaaattcgaaaccaaatctattctgaacttttgaagatctgtgatgtccggaagaaaagattcaaacagataaacgggactctccagaatctataaaataaatgatcgacaaacgctttgctttggtaggcttcctagttagttagcggaccgaagcttcggttgtttctgtggccgaattcaatcactagagtcgacctgcatgattccgatgacttcgtaggttcctagctcaagccgctcgtgtccaagcgtcacttacgattagctaatgattacggcatctaggaccgactagctagctagctaagagctcggtaccgagctcgaattcattccgattaatcgtggcctcttgctcttcaggatgaagagctatgtttaaacgtgcaagcgctactagacaattcagtacattaaaaacgtccgcaatgtgttattaagttgtctaagcgtcaatttgtttacaccacaatatatcctgcca

SEQ ID NO: 85 - DNA, 26047 bp, synthetic construct
  misc_feature 1..26047: note = PHP98248
  source 1..26047: mol_type = other DNA
gtttacccgccaatatatcctgtcaaacactgatagtttaaactgaaggcgggaaacgacaatctgatcatgagcggagaattaagggagtcacgttatgacccccgccgatgacgcgggacaagccgttttacgtttggaactgacagaaccgcaacgttgaaggagccactcagcaagctggtacgattgtaatacgactcactatagggcgaattgagcgctgtttaaacgctcttcaactggaagagcggttacgctgtttaaacgctcttcaactggaagagcggttactaccggttcactagctagctgctaatcgagctagttaccctatgaggtgacatgaagcgctcacggttactatgacggttagcttcacgactgttggtggcagtagcgtacgacttagctatagttccggacttacccttaagcgatttaaatctgcggttaccgaattcgagctcggtacctagtacccttgtacttttggtttcacctgcatagagaaaacccacaagaatatgacagtctgatttgtcagtctcattctcaagcaacatttctctatccgttactttcatggtgaataacacaatccatcatcaatactttgtgttactcagaaactgaaagttattccgagtcttgcatatctttggacctactcgtttttctaccattattgctgattgttaagctctcgctacttgaatcggcattgttggagtgggaaggttcaaaaaattggagttatgactagttgtctctttctatgtacgatggagaaaatgaataaacaactgagaaaatggctcttgtttagttgatgatgctcttaagctttccactggttgccatatatgatttgggcatttcactttgatcttaatgggccttgtaaagcccaagactcatgattatctttagttgatgctcttaattaggtgtgggcaaataattcaaactgtatgtacccgaccaaaaccaaagcaaaaataatcgaaccaaaccgaaaatttaaaaataaccgaatgaaaactaaatcctataactgaaagaactgaaaccgaatcaaaatatttaatgtaaccaaaaatatccgaaatataattatattgtcaaaaatattaataatttctagattaaataattaaaaatacttaaaaatttatataaaatagtaaaaatactcgaaaataaccacaaatattcaaaaacaaccgaaatatcccaaaatattcaaagcaaaataaccgaatggataccaaattttaaaaccgaaaaaactggaacaaaaccaaaatcgaaccaaaatttcaaaaatcgaataaatactaaactttagaacaaaaaaaaacgataaccgaatgtatacgaaccaaagccgaattagataaccgaacgtccaggactactcttaatctttccgccacttatgatttgggctattactttgtttataatgagccttttcaagctcaagttcatgattgtccgtgagatgagaaactgacttgttggattcgaaaccctagctagtattggttaatacttaatacataaatgacctgcattgacatcatcatccaagaaaataaaaattgtatgcttgagatatttagttttcctagctaggttttctttattttagtaccgaatctttaggtgtgccacgttaatttagacccattttttcatacttaccaactgagtctagtttaatcatgactataatcgtataaaatgattcagtcgacgtcattgcgaacgtatataaaatcatccaaattgacgtcattccaaagaggtaagcatgcttatctaagagtccgagcatactaaacaagacgacattttatttgcactccaaatcaaattttgtattgcctaaagaaaaacaatcaaactcaagtttcttaaaattaatttcattcaaactaatcactttcaatatctcacatattattcatgccatttctatttgtctaaacatgatttaaaaaaaaaagtaaaatacaaagattactatgcaaaaactctataaaaaaaaattcaaatttcttatttatttgtgacatcaaattttcaaaataatttttttaattatcggttgatccggtcagtcgataaaaacataaactttcagcgaccgttaaaactttcctactaccgatttagagaaaatcttagcttgaaacgtaattgtaacctgccttcatgcaagtcgcaagatatgtcatcctaagttgtatatgttttctcaaaagatgtatttacttgagaaaatacgtttcaacgttgatggacaaccaattaagaatcaagcacctttcgtaatcaatttaggcttatcgtctaaggtatactgatttacgacagttgactagacttataaggaacaaaataatagaatagtttctaaacacttcacctaatcatagagactaagatggtaattcgtaaacgacaaagcctagtgacactgtccattgtaaaattccacatcatattagtattaaacatatacatgtagtttcctgaacacatgtagtatcaaacacacttcgtggcttcttcctcgaaacctgcggccgcgctatagttccggacttacccttaagataacttcgtatagcatacattatacgaagttatgggcccacgcgtgaagagcggttaccagagctggtcacctttgtccaccaagatggaactgtcttcggccagaatggccatctggattcagcaggcctagaaggccatttatcgctatcaactttgtatagaaaagttgggccgagctcggtacggccagaatggcccggaccgggttaccaagcggccgcacactgatagtttaaactgaaggcgggaaacgacaatctgatcatgagcggagaattaagggagtcacgttatgacccccgccgatgacgcgggacaagccgttttacgtttggaactgacagaaccgcaacgattgaaggagccactcagccgcgggtttctggagtttaatgagctaagcacatacgtcagaaaccattattgcgcgttcaaaagtcgcctaaggtcactatcagctagcaaatatttcttgtcaaaaatgctccactgacgttccataaattcccctcggtatccaattagagtctcatattcactcccatggcggccaatgcgggcggcggtggagcgggaggaggcagcggcagcggcagcgtggctgcgccggcggtgtgccgccccagcggctcgcggtggacgccgacgccggagcagatcaggatgctgaaggagctctactacggctgcggcatccggtcgcccagctcggagcagatccagcgcatcaccgccatgctgcggcagcacggcaagatcgagggcaagaacgtcttctactggttccagaaccacaaggcccgcgagcgccagaagcgccgcctcaccagcctcgacgtcaacgtgcccgccgccggcgcggccgacgccaccaccagccaactcggcgtcctctcgctgtcgtcgccgccgccttcaggcgcggcgcctccctcgcccaccctcggcttctacgccgccggcaatggcggcggatcggctgtgctgctggacacgagttccgactggggcagcagcggcgctgctatggccaccgagacatgcttcctgcaggactacatgggcgtgacggacacgggcagctcgtcgcagtggccacgcttctcgtcgtcggacacgataatggcggcggccgcggcgcgggcggcgacgacgcgggcgcccgagacgctccctctcttcccgacctgcggcgacgacggcggcagcggtagcagcagctacttgccgttctggggtgccgcgtccacaactgccggcgccacttcttccgttgcgatccaacagcaacaccagctgcaggagcagtacagcttttacagcaacagcaacagcacccagctggccggcaccggcaaccaagacgtatcggcaacagcagcagcagccgccgccctggagctgagcctcagctcatggtgctccccttaccctgctgcagggagtatgtgagagcaacgcgagctgccactgctcttcactgatgtctctggaatggaaggaggaggaagtgagaacagatcattcgacaaagcagcattagtccgttgatcggtggaagaccactcgtcagtgttgagttgaatgtttgatcaataaaatacggcaatgctgtaagggttgttttttatgccattgataatacactgtactgttcagttgttgaactctatttcttagccatgccaagtgcttttcttattttgaataacattacagcaaaaagttgaaagacaaaaaaaaaaacccccgaacagagtgctttgggtcccaagcttctttagactgtgttcggcgttccccctaaatttctccccctatatctcactcacttgtcacatcagcgttctctttccccctatatctccacgctctacagcagttccacctatatcaaacctctataccccaccacaacaatattatatactttcatcttcaactaactcatgtaccttccaatttttttctactaataattatttacgtgcacagaaacttagcaaggagagagagagcgggaatttaaatgctcggcgttaggcttttagtccgctaggtggctagaccgaggttaggacgctagttcactaggggcctagtggtgttttaagacgtcacggtcaccacgcgtggaccgaagcttgcatgcctgcagtgcagcgtgacccggtcgtgcccctctctagagataatgagcattgcatgtctaagttataaaaaattaccacatattttttttgtcacacttgtttgaagtgcagtttatctatctttatacatatatttaaactttactctacgaataatataatctatagtactacaataatatcagtgttttagagaatcatataaatgaacagttagacatggtctaaaggacaattgagtattttgacaacaggactctacagttttatctttttagtgtgcatgtgttctcctttttttttgcaaatagcttcacctatataatacttcatccattttattagtacatccatttagggtttagggttaatggtttttatagactaatttttttagtacatctattttattctattttagcctctaaattaagaaaactaaaactctattttagtttttttatttaataatttagatataaaatagaataaaataaagtgactaaaaattaaacaaataccctttaagaaattaaaaaaactaaggaaacatttttcttgtttcgagtagataatgccagcctgttaaacgccgtcgacgagtctaacggacaccaaccagcgaaccagcagcgtcgcgtcgggccaagcgaagcagacggcacggcatctctgtcgctgcctctggacccctctcgagagttccgctccaccgttggacttgctccgctgtcggcatccagaaattgcgtggcggagcggcagacgtgagccggcacggcaggcggcctcctcctcctctcacggcaccggcagctacgggggattcctttcccaccgctccttcgctttcccttcctcgcccgccgtaataaatagacaccccctccacaccctctttccccaacctcgtgttgttcggagcgcacacacacacaaccagatctcccccaaatccacccgtcggcacctccgcttcaaggtacgccgctcgtcctcccccccccccctctctaccttctctagatcggcgttccggtccatgcatggttagggcccggtagttctacttctgttcatgtttgtgttagatccgtgtttgtgttagatccgtgctgctagcgttcgtacacggatgcgacctgtacgtcagacacgttctgattgctaacttgccagtgtttctctttggggaatcctgggatggctctagccgttccgcagacgggatcgatttcatgattttttttgtttcgttgcatagggtttggtttgcccttttcctttatttcaatatatgccgtgcacttgtttgtcgggtcatcttttcatgcttttttttgtcttggttgtgatgatgtggtctggttgggcggtcgttctagatcggagtagaattctgtttcaaactacctggtggatttattaattttggatctgtatgtgtgtgccatacatattcatagttacgaattgaagatgatggatggaaatatcgatctaggataggtatacatgttgatgcgggttttactgatgcatatacagagatgctttttgttcgcttggttgtgatgatgtggtgtggttgggcggtcgttcattcgttctagatcggagtagaatactgtttcaaactacctggtgtatttattaattttggaactgtatgtgtgtgtcatacatcttcatagttacgagtttaagatggatggaaatatcgatctaggataggtatacatgttgatgtgggttttactgatgcatatacatgatggcatatgcagcatctattcatatgctctaaccttgagtacctatctattataataaacaagtatgttttataattattttgatcttgatatacttggatgatggcatatgcagcagctatatgtggatttttttagcactgccttcatacgctatttatttgcttggtactgtttcttttgtcgatgctcaccctgttgtttggtgttacttctgcaggtcgactttaacttagcctaggatccatggccactgtgaacaactggctcgctttctccctctccccgcaggagctgccgccctcccagacgacggactccacactcatctcggccgccaccgccgaccatgtctccggcgatgtctgcttcaacatcccccaagattggagcatgaggggatcagagctttcggcgctcgtcgcggagccgaagctggaggacttcctcggcggcatctccttctccgagcagcatcacaaggccaactgcaacatgatacccagcactagcagcacagtttgctacgcgagctcaggtgctagcaccggctaccatcaccagctgtaccaccagcccaccagctcagcgctccacttcgcggactccgtaatggtggcttcctcggccggtgtccacgacggcggtgccatgctcagcgcggccgccgctaacggtgtcgctggcgctgccagtgccaacggcggcggcatcgggctgtccatgattaagaactggctgcggagccaaccggcgcccatgcagccgagggtggcggcggctgagggcgcgcaggggctctctttgtccatgaacatggcggggacgacccaaggcgctgctggcatgccacttctcgctggagagcgcgcacgggcgcccgagagtgtatcgacgtcagcacagggtggagccgtcgtcgtcacggcgccgaaggaggatagcggtggcagcggtgttgccggcgctctagtagccgtgagcacggacacgggtggcagcggcggcgcgtcggctgacaacacggcaaggaagacggtggacacgttcgggcagcgcacgtcgatttaccgtggcgtgacaaggcatagatggactgggagatatgaggcacatctttgggataacagttgcagaagggaagggcaaactcgtaagggtcgtcaagtctatttaggtggctatgataaagaggagaaagctgctagggcttatgatcttgctgctctgaagtactggggtgccacaacaacaacaaattttccagtgagtaactacgaaaaggagctcgaggacatgaagcacatgacaaggcaggagtttgtagcgtctctgagaaggaagagcagtggtttctccagaggtgcatccatttacaggggagtgactaggcatcaccaacatggaagatggcaagcacggattggacgagttgcagggaacaaggatctttacttgggcaccttcagcacccaggaggaggcagcggaggcgtacgacatcgcggcgatcaagttccgcggcctcaacgccgtcaccaacttcgacatgagccgctacgacgtgaagagcatcctggacagcagcgccctccccatcggcagcgccgccaagcgcctcaaggaggccgaggccgcagcgtccgcgcagcaccaccacgccggcgtggtgagctacgacgtcggccgcatcgcctcgcagctcggcgacggcggagccctggcggcggcgtacggcgcgcactaccacggcgccgcctggccgaccatcgcgttccagccgggcgccgccagcacaggcctgtaccacccgtacgcgcagcagccaatgcgcggcggcgggtggtgcaagcaggagcaggaccacgcggtgatcgcggccgcgcacagcctgcaggacctccaccacctgaacctgggcgcggccggcgcgcacgactttttctcggcagggcagcaggccgccgccgctgcgatgcacggcctgggtagcatcgacagtgcgtcgctcgagcacagcaccggctccaactccgtcgtctacaacggcggggtcggcgacagcaacggcgccagcgccgtcggcggcagtggcggtggctacatgatgccgatgagcgctgccggagcaaccactacatcggcaatggtgagccacgagcaggtgcatgcacgggcctacgacgaagccaagcaggctgctcagatggggtacgagagctacctggtgaacgcggagaacaatggtggcggaaggatgtctgcatgggggactgtcgtgtctgcagccgcggcggcagcagcaagcagcaacgacaacatggccgccgacgtcgggcatggcggcgcgcagctcttcagtgtctggaacgacacttaagcgtacctagtggtacctgacatcttatagtctgcaacctctcgtgtctgaattcctatctttatcaagtgttattgcttccacgactataggacagctttcgtcgaaagcttttgctcatgtgatctcgaaggattcatctagtctgatttttcgtgacttgtatcggttttattggattcatccaacatatatcaataaaaaatgagttgtgtttcctttcttcctagttcagttaaaattatttccctcctgcgcttgtgctgtaattgtctgtgtacctgttgtttgtgactgtgttagttcccttggatatgatttcgtatttgatatgtacatggagatagcttagcttcattattggagtatgaagttagtatgacatagtcactctcctggaaaattgacactgcaaaccatatttttattctgaaccacaaatcctagtcagtccgctggcatatgccgtccgtttgctgaatccagaacgtgggtttggagatgtacggctgagatgcctctatgcgaaggggatttcgtggtgaaacgagatgggagtagagcaacgcccgtggaagatgcttcaaacttccacacttttgagcaacgatcggcagtagtaaggtagacgatttcaagatcaaagcatatgaagataaacaacatcaacaacaaaatttgttggggttctatagagagaaacagagctacatacatacactgttttgtatctaccatctgagatgatgaaaagatgaaaaactaaagaatgccccggcgccaacgccaggacacgccgcgcgcgcgtcacccgagccatctcttgacccagccggcgctgtatatttacacacgttgcagcatcgatcaccacctgttcgatcgcgtcgccgtcaccggcgcgccgcgacttattgaactagtctagggcgcggctaacaacctagcttagattgccttgtctaaacccttaggctaacgcgccacggtaacccggtccgggcctagaaggccccagagctggtcaccccatacgattggaagcttcaagtttgtacaaaaaagcaggctccggccagagttacccggaccgaagcttgcatgcctgcagtgcagcgtgacccggtcgtgcccctctctagagataatgagcattgcatgtctaagttataaaaaattaccacatattttttttgtcacacttgtttgaagtgcagtttatctatctttatacatatatttaaactttactctacgaataatataatctatagtactacaataatatcagtgttttagagaatcatataaatgaacagttagacatggtctaaaggacaattgagtattttgacaacaggactctacagttttatctttttagtgtgcatgtgttctcctttttttttgcaaatagcttcacctatataatacttcatccattttattagtacatccatttagggtttagggttaatggtttttatagactaatttttttagtacatctattttattctattttagcctctaaattaagaaaactaaaactctattttagtttttttatttaataatttagatataaaatagaataaaataaagtgactaaaaattaaacaaataccctttaagaaattaaaaaaactaaggaaacatttttcttgtttcgagtagataatgccagcctgttaaacgccgtcgacgagtctaacggacaccaaccagcgaaccagcagcgtcgcgtcgggccaagcgaagcagacggcacggcatctctgtcgctgcctctggacccctctcgagagttccgctccaccgttggacttgctccgctgtcggcatccagaaattgcgtggcggagcggcagacgtgagccggcacggcaggcggcctcctcctcctctcacggcaccggcagctacgggggattcctttcccaccgctccttcgctttcccttcctcgcccgccgtaataaatagacaccccctccacaccctctttccccaacctcgtgttgttcggagcgcacacacacacaaccagatctcccccaaatccacccgtcggcacctccgcttcaaggtacgccgctcgtcctcccccccccccctctctaccttctctagatcggcgttccggtccatgcatggttagggcccggtagttctacttctgttcatgtttgtgttagatccgtgtttgtgttagatccgtgctgctagcgttcgtacacggatgcgacctgtacgtcagacacgttctgattgctaacttgccagtgtttctctttggggaatcctgggatggctctagccgttccgcagacgggatcgatttcatgattttttttgtttcgttgcatagggtttggtttgcccttttcctttatttcaatatatgccgtgcacttgtttgtcgggtcatcttttcatgcttttttttgtcttggttgtgatgatgtggtctggttgggcggtcgttctagatcggagtagaattctgtttcaaactacctggtggatttattaattttggatctgtatgtgtgtgccatacatattcatagttacgaattgaagatgatggatggaaatatcgatctaggataggtatacatgttgatgcgggttttactgatgcatatacagagatgctttttgttcgcttggttgtgatgatgtggtgtggttgggcggtcgttcattcgttctagatcggagtagaatactgtttcaaactacctggtgtatttattaattttggaactgtatgtgtgtgtcatacatcttcatagttacgagtttaagatggatggaaatatcgatctaggataggtatacatgttgatgtgggttttactgatgcatatacatgatggcatatgcagcatctattcatatgctctaaccttgagtacctatctattataataaacaagtatgttttataattattttgatcttgatatacttggatgatggcatatgcagcagctatatgtggatttttttagccctgccttcatacgctatttatttgcttggtactgtttcttttgtcgatgctcaccctgttgtttggtgttacttctgcaggtcgactttaacttagcctaggatccatgatgatgatgagcagcggccgggcgggcggcggggccaccgcggggcgatacccgttcacggcgtcgcagtggcaggagctggagcaccaggcgctcatctacaagtgcctggcgtccggcaagcccatcccttcctacctcatgccgccgctccgccgcatcctcgactccgccctcgccacgtcgccgtccctcgcctacccgccgcaaccctcactgggctggggctgcttcgggatgggcttcacccggaaggccgacgaggacccggagcccgggcggtgccggcgcacggacggcaagaagtggcgctgctccaaggaggcgtacccggactccaagtactgcgagaagcacatgcaccggggcaagaaccgttcaagaaagcctgtggaaatgtccttggccacgccggccccggcgccggcccccgccgccgccacaaccgccaccgccacctcatccccggcgccgtcctaccaccgcccggcccacgacgccacgccgtctccgtaccacgcgctgtatggaggcggcggcggcggcggcggtagcccttactcggcgtcggcacgcccaggagcaaccggaggcggcggcgcgtaccaccacgcgcagcatgtgagccccttccacctccacctcgagaccacccacccgcacccgccgccgccctacaactactccgccgaccagagggactacgcgtacgggcacgcggccgccaaggaggtcggcgagcacgccttcttctcggacggcgcgggcgagcgggtcgaccggcaggccgcggcggggcagtggcagttcaggcagctcggggtggagacgaagccgggccccacgccgctgttccccgtcgccgggtacgggcacggcgcggcgtcgccgtacggcgtggagatgggcaaggacgacgacgagcaggaggagaggcgccgccagcactgcttcgttcttggagccgacctgcggctggagcggccgtcgtcgggccatggccatggccatgaccatgacgacgccgccgccgcgcagaagccgctccggcccttcttcgacgagtggccgcaccagaagggggacaaggccgggtcgtggatggggctcgacggcgagacgcagctctccatgtccatccccatggccgccaccgacctccccgtcacctcccgcttccgtaacgacgagtgaggtaccgttaacagatctactaactatctatactgtaataatgttgtatagccgccggatagctagctagtttagtcattcagcggcgatgggtaataataaagtgtcatccatccatcaccatgcgtggcaacgtgagcaatgacctgattgaacaaattgaaatgaaaagaagaaatatgttatatgtcaacgagatttcctcataatgccactgacgacgtgtgtccaagaaatgtatcagtgatacgtatattcacaatttttttatgacttatactcacaatttgtttttttactacttatactcacaatttgttgtgcgtaccataacaatttcgatcgaatatatatcagaaagttgacgaaagtaagctcactcaaaaagttaaatgggctgcggaagctgcgtcaggcccaagttttggctattctatccggtatccacgattttgatggctgagggacatatgttcgcttaagcttcggtccgggcctagaaggccgatctcccgggcacccagctttcttgtacaaagtggccgttaacggatcggccagaatggcccggaccgggttaccgaattcgagctcggtaccctggttcacaaactcaatacaacacacagtggagtagggtattacgctccggcggcccgaaccactctaaatccttgtgtcctcgtgtgctcttccaccattaatgactgtaattgcagggacacgaagagttgtagcgcttttgccaacaagatccgctatatgctagtagagtggaacctgcacagcaacaagcatccaataatctgagaataagaattatgtgtggtgatggttctcatctctgcaactcgccattttcgcgagagaaccaaatccaagttggtgaagatcatgatttgggctcatgggctggcatagtagctattacctttgcaattgtggttcgaatctatccgatattctccttttcagggagagctaatgcttatgcttattgggtattttggtttgacactgcttcacgcccaaaaaaaggcaactatgtctgagttggatatggcccaaaaaaaggcagctatgtctgagttggatatggaagtcttctttcgtttagggtgaagtaagaccaagctcatgagcttattatcttaggtcggaacaaattagttgataggcatggcacatttatcaaattataatgattttaacagaaaagcaacacctctttttcagcagcaccagctttgcaagctgcaattgacactccaagcatagtatttgctccaaactcagcctgcatttcgcacaatatcatatctatttccatttggataaaatatattttccagaaatatgggaacagaatcaagatacagaaaaaagttgtggtagtagtggtaagtggaaacacaagtacagtgaaaagatagcattatttctgaacagtcaaattaaccgaaataagtagtatcacatactgcccctaaattgactacacccaatgtaaagaattgcttgagcatattgagccatcagttgtttgtttgtgtaacggatttgacaatgcagagttcaggagcaaaaaaccgcaaaggagagaaagagggaaaggatctcctagtatcccaccttgtggcgcgccctgtcaagtgcatgatggcctggtcgatctgcgtctgctgctgcggttccatcccaacgagtgcctccgacaccttgtcgttgatcacccgcaccgcgtaggcgacccccctggcgaggaacttccgcctctcggaggccccggccgcgtcggcggcggcgccctcgagcgcgcccacgctagccgtagatgctcggtgcacggccttgttggtgtgcaactcgacctcaacggccggtgcgctacgcccgtcaaggatctggcgcgcccgcaccctcgtgatcacggtgggcgcctcccgcctcatgtggccgacgatgaaaagcgccgggttaggggccttggcgcgcaccgccgtattcagggcctcctcgctcttgcgcgagagcaggtgcttccccaggtactcctgcactgacaaggctgccacagcggtggaatttgtcctcacgacttcgccacgtcgtcctcacctccctggcttcccacgactccgccgtatcgaggtgctcggtgggtcgtcttaatccgaagtccgaactaggaagacgagacagagaggtctgaggaatgggcctcgtttgatgttgagctgaattatttttccagcataagcccaggtcttggtccatgaacaaaattactagaaacccagcccagtactacgatctaaaagagggactgccactggatagctctctctagcattctccacgctccaatacagcggcgtcgtgtctatccgggtctatccgcgaacacgtgagaactctccagaaactgctttctcctccacttcatctctctcgctttccctctataaaaagaccccttctaggaattgagggagacagcaagcaccaagcagcgatccgaagctcaatcaattcactcaaacctcttccccaaatcttcgattagatcttcgttgacaagaagactagaaccgaacctgacatgtccaacctgctcacggttcaccagaaccttccggctcttccagtggacgcgacgtccgatgaagtcaggaagaacctcatggacatgttccgcgacaggcaagcgttcagcgagcacacctggaagatgctgctctccgtctgccgctcctgggctgcatggtgcaagctgaacaacaggaagtggttccccgctgagcccgaggacgtgagggattaccttctgtacctgcaagcgcgaggtttgtttctgcttctacctttgatatatatataataattatcattaattagtagtaatataatatttcaaatatttttttcaaaataaaagaatgtagtatatagcaattgcttttctgtagtttataagtgtgtatattttaatttataacttttctaatatatgaccaaaacatggtgatgcctaggtctggcagtgaagaccatccagcaacaccttggacaactgaacatgcttcacaggcgctccggcctcccgcgccccagcgactcgaacgccgtgagcctcgtcatgcgccgcatcaggaaggaaaacgtcgatgccggcgaaagggcaaagcaggccctcgcgttcgagaggaccgatttcgaccaggtccgcagcctgatggagaacagcgacaggtgccaggacattaggaacctggcgttcctcggaattgcatacaacacgctcctcaggatcgcggaaattgcccgcattcgcgtgaaggacattagccgcaccgacggcggcaggatgcttatccacattggcaggaccaagacgctcgtttccaccgcaggcgtcgaaaaggccctcagcctcggagtgaccaagctcgtcgaacgctggatctccgtgtccggcgtcgcggacgacccaaacaactacctcttctgccgcgtccgcaagaacggggtggctgcccctagcgccaccagccaactcagcacgagggccttggaaggtattttcgaggccacccaccgcctgatctacggcgcgaaggatgacagcggtcaacgctacctcgcatggtccgggcactccgcccgcgttggagctgctagggacatggcccgcgccggtgtttccatccccgaaatcatgcaggcgggtggatggacgaacgtgaacattgtcatgaactacattcgcaaccttgacagcgagacgggcgcaatggttcgcctcctggaagatggtgactgaggtacccaacctagacttgtccatcttctggattggccaacttaattaatgtatgaaataaaaggatgcacacatagtgacatgctaatcactataatgtgggcatcaaagttgtgtgttatgtgtaattactagttatctgaataaaagagaaagagatcatccatatttcttatcctaaatgaatgtcacgtgtctttataattctttgatgaaccagatgcatttcattaaccaaatccatatacatataaatattaatcatatataattaatatcaattgggttagcaaaacaaatctagtctaggtgtgttttgcgatccgatatcgaattggccacggtaccagctgctgctgttctagggttcacaagtctgcctatttgtcttccccaatggagctatggttgtctggtctggtccttggtcgtgtcccgtttcattgtgtactatttacctgtaatgtgtatccttaagtctggtttgatggtgtctgaaacgttttgctgtggtagagcagcatggaagaactataatgaataagtgatccctaatcattgtgtccaaattttgcttctgctatacccttttgtgctgtttcttatgttttgcttaaaaatttgatctgacaaacaaatttgtctaaattatgctcttgttctgactgtgtactgtacacatttgtattgctaccggtttggcacatagttttctctttgattgcagatcaaacccttctgattgcagattgcttggctatggctgatgtgctcactgttcttctttagcttgtatattgctgatggtggcttggctacggctgaaaaagttgctgctgcgccgacttggcaactgttgctccagtaatgctttgtcctctcttcctagccgccgacttggcacttggcagctgttgctcctgtaatgcgttgttatctcttatctcttgagatgtactatgattttgaggctgtttgacttgtgccagattgccagtgctgatgctatattatctcaggtttttatgctagtatatgttttactgtgtgctgcctgtgtcgagttacgtaatctattgaaccgctatgcgtgttgatgccctgttgttgcttgccagattgatgcccctgttgcttgcagcttgcaagctgtagtgaaatcctaaaattccaaaccaaatctattctgaacttttgaagatctgtgatgtccggaagaaaagattcaaacagataaacgggactctccagaatctataaaataaatgatcgacaaacgctttgctttggtaggcttcaagcttggtcacccggtccgggcctagaaggccagcttcggccgccccgggcaactttattatacaaagttgatagataaatcagatatctggttcctaaggacccggcggaccgattaaactgattcggtccgacgcgttacctaataacttcgtatagcatacattatacgaagttattagctaactaactagtaagcttaagccatgggtcgacggatccgttaactagcgtggcatttggcaccgccgcacactatgcgagctaggagtgctagtttacagatgaaactatgaaaccaagaaaacacaattgtccgtagctagcgcgtggcgtcgtgtcaagcttcacacagtatcttcgttcttcactataaatcgcgcctgttgttcgtgagacccaccaccgtggataacagtcccctaataataagcgatcaacagcactgctgatggctgaacaccgaggcgccgccgcgcgtaaccatccgccggagcagcccgtcgtgccggcgaacgacgccttccccgaccgcgcccagcagctctgcctcgacgccgggcgcgcgctcgcgatgtgcggcgtgctcgtcgccgtccctcccgcattttacgcgtcgacgtcgcggacgacaccgcacttgccttcgtcggcttcgtcctctggatcatcggtgcgtggctgtgcctcctggcgctcacgcccttggctccacgggcggtgagggcgggcggggccgccgccagcaccttgctgatcaggtgcctgtccctttcatgaactactagcgcccgcgcccgcggccgccgggcacaagagaacacatcgatgttcgctgcgtacgtcagcaataaggcactctttgtcagtagtcgagtgcatatgttgggtgtttgccctgggagatttcaagtgttgtggccattatcccgcaggataaaaaatcggcggcttttggattgatacggaaaataacgatgtttcatgctcgtgttgtgtgtgtgacatcttgtcagccaagtttttaaccgttgctactccccctctgtgggctcagtgtgtggaccggaatacgtcgtacataggccgtagcctaagcccaatatgccgtttttcaggttggcctgtgtgacgacaagcgggtctcaaaagcccatcacgcaactggcctgcaattattggaggagagcgcgtcgagttggttccagaggctgcgtggtggggccggactctgcgacgacctctcgttcgcgtccgatttggttgccgtgagccgtgacgtaacgcctccttccgttcctccctatataagttccacccccgggtccggtttccccaagccccagtgacccccgatcccgatcgcgaaatctccgcacccgccggcaagggaccgaagcaagcctctctcccgaccgtcgcatcaaggtacgcgtccgctcgatctgtcctcttccttctcgatttgacttgctgtggtgcccgatcacgggatcagaatcgcaccagtgtagatttcgcatgttctaagatgtgttagtttccaggctaatccagttctcttgacgcccgatccgatcgagctccgtgtttatttcagcctaatcgtagtattcccctaaaatttcctcattagggggttcgcaagattgttggtcgacaggttcacttatgctcgatcgcttacttttagtcgattcatgctgcgtactattgttgccccccgtggttttatcttttctcgtgtgaaatccagtagatatagtagatatcgtagcattaggttttaattcaatcgattgattattgtatcatcaaaattgagaagttcgaatcatgcctatcatgctgcctcaaccgaaatcctgtatattgaagtttcaattcaattgattgatcattcattagattcaaccaaaatctagaaggttagatgacgcatgtcatgctgcctgcgtagtttacctttgatctgtttatgattaccttatcagtaggatatttgtgattttgggaagtagcactaactgattcatgctgacatgatgttccctttcagattatactgttgagtcctatctaattgatgctttgtatgctatatgaatacgtcatggtaaattagcagttaattagcatattagcaattgggcgtacctcatcaggattgctcttgtagatgtgtgtggtgatgtttcttgttcaattcatgttctgctttaaaagtatgtgttctctgtttgttaattaagattcatggttataatgatttggacctaattaatcagggttgcccttttagatgcgtggttacttgttgagttcatttttttcctgctatagttgtatgcgtttgttcattcatggttagatttgatttgtttcttctctattccatgccttccatatacttcaattgtagcttaacatgagatttctgtatatgcaggtcgaccgccggggatccacacgacaccatggcccagtccaagcacggcctgaccaaggagatgaccatgaagtaccgcatggagggctgcgtggacggccacaagttcgtgatcaccggcgagggcatcggctaccccttcaagggcaagcaggccatcaacctgtgcgtggtggagggcggccccttgcccttcgccgaggacatcttgtccgccgccttcatgtacggcaaccgcgtgttcaccgagtacccccaggacatcgtcgactacttcaagaactcctgccccgccggctacacctgggaccgctccttcctgttcgaggacggcgccgtgtgcatctgcaacgccgacatcaccgtgagcgtggaggagaactgcatgtaccacgagtccaagttctacggcgtgaacttccccgccgacggccccgtgatgaagaagatgaccgacaactgggagccctcctgcgagaagatcatccccgtgcccaagcagggcatcttgaagggcgacgtgagcatgtacctgctgctgaaggacggtggccgcttgcgctgccagttcgacaccgtgtacaaggccaagtccgtgccccgcaagatgcccgactggcacttcatccagcacaagctgacccgcgaggaccgcagcgacgccaagaaccagaagtggcacctgaccgagcacgccatcgcctccggctccgccttgccctccggactcagatctcgatagagtcaacctagacttgtccatcttctggattggccaacttaattaatgtatgaaataaaaggatgcacacatagtgacatgctaatcactataatgtgggcatcaaagttgtgtgttatgtgtaattactagttatctgaataaaagagaaagagatcatccatatttcttatcctaaatgaatgtcacgtgtctttataattctttgatgaaccagatgcatttcattaaccaaatccatatacatataaatattaatcatatataattaatatcaattgggttagcaaaacaaatctagtctaggtgtgttttgcgaattgcggcgcccttactttaacgcctctaaccaacacccctttatctttataaggaacaataaacagaatttgccccactgttctaaatcacctaataatatccccagctaaaaacaataaaggtttcctagaattaagacaagcatgactgttcctccaggagggtttggaacattgttgcagtcttgcagatacgggcgaagggtgagaaacagagcggagggctggaggtgacctcggtagtcgacgccggagttgagcttgacaacgacggggcggcccctgatggacttgaggaagtccgatggcgtcttcaccgtcccgccggcgcccgaggcgggcctgtcgctgccgccgccgccgctgctcatcttgcgcgctgtgcccccggcggtgtccctgtgttgcggatcgcgggtgggccaggtggatgcgagggcgacccgtttggactccggccggagccgccggatccctggtcggtgtcagtgccgtttactctgggccccacgtgtcagtaccgtctgtagatgacaacaacccgtcgtccacagtcatgtccaaaatatcctttcttcttttttttcgattcggatatctatcttccttttttttttccaaaaatcttcttgacgcaccagcgcgcacgtttgtggtaaacgccgacacgtcggtcccacgtcgatagaccccacccaccagtgagtagcgtgtacgtattcgggggtgacggacgtgtcgccgtcgtcttgctagtcccattcccatctgagccacacatctctgaacaaaaaaaaggagggaggcctccacgcacatccccctccgtgccacccgccccaaaccctcgcgccgcctccgagacagccgccgcaaccatggccaccgccgccgccgcgtctaccgcgctcactggcgccactaccgctgcgcccaaggcgaggcgccgggcgcacctcctggccacccgccgcgccctcgccgcgcccatcaggtgctcagcggcgtcacccgccatgccgatggctcccccggccaccccgctccggccgtggggccccaccgagccccgcaagggtgctgacatcctcgtcgagtccctcgagcgctgcggcgtccgcgacgtcttcgcctaccccggcggcgcgtccatggagatccaccaggcactcacccgctcccccgtcatcgccaaccacctcttccgccacgagcaaggggaggcctttgccgcctccggctacgcgcgctcctcgggccgcgtcggcgtctgcatcgccacctccggccccggcgccaccaacctagtctccgcgctcgccgacgcgctgctcgattccgtccccatggtcgccatcacgggacaggtggcgcgacgcatgattggcaccgacgccttccaggagacgcccatcgtcgaggtcacccgctccatcaccaagcacaactacctggtcctcgacgtcgacgacatcccccgcgtcgtgcaggaggctttcttcctcgcctcctctggtcgaccagggccggtgcttgtcgacatccccaaggacatccagcagcagatggcggtgcctgtctgggacaagcccatgagtctgcctgggtacattgcgcgccttcccaagccccctgcgactgagttgcttgagcaggtgctgcgtcttgttggtgaatcgcggcgccctgttctttatgtgggcggtggctgcgcagcatctggtgaggagttgcgacgctttgtggagctgactggaatcccggtcacaactactcttatgggcctcggcaacttccccagcgacgacccactgtctctgcgcatgctaggtatgcatgggacggtgtatgcaaattatgcagtggataaggccgatctgttgcttgcacttggtgtgcggtttgatgatcgcgtgacagggaagattgaggcttttgcaagcagggctaagattgtgcacgttgatattgatccggctgagattggcaagaacaagcagccacatgtgtccatctgtgcagatgttaagcttgctttgcagggcatgaatgctcttcttgaaggaagcacatcaaagaagagctttgactttggctcatggaacgatgagttggatcagcagaagagggaattcccccttgggtataaaacatctaatgaggagatccagccacaatatgctattcaggttcttgatgagctgacgaaaggcgaggccatcatcggcacaggtgttgggcagcaccagatgtgggcggcacagtactacacttacaagcggccaaggcagtggttgtcttcagctggtcttggggctatgggatttggtttgccggctgctgctggtgcttctgtggcaaacccaggtgtcactgttgttgacatcgatggagatggtagctttctcatgaacgttcaggagctagctatgatccgaattgagaacctcccagtgaaggtctttgtgctaaacaaccagcacctggggatggtggtgcagttggaggacaggttctataaggccaacagagcgcacacatacttgggaaacccagagaatgaaagtgagatatatccagatttcgtgacgatcgccaaagggttcaacattccagcggtccgtgtgacaaagaagaacgaagtccgcgcagcgataaagaagatgctcgagactccagggccgtacctcttggatataatcgtcccacaccaggagcatgtgttgcctatgatccctagtggtggggctttcaaggatatgatcctggatggtgatggcaggactgtgtactgactagctagtcagttaacagatctgccagatcctcggtgtacaaataacccgtcttatcctatgagacgggccggcgtcagtgtgttctggaggaatttttatgtcagagcctttttctttgtgtgcttgatgtagatgccaagggaagcttattggctgttgaagcttgatgcaaaataaattatggaactctgttttttgtttatctaataataactagcaaatatgcttccattgcattgaaactaacagccttttgtgtttccaagttttattttgtgacaatgtcatctatttcaattagttgtggaatcggaaacttgcaggactaacttggaaactccaatccctcagcatcctggactttttcctggtgtaatccatgtagatattattttaatcatcattttagttctggaggtttttccatctccggttttgctcccctttcttcaaaaaaaaaaaaaaaatgccgtaggcgccgcaacgcccacctgttgttcaaactcatgggcacgagtggctcgaagattttatacaacaattgctgtagtttcaccgttgctggtgaagaagcatttttttaaaaaaatatagtggtattcattttaattagtttagttgtgcagcgagcaaaatttggacatgctctgctcggaatctgatcgacctagacacagattagcagcagtagctttgtcatctgttccaagagttgcgatctgatagaagaaaaaaaaaccttcccttcaatgtaaaaccgaaactaacaagaaagaagcacagtgccgtttaggcaagtatggagtacgtattaagcatgtagaaggccatgcatgaaccactaacaagaaagaagcgcagtgccattcaggcaagcataagcatgtagattggcatgcatgaacaactaacagtagatcgtctctggtctgattagaagttttttgggaagccaagaaatcatgtacaactggttccatctcaaattccgtggcaaaaagaggcctaagcaacatacctcgagtagatcacattcaagcttggtcacccggtccgtcaatattctgattccgatgacttcgtaggttcctagctcaagccgctcgtgtccaagcgtcacttacgattagctaatgattacggcatctaggaccgactagtggcgcgccgactagctagctaaggtaccgagctcgaattcattccgattaatcgtggcctcttgctcttcaggatgaagagctatgtttaaacgtgcaagcgctactagacaattcagtacattaaaaacgtccgcaatgtgttattaagttgtctaagcgtcaatttgtttacaccacaatatatcctgcca

SEQ ID NO: 86 - DNA, 27221 bp, synthetic construct
  misc_feature 1..27221: note = PHP98283
  source 1..27221: mol_type = other DNA
gtttacccgccaatatatcctgtcaaacactgatagtttaaactgaaggcgggaaacgacaatctgatcatgagcggagaattaagggagtcacgttatgacccccgccgatgacgcgggacaagccgttttacgtttggaactgacagaaccgcaacgttgaaggagccactcagcaagctggtacgattgtaatacgactcactatagggcgaattgagcgctgtttaaacgctcttcaactggaagagcggttacgctgtttaaacgctcttcaactggaagagcggttactaccggttcactagctagctgctaatcgagctagttaccctatgaggtgacatgaagcgctcacggttactatgacggttagcttcacgactgttggtggcagtagcgtacgacttagctatagttccggacttacccttaagcgatttaaatctgcggttaccgaattcgagctcggtacctagtacccttgtacttttggtttcacctgcatagagaaaacccacaagaatatgacagtctgatttgtcagtctcattctcaagcaacatttctctatccgttactttcatggtgaataacacaatccatcatcaatactttgtgttactcagaaactgaaagttattccgagtcttgcatatctttggacctactcgtttttctaccattattgctgattgttaagctctcgctacttgaatcggcattgttggagtgggaaggttcaaaaaattggagttatgactagttgtctctttctatgtacgatggagaaaatgaataaacaactgagaaaatggctcttgtttagttgatgatgctcttaagctttccactggttgccatatatgatttgggcatttcactttgatcttaatgggccttgtaaagcccaagactcatgattatctttagttgatgctcttaattaggtgtgggcaaataattcaaactgtatgtacccgaccaaaaccaaagcaaaaataatcgaaccaaaccgaaaatttaaaaataaccgaatgaaaactaaatcctataactgaaagaactgaaaccgaatcaaaatatttaatgtaaccaaaaatatccgaaatataattatattgtcaaaaatattaataatttctagattaaataattaaaaatacttaaaaatttatataaaatagtaaaaatactcgaaaataaccacaaatattcaaaaacaaccgaaatatcccaaaatattcaaagcaaaataaccgaatggataccaaattttaaaaccgaaaaaactggaacaaaaccaaaatcgaaccaaaatttcaaaaatcgaataaatactaaactttagaacaaaaaaaaacgataaccgaatgtatacgaaccaaagccgaattagataaccgaacgtccaggactactcttaatctttccgccacttatgatttgggctattactttgtttataatgagccttttcaagctcaagttcatgattgtccgtgagatgagaaactgacttgttggattcgaaaccctagctagtattggttaatacttaatacataaatgacctgcattgacatcatcatccaagaaaataaaaattgtatgcttgagatatttagttttcctagctaggttttctttattttagtaccgaatctttaggtgtgccacgttaatttagacccattttttcatacttaccaactgagtctagtttaatcatgactataatcgtataaaatgattcagtcgacgtcattgcgaacgtatataaaatcatccaaattgacgtcattccaaagaggtaagcatgcttatctaagagtccgagcatactaaacaagacgacattttatttgcactccaaatcaaattttgtattgcctaaagaaaaacaatcaaactcaagtttcttaaaattaatttcattcaaactaatcactttcaatatctcacatattattcatgccatttctatttgtctaaacatgatttaaaaaaaaaagtaaaatacaaagattactatgcaaaaactctataaaaaaaaattcaaatttcttatttatttgtgacatcaaattttcaaaataatttttttaattatcggttgatccggtcagtcgataaaaacataaactttcagcgaccgttaaaactttcctactaccgatttagagaaaatcttagcttgaaacgtaattgtaacctgccttcatgcaagtcgcaagatatgtcatcctaagttgtatatgttttctcaaaagatgtatttacttgagaaaatacgtttcaacgttgatggacaaccaattaagaatcaagcacctttcgtaatcaatttaggcttatcgtctaaggtatactgatttacgacagttgactagacttataaggaacaaaataatagaatagtttctaaacacttcacctaatcatagagactaagatggtaattcgtaaacgacaaagcctagtgacactgtccattgtaaaattccacatcatattagtattaaacatatacatgtagtttcctgaacacatgtagtatcaaacacacttcgtggcttcttcctcgaaacctgcggccgcgctatagttccggacttacccttaagataacttcgtatagcatacattatacgaagttatgggcccacgcgtgaagagcggttaccagagctggtcacctttgtccaccaagatggaactgtcttcggccagaatggccatctggattcagcaggcctagaaggccatttatcgctatcaactttgtatagaaaagttgggccgagctcggtacggccagaatggcccggaccgggttaccaagcggccgcacactgatagtttaaactgaaggcgggaaacgacaatctgatcatgagcggagaattaagggagtcacgttatgacccccgccgatgacgcgggacaagccgttttacgtttggaactgacagaaccgcaacgattgaaggagccactcagccgcgggtttctggagtttaatgagctaagcacatacgtcagaaaccattattgcgcgttcaaaagtcgcctaaggtcactatcagctagcaaatatttcttgtcaaaaatgctccactgacgttccataaattcccctcggtatccaattagagtctcatattcactcccatggcggccaatgcgggcggcggtggagcgggaggaggcagcggcagcggcagcgtggctgcgccggcggtgtgccgccccagcggctcgcggtggacgccgacgccggagcagatcaggatgctgaaggagctctactacggctgcggcatccggtcgcccagctcggagcagatccagcgcatcaccgccatgctgcggcagcacggcaagatcgagggcaagaacgtcttctactggttccagaaccacaaggcccgcgagcgccagaagcgccgcctcaccagcctcgacgtcaacgtgcccgccgccggcgcggccgacgccaccaccagccaactcggcgtcctctcgctgtcgtcgccgccgccttcaggcgcggcgcctccctcgcccaccctcggcttctacgccgccggcaatggcggcggatcggctgtgctgctggacacgagttccgactggggcagcagcggcgctgctatggccaccgagacatgcttcctgcaggactacatgggcgtgacggacacgggcagctcgtcgcagtggccacgcttctcgtcgtcggacacgataatggcggcggccgcggcgcgggcggcgacgacgcgggcgcccgagacgctccctctcttcccgacctgcggcgacgacggcggcagcggtagcagcagctacttgccgttctggggtgccgcgtccacaactgccggcgccacttcttccgttgcgatccaacagcaacaccagctgcaggagcagtacagcttttacagcaacagcaacagcacccagctggccggcaccggcaaccaagacgtatcggcaacagcagcagcagccgccgccctggagctgagcctcagctcatggtgctccccttaccctgctgcagggagtatgtgagagcaacgcgagctgccactgctcttcactgatgtctctggaatggaaggaggaggaagtgagaacagatcattcgacaaagcagcattagtccgttgatcggtggaagaccactcgtcagtgttgagttgaatgtttgatcaataaaatacggcaatgctgtaagggttgttttttatgccattgataatacactgtactgttcagttgttgaactctatttcttagccatgccaagtgcttttcttattttgaataacattacagcaaaaagttgaaagacaaaaaaaaaaacccccgaacagagtgctttgggtcccaagcttctttagactgtgttcggcgttccccctaaatttctccccctatatctcactcacttgtcacatcagcgttctctttccccctatatctccacgctctacagcagttccacctatatcaaacctctataccccaccacaacaatattatatactttcatcttcaactaactcatgtaccttccaatttttttctactaataattatttacgtgcacagaaacttagcaaggagagagagagcgggaatttaaatgctcggcgttaggcttttagtccgctaggtggctagaccgaggttaggacgctagttcactaggggcctagtggtgttttaagacgtcacggtcaccacgcgtggaccgaagcttgcatgcctgcatcactgactagctaaacagcggccgcatcgagcagctggcttgtggggaccagacaaaaaaggaatggtgcagaattgttaggcgcacctaccaaaagcatctttgcctttattgcaaagataaagcagattcctctagtacaagtggggaacaaaataacgtggaaaagagctgtcctgacagcccactcactaatgcgtatgacgaacgcagtgacgaccacaaaactcgagcaacgagatcatgagccaatcaaagaggagtgatgtagacctaaagcaataatggagccatgacgtaagggcttacgcccatacgaaataattaaaggctgatgtgacctgtcggtctctcagaacctttactttttatgtttggcgtgtatttttaaatttccacggcaatgacgatgtgaccgtcgacccactaaaacattgctttgtcaaaagctaaaaaagatgatgcccgacagccacttgtgtgaagcatgagaagccggtccctccactaagaaaattagtgaagcatcttccagtggtccctccactcacagctcaatcagtgagcaacaggacgaaggaaatgacgtaagccatgacgtctaatcccagggcccggtgaccaatcgaattagcttggcgcgtggaccgaagcttgcatgcctgcagtgcagcgtgacccggtcgtgcccctctctagagataatgagcattgcatgtctaagttataaaaaattaccacatattttttttgtcacacttgtttgaagtgcagtttatctatctttatacatatatttaaactttactctacgaataatataatctatagtactacaataatatcagtgttttagagaatcatataaatgaacagttagacatggtctaaaggacaattgagtattttgacaacaggactctacagttttatctttttagtgtgcatgtgttctcctttttttttgcaaatagcttcacctatataatacttcatccattttattagtacatccatttagggtttagggttaatggtttttatagactaatttttttagtacatctattttattctattttagcctctaaattaagaaaactaaaactctattttagtttttttatttaataatttagatataaaatagaataaaataaagtgactaaaaattaaacaaataccctttaagaaattaaaaaaactaaggaaacatttttcttgtttcgagtagataatgccagcctgttaaacgccgtcgacgagtctaacggacaccaaccagcgaaccagcagcgtcgcgtcgggccaagcgaagcagacggcacggcatctctgtcgctgcctctggacccctctcgagagttccgctccaccgttggacttgctccgctgtcggcatccagaaattgcgtggcggagcggcagacgtgagccggcacggcaggcggcctcctcctcctctcacggcaccggcagctacgggggattcctttcccaccgctccttcgctttcccttcctcgcccgccgtaataaatagacaccccctccacaccctctttccccaacctcgtgttgttcggagcgcacacacacacaaccagatctcccccaaatccacccgtcggcacctccgcttcaaggtacgccgctcgtcctcccccccccccctctctaccttctctagatcggcgttccggtccatgcatggttagggcccggtagttctacttctgttcatgtttgtgttagatccgtgtttgtgttagatccgtgctgctagcgttcgtacacggatgcgacctgtacgtcagacacgttctgattgctaacttgccagtgtttctctttggggaatcctgggatggctctagccgttccgcagacgggatcgatttcatgattttttttgtttcgttgcatagggtttggtttgcccttttcctttatttcaatatatgccgtgcacttgtttgtcgggtcatcttttcatgcttttttttgtcttggttgtgatgatgtggtctggttgggcggtcgttctagatcggagtagaattctgtttcaaactacctggtggatttattaattttggatctgtatgtgtgtgccatacatattcatagttacgaattgaagatgatggatggaaatatcgatctaggataggtatacatgttgatgcgggttttactgatgcatatacagagatgctttttgttcgcttggttgtgatgatgtggtgtggttgggcggtcgttcattcgttctagatcggagtagaatactgtttcaaactacctggtgtatttattaattttggaactgtatgtgtgtgtcatacatcttcatagttacgagtttaagatggatggaaatatcgatctaggataggtatacatgttgatgtgggttttactgatgcatatacatgatggcatatgcagcatctattcatatgctctaaccttgagtacctatctattataataaacaagtatgttttataattattttgatcttgatatacttggatgatggcatatgcagcagctatatgtggatttttttagcactgccttcatacgctatttatttgcttggtactgtttcttttgtcgatgctcaccctgttgtttggtgttacttctgcaggtcgactttaacttagcctaggatccatggccactgtgaacaactggctcgctttctccctctccccgcaggagctgccgccctcccagacgacggactccacactcatctcggccgccaccgccgaccatgtctccggcgatgtctgcttcaacatcccccaagattggagcatgaggggatcagagctttcggcgctcgtcgcggagccgaagctggaggacttcctcggcggcatctccttctccgagcagcatcacaaggccaactgcaacatgatacccagcactagcagcacagtttgctacgcgagctcaggtgctagcaccggctaccatcaccagctgtaccaccagcccaccagctcagcgctccacttcgcggactccgtaatggtggcttcctcggccggtgtccacgacggcggtgccatgctcagcgcggccgccgctaacggtgtcgctggcgctgccagtgccaacggcggcggcatcgggctgtccatgattaagaactggctgcggagccaaccggcgcccatgcagccgagggtggcggcggctgagggcgcgcaggggctctctttgtccatgaacatggcggggacgacccaaggcgctgctggcatgccacttctcgctggagagcgcgcacgggcgcccgagagtgtatcgacgtcagcacagggtggagccgtcgtcgtcacggcgccgaaggaggatagcggtggcagcggtgttgccggcgctctagtagccgtgagcacggacacgggtggcagcggcggcgcgtcggctgacaacacggcaaggaagacggtggacacgttcgggcagcgcacgtcgatttaccgtggcgtgacaaggcatagatggactgggagatatgaggcacatctttgggataacagttgcagaagggaagggcaaactcgtaagggtcgtcaagtctatttaggtggctatgataaagaggagaaagctgctagggcttatgatcttgctgctctgaagtactggggtgccacaacaacaacaaattttccagtgagtaactacgaaaaggagctcgaggacatgaagcacatgacaaggcaggagtttgtagcgtctctgagaaggaagagcagtggtttctccagaggtgcatccatttacaggggagtgactaggcatcaccaacatggaagatggcaagcacggattggacgagttgcagggaacaaggatctttacttgggcaccttcagcacccaggaggaggcagcggaggcgtacgacatcgcggcgatcaagttccgcggcctcaacgccgtcaccaacttcgacatgagccgctacgacgtgaagagcatcctggacagcagcgccctccccatcggcagcgccgccaagcgcctcaaggaggccgaggccgcagcgtccgcgcagcaccaccacgccggcgtggtgagctacgacgtcggccgcatcgcctcgcagctcggcgacggcggagccctggcggcggcgtacggcgcgcactaccacggcgccgcctggccgaccatcgcgttccagccgggcgccgccagcacaggcctgtaccacccgtacgcgcagcagccaatgcgcggcggcgggtggtgcaagcaggagcaggaccacgcggtgatcgcggccgcgcacagcctgcaggacctccaccacctgaacctgggcgcggccggcgcgcacgactttttctcggcagggcagcaggccgccgccgctgcgatgcacggcctgggtagcatcgacagtgcgtcgctcgagcacagcaccggctccaactccgtcgtctacaacggcggggtcggcgacagcaacggcgccagcgccgtcggcggcagtggcggtggctacatgatgccgatgagcgctgccggagcaaccactacatcggcaatggtgagccacgagcaggtgcatgcacgggcctacgacgaagccaagcaggctgctcagatggggtacgagagctacctggtgaacgcggagaacaatggtggcggaaggatgtctgcatgggggactgtcgtgtctgcagccgcggcggcagcagcaagcagcaacgacaacatggccgccgacgtcgggcatggcggcgcgcagctcttcagtgtctggaacgacacttaagcgtacctagtggtacctgacatcttatagtctgcaacctctcgtgtctgaattcctatctttatcaagtgttattgcttccacgactataggacagctttcgtcgaaagcttttgctcatgtgatctcgaaggattcatctagtctgatttttcgtgacttgtatcggttttattggattcatccaacatatatcaataaaaaatgagttgtgtttcctttcttcctagttcagttaaaattatttccctcctgcgcttgtgctgtaattgtctgtgtacctgttgtttgtgactgtgttagttcccttggatatgatttcgtatttgatatgtacatggagatagcttagcttcattattggagtatgaagttagtatgacatagtcactctcctggaaaattgacactgcaaaccatatttttattctgaaccacaaatcctagtcagtccgctggcatatgccgtccgtttgctgaatccagaacgtgggtttggagatgtacggctgagatgcctctatgcgaaggggatttcgtggtgaaacgagatgggagtagagcaacgcccgtggaagatgcttcaaacttccacacttttgagcaacgatcggcagtagtaaggtagacgatttcaagatcaaagcatatgaagataaacaacatcaacaacaaaatttgttggggttctatagagagaaacagagctacatacatacactgttttgtatctaccatctgagatgatgaaaagatgaaaaactaaagaatgccccggcgccaacgccaggacacgccgcgcgcgcgtcacccgagccatctcttgacccagccggcgctgtatatttacacacgttgcagcatcgatcaccacctgttcgatcgcgtcgccgtcaccggcgcgccgcgacttattgaactagtctagggcgcggctaacaacctagcttagattgccttgtctaaacccttaggctaacgcgccacggtaacccggtccgggcctagaaggccccagagctggtcaccccatacgattggaagcttcaagtttgtacaaaaaagcaggctccggccagagttacccggaccgaagcttgcatgcctgcagtgcagcgtgacccggtcgtgcccctctctagagataatgagcattgcatgtctaagttataaaaaattaccacatattttttttgtcacacttgtttgaagtgcagtttatctatctttatacatatatttaaactttactctacgaataatataatctatagtactacaataatatcagtgttttagagaatcatataaatgaacagttagacatggtctaaaggacaattgagtattttgacaacaggactctacagttttatctttttagtgtgcatgtgttctcctttttttttgcaaatagcttcacctatataatacttcatccattttattagtacatccatttagggtttagggttaatggtttttatagactaatttttttagtacatctattttattctattttagcctctaaattaagaaaactaaaactctattttagtttttttatttaataatttagatataaaatagaataaaataaagtgactaaaaattaaacaaataccctttaagaaattaaaaaaactaaggaaacatttttcttgtttcgagtagataatgccagcctgttaaacgccgtcgacgagtctaacggacaccaaccagcgaaccagcagcgtcgcgtcgggccaagcgaagcagacggcacggcatctctgtcgctgcctctggacccctctcgagagttccgctccaccgttggacttgctccgctgtcggcatccagaaattgcgtggcggagcggcagacgtgagccggcacggcaggcggcctcctcctcctctcacggcaccggcagctacgggggattcctttcccaccgctccttcgctttcccttcctcgcccgccgtaataaatagacaccccctccacaccctctttccccaacctcgtgttgttcggagcgcacacacacacaaccagatctcccccaaatccacccgtcggcacctccgcttcaaggtacgccgctcgtcctcccccccccccctctctaccttctctagatcggcgttccggtccatgcatggttagggcccggtagttctacttctgttcatgtttgtgttagatccgtgtttgtgttagatccgtgctgctagcgttcgtacacggatgcgacctgtacgtcagacacgttctgattgctaacttgccagtgtttctctttggggaatcctgggatggctctagccgttccgcagacgggatcgatttcatgattttttttgtttcgttgcatagggtttggtttgcccttttcctttatttcaatatatgccgtgcacttgtttgtcgggtcatcttttcatgcttttttttgtcttggttgtgatgatgtggtctggttgggcggtcgttctagatcggagtagaattctgtttcaaactacctggtggatttattaattttggatctgtatgtgtgtgccatacatattcatagttacgaattgaagatgatggatggaaatatcgatctaggataggtatacatgttgatgcgggttttactgatgcatatacagagatgctttttgttcgcttggttgtgatgatgtggtgtggttgggcggtcgttcattcgttctagatcggagtagaatactgtttcaaactacctggtgtatttattaattttggaactgtatgtgtgtgtcatacatcttcatagttacgagtttaagatggatggaaatatcgatctaggataggtatacatgttgatgtgggttttactgatgcatatacatgatggcatatgcagcatctattcatatgctctaaccttgagtacctatctattataataaacaagtatgttttataattattttgatcttgatatacttggatgatggcatatgcagcagctatatgtggatttttttagccctgccttcatacgctatttatttgcttggtactgtttcttttgtcgatgctcaccctgttgtttggtgttacttctgcaggtcgactttaacttagcctaggatccatgatgatgatgagcagcggccgggcgggcggcggggccaccgcggggcgatacccgttcacggcgtcgcagtggcaggagctggagcaccaggcgctcatctacaagtgcctggcgtccggcaagcccatcccttcctacctcatgccgccgctccgccgcatcctcgactccgccctcgccacgtcgccgtccctcgcctacccgccgcaaccctcactgggctggggctgcttcgggatgggcttcacccggaaggccgacgaggacccggagcccgggcggtgccggcgcacggacggcaagaagtggcgctgctccaaggaggcgtacccggactccaagtactgcgagaagcacatgcaccggggcaagaaccgttcaagaaagcctgtggaaatgtccttggccacgccggccccggcgccggcccccgccgccgccacaaccgccaccgccacctcatccccggcgccgtcctaccaccgcccggcccacgacgccacgccgtctccgtaccacgcgctgtatggaggcggcggcggcggcggcggtagcccttactcggcgtcggcacgcccaggagcaaccggaggcggcggcgcgtaccaccacgcgcagcatgtgagccccttccacctccacctcgagaccacccacccgcacccgccgccgccctacaactactccgccgaccagagggactacgcgtacgggcacgcggccgccaaggaggtcggcgagcacgccttcttctcggacggcgcgggcgagcgggtcgaccggcaggccgcggcggggcagtggcagttcaggcagctcggggtggagacgaagccgggccccacgccgctgttccccgtcgccgggtacgggcacggcgcggcgtcgccgtacggcgtggagatgggcaaggacgacgacgagcaggaggagaggcgccgccagcactgcttcgttcttggagccgacctgcggctggagcggccgtcgtcgggccatggccatggccatgaccatgacgacgccgccgccgcgcagaagccgctccggcccttcttcgacgagtggccgcaccagaagggggacaaggccgggtcgtggatggggctcgacggcgagacgcagctctccatgtccatccccatggccgccaccgacctccccgtcacctcccgcttccgtaacgacgagtgaggtaccgttaacagatctactaactatctatactgtaataatgttgtatagccgccggatagctagctagtttagtcattcagcggcgatgggtaataataaagtgtcatccatccatcaccatgcgtggcaacgtgagcaatgacctgattgaacaaattgaaatgaaaagaagaaatatgttatatgtcaacgagatttcctcataatgccactgacgacgtgtgtccaagaaatgtatcagtgatacgtatattcacaatttttttatgacttatactcacaatttgtttttttactacttatactcacaatttgttgtgcgtaccataacaatttcgatcgaatatatatcagaaagttgacgaaagtaagctcactcaaaaagttaaatgggctgcggaagctgcgtcaggcccaagttttggctattctatccggtatccacgattttgatggctgagggacatatgttcgcttaagcttcggtccgggcctagaaggccgatctcccgggcacccagctttcttgtacaaagtggccgttaacggatcggccagaatggcccggaccgggttaccccgcggttcaaagccaatgactgttgttaggtccagtttctaaggacgaatcatccaatcactggttctttctgaacaaaacaaagagctatagagttacgttactgtagccgagacagagcctgcaatctggttatgccacatactaggttctttcttaaagttgactcactctatcctaagttctacttacaaggagctacaacaaattggtcataaccggagagcgttcaaggaggtaatatcccatcttactctgtagcaaggctacaaaaggagagctaaagaactaggctacaaaaagagagctaaagaactaactatctagcaagactacagagctatagtgtagagatttcataaccggtgagcgttcaaggatactttgaagagaagaggtaatatctcaactagcaagactacaaaaaaatggagatataaaactaactgtctaacaagactacagagctatagtagagatagatacgttcgacacttaagcatgagaattcgagctcggtaccctggttcacaaactcaatacaacacacagtggagtagggtattacgctccggcggcccgaaccactctaaatccttgtgtcctcgtgtgctcttccaccattaatgactgtaattgcagggacacgaagagttgtagcgcttttgccaacaagatccgctatatgctagtagagtggaacctgcacagcaacaagcatccaataatctgagaataagaattatgtgtggtgatggttctcatctctgcaactcgccattttcgcgagagaaccaaatccaagttggtgaagatcatgatttgggctcatgggctggcatagtagctattacctttgcaattgtggttcgaatctatccgatattctccttttcagggagagctaatgcttatgcttattgggtattttggtttgacactgcttcacgcccaaaaaaaggcaactatgtctgagttggatatggcccaaaaaaaggcagctatgtctgagttggatatggaagtcttctttcgtttagggtgaagtaagaccaagctcatgagcttattatcttaggtcggaacaaattagttgataggcatggcacatttatcaaattataatgattttaacagaaaagcaacacctctttttcagcagcaccagctttgcaagctgcaattgacactccaagcatagtatttgctccaaactcagcctgcatttcgcacaatatcatatctatttccatttggataaaatatattttccagaaatatgggaacagaatcaagatacagaaaaaagttgtggtagtagtggtaagtggaaacacaagtacagtgaaaagatagcattatttctgaacagtcaaattaaccgaaataagtagtatcacatactgcccctaaattgactacacccaatgtaaagaattgcttgagcatattgagccatcagttgtttgtttgtgtaacggatttgacaatgcagagttcaggagcaaaaaaccgcaaaggagagaaagagggaaaggatctcctagtatcccaccttgtggcgcgccctgtcaagtgcatgatggcctggtcgatctgcgtctgctgctgcggttccatcccaacgagtgcctccgacaccttgtcgttgatcacccgcaccgcgtaggcgacccccctggcgaggaacttccgcctctcggaggccccggccgcgtcggcggcggcgccctcgagcgcgcccacgctagccgtagatgctcggtgcacggccttgttggtgtgcaactcgacctcaacggccggtgcgctacgcccgtcaaggatctggcgcgcccgcaccctcgtgatcacggtgggcgcctcccgcctcatgtggccgacgatgaaaagcgccgggttaggggccttggcgcgcaccgccgtattcagggcctcctcgctcttgcgcgagagcaggtgcttccccaggtactcctgcactgacaaggctgccacagcggtggaatttgtcctcacgacttcgccacgtcgtcctcacctccctggcttcccacgactccgccgtatcgaggtgctcggtgggtcgtcttaatccgaagtccgaactaggaagacgagacagagaggtctgaggaatgggcctcgtttgatgttgagctgaattatttttccagcataagcccaggtcttggtccatgaacaaaattactagaaacccagcccagtactacgatctaaaagagggactgccactggatagctctctctagcattctccacgctccaatacagcggcgtcgtgtctatccgggtctatccgcgaacacgtgagaactctccagaaactgctttctcctccacttcatctctctcgctttccctctataaaaagaccccttctaggaattgagggagacagcaagcaccaagcagcgatccgaagctcaatcaattcactcaaacctcttccccaaatcttcgattagatcttcgttgacaagaagactagaaccgaacctgacatgtccaacctgctcacggttcaccagaaccttccggctcttccagtggacgcgacgtccgatgaagtcaggaagaacctcatggacatgttccgcgacaggcaagcgttcagcgagcacacctggaagatgctgctctccgtctgccgctcctgggctgcatggtgcaagctgaacaacaggaagtggttccccgctgagcccgaggacgtgagggattaccttctgtacctgcaagcgcgaggtttgtttctgcttctacctttgatatatatataataattatcattaattagtagtaatataatatttcaaatatttttttcaaaataaaagaatgtagtatatagcaattgcttttctgtagtttataagtgtgtatattttaatttataacttttctaatatatgaccaaaacatggtgatgcctaggtctggcagtgaagaccatccagcaacaccttggacaactgaacatgcttcacaggcgctccggcctcccgcgccccagcgactcgaacgccgtgagcctcgtcatgcgccgcatcaggaaggaaaacgtcgatgccggcgaaagggcaaagcaggccctcgcgttcgagaggaccgatttcgaccaggtccgcagcctgatggagaacagcgacaggtgccaggacattaggaacctggcgttcctcggaattgcatacaacacgctcctcaggatcgcggaaattgcccgcattcgcgtgaaggacattagccgcaccgacggcggcaggatgcttatccacattggcaggaccaagacgctcgtttccaccgcaggcgtcgaaaaggccctcagcctcggagtgaccaagctcgtcgaacgctggatctccgtgtccggcgtcgcggacgacccaaacaactacctcttctgccgcgtccgcaagaacggggtggctgcccctagcgccaccagccaactcagcacgagggccttggaaggtattttcgaggccacccaccgcctgatctacggcgcgaaggatgacagcggtcaacgctacctcgcatggtccgggcactccgcccgcgttggagctgctagggacatggcccgcgccggtgtttccatccccgaaatcatgcaggcgggtggatggacgaacgtgaacattgtcatgaactacattcgcaaccttgacagcgagacgggcgcaatggttcgcctcctggaagatggtgactgaggtacccaacctagacttgtccatcttctggattggccaacttaattaatgtatgaaataaaaggatgcacacatagtgacatgctaatcactataatgtgggcatcaaagttgtgtgttatgtgtaattactagttatctgaataaaagagaaagagatcatccatatttcttatcctaaatgaatgtcacgtgtctttataattctttgatgaaccagatgcatttcattaaccaaatccatatacatataaatattaatcatatataattaatatcaattgggttagcaaaacaaatctagtctaggtgtgttttgcgatccgatatcgaattggccacggtaccagctgctgctgttctagggttcacaagtctgcctatttgtcttccccaatggagctatggttgtctggtctggtccttggtcgtgtcccgtttcattgtgtactatttacctgtaatgtgtatccttaagtctggtttgatggtgtctgaaacgttttgctgtggtagagcagcatggaagaactataatgaataagtgatccctaatcattgtgtccaaattttgcttctgctatacccttttgtgctgtttcttatgttttgcttaaaaatttgatctgacaaacaaatttgtctaaattatgctcttgttctgactgtgtactgtacacatttgtattgctaccggtttggcacatagttttctctttgattgcagatcaaacccttctgattgcagattgcttggctatggctgatgtgctcactgttcttctttagcttgtatattgctgatggtggcttggctacggctgaaaaagttgctgctgcgccgacttggcaactgttgctccagtaatgctttgtcctctcttcctagccgccgacttggcacttggcagctgttgctcctgtaatgcgttgttatctcttatctcttgagatgtactatgattttgaggctgtttgacttgtgccagattgccagtgctgatgctatattatctcaggtttttatgctagtatatgttttactgtgtgctgcctgtgtcgagttacgtaatctattgaaccgctatgcgtgttgatgccctgttgttgcttgccagattgatgcccctgttgcttgcagcttgcaagctgtagtgaaatcctaaaattccaaaccaaatctattctgaacttttgaagatctgtgatgtccggaagaaaagattcaaacagataaacgggactctccagaatctataaaataaatgatcgacaaacgctttgctttggtaggcttcaagcttggtcacccggtccgggcctagaaggccagcttcggccgccccgggcaactttattatacaaagttgatagataaatcagatatctggttcctaaggacccggcggaccgattaaactgattcggtccgacgcgttacctaataacttcgtatagcatacattatacgaagttattagctaactaactagtaagcttaagccatgggtcgacggatccgttaactagcgtggcatttggcaccgccgcacactatgcgagctaggagtgctagtttacagatgaaactatgaaaccaagaaaacacaattgtccgtagctagcgcgtggcgtcgtgtcaagcttcacacagtatcttcgttcttcactataaatcgcgcctgttgttcgtgagacccaccaccgtggataacagtcccctaataataagcgatcaacagcactgctgatggctgaacaccgaggcgccgccgcgcgtaaccatccgccggagcagcccgtcgtgccggcgaacgacgccttccccgaccgcgcccagcagctctgcctcgacgccgggcgcgcgctcgcgatgtgcggcgtgctcgtcgccgtccctcccgcattttacgcgtcgacgtcgcggacgacaccgcacttgccttcgtcggcttcgtcctctggatcatcggtgcgtggctgtgcctcctggcgctcacgcccttggctccacgggcggtgagggcgggcggggccgccgccagcaccttgctgatcaggtgcctgtccctttcatgaactactagcgcccgcgcccgcggccgccgggcacaagagaacacatcgatgttcgctgcgtacgtcagcaataaggcactctttgtcagtagtcgagtgcatatgttgggtgtttgccctgggagatttcaagtgttgtggccattatcccgcaggataaaaaatcggcggcttttggattgatacggaaaataacgatgtttcatgctcgtgttgtgtgtgtgacatcttgtcagccaagtttttaaccgttgctactccccctctgtgggctcagtgtgtggaccggaatacgtcgtacataggccgtagcctaagcccaatatgccgtttttcaggttggcctgtgtgacgacaagcgggtctcaaaagcccatcacgcaactggcctgcaattattggaggagagcgcgtcgagttggttccagaggctgcgtggtggggccggactctgcgacgacctctcgttcgcgtccgatttggttgccgtgagccgtgacgtaacgcctccttccgttcctccctatataagttccacccccgggtccggtttccccaagccccagtgacccccgatcccgatcgcgaaatctccgcacccgccggcaagggaccgaagcaagcctctctcccgaccgtcgcatcaaggtacgcgtccgctcgatctgtcctcttccttctcgatttgacttgctgtggtgcccgatcacgggatcagaatcgcaccagtgtagatttcgcatgttctaagatgtgttagtttccaggctaatccagttctcttgacgcccgatccgatcgagctccgtgtttatttcagcctaatcgtagtattcccctaaaatttcctcattagggggttcgcaagattgttggtcgacaggttcacttatgctcgatcgcttacttttagtcgattcatgctgcgtactattgttgccccccgtggttttatcttttctcgtgtgaaatccagtagatatagtagatatcgtagcattaggttttaattcaatcgattgattattgtatcatcaaaattgagaagttcgaatcatgcctatcatgctgcctcaaccgaaatcctgtatattgaagtttcaattcaattgattgatcattcattagattcaaccaaaatctagaaggttagatgacgcatgtcatgctgcctgcgtagtttacctttgatctgtttatgattaccttatcagtaggatatttgtgattttgggaagtagcactaactgattcatgctgacatgatgttccctttcagattatactgttgagtcctatctaattgatgctttgtatgctatatgaatacgtcatggtaaattagcagttaattagcatattagcaattgggcgtacctcatcaggattgctcttgtagatgtgtgtggtgatgtttcttgttcaattcatgttctgctttaaaagtatgtgttctctgtttgttaattaagattcatggttataatgatttggacctaattaatcagggttgcccttttagatgcgtggttacttgttgagttcatttttttcctgctatagttgtatgcgtttgttcattcatggttagatttgatttgtttcttctctattccatgccttccatatacttcaattgtagcttaacatgagatttctgtatatgcaggtcgaccgccggggatccacacgacaccatggcccagtccaagcacggcctgaccaaggagatgaccatgaagtaccgcatggagggctgcgtggacggccacaagttcgtgatcaccggcgagggcatcggctaccccttcaagggcaagcaggccatcaacctgtgcgtggtggagggcggccccttgcccttcgccgaggacatcttgtccgccgccttcatgtacggcaaccgcgtgttcaccgagtacccccaggacatcgtcgactacttcaagaactcctgccccgccggctacacctgggaccgctccttcctgttcgaggacggcgccgtgtgcatctgcaacgccgacatcaccgtgagcgtggaggagaactgcatgtaccacgagtccaagttctacggcgtgaacttccccgccgacggccccgtgatgaagaagatgaccgacaactgggagccctcctgcgagaagatcatccccgtgcccaagcagggcatcttgaagggcgacgtgagcatgtacctgctgctgaaggacggtggccgcttgcgctgccagttcgacaccgtgtacaaggccaagtccgtgccccgcaagatgcccgactggcacttcatccagcacaagctgacccgcgaggaccgcagcgacgccaagaaccagaagtggcacctgaccgagcacgccatcgcctccggctccgccttgccctccggactcagatctcgatagagtcaacctagacttgtccatcttctggattggccaacttaattaatgtatgaaataaaaggatgcacacatagtgacatgctaatcactataatgtgggcatcaaagttgtgtgttatgtgtaattactagttatctgaataaaagagaaagagatcatccatatttcttatcctaaatgaatgtcacgtgtctttataattctttgatgaaccagatgcatttcattaaccaaatccatatacatataaatattaatcatatataattaatatcaattgggttagcaaaacaaatctagtctaggtgtgttttgcgaattgcggcgcccttactttaacgcctctaaccaacacccctttatctttataaggaacaataaacagaatttgccccactgttctaaatcacctaataatatccccagctaaaaacaataaaggtttcctagaattaagacaagcatgactgttcctccaggagggtttggaacattgttgcagtcttgcagatacgggcgaagggtgagaaacagagcggagggctggaggtgacctcggtagtcgacgccggagttgagcttgacaacgacggggcggcccctgatggacttgaggaagtccgatggcgtcttcaccgtcccgccggcgcccgaggcgggcctgtcgctgccgccgccgccgctgctcatcttgcgcgctgtgcccccggcggtgtccctgtgttgcggatcgcgggtgggccaggtggatgcgagggcgacccgtttggactccggccggagccgccggatccctggtcggtgtcagtgccgtttactctgggccccacgtgtcagtaccgtctgtagatgacaacaacccgtcgtccacagtcatgtccaaaatatcctttcttcttttttttcgattcggatatctatcttccttttttttttccaaaaatcttcttgacgcaccagcgcgcacgtttgtggtaaacgccgacacgtcggtcccacgtcgatagaccccacccaccagtgagtagcgtgtacgtattcgggggtgacggacgtgtcgccgtcgtcttgctagtcccattcccatctgagccacacatctctgaacaaaaaaaaggagggaggcctccacgcacatccccctccgtgccacccgccccaaaccctcgcgccgcctccgagacagccgccgcaaccatggccaccgccgccgccgcgtctaccgcgctcactggcgccactaccgctgcgcccaaggcgaggcgccgggcgcacctcctggccacccgccgcgccctcgccgcgcccatcaggtgctcagcggcgtcacccgccatgccgatggctcccccggccaccccgctccggccgtggggccccaccgagccccgcaagggtgctgacatcctcgtcgagtccctcgagcgctgcggcgtccgcgacgtcttcgcctaccccggcggcgcgtccatggagatccaccaggcactcacccgctcccccgtcatcgccaaccacctcttccgccacgagcaaggggaggcctttgccgcctccggctacgcgcgctcctcgggccgcgtcggcgtctgcatcgccacctccggccccggcgccaccaacctagtctccgcgctcgccgacgcgctgctcgattccgtccccatggtcgccatcacgggacaggtggcgcgacgcatgattggcaccgacgccttccaggagacgcccatcgtcgaggtcacccgctccatcaccaagcacaactacctggtcctcgacgtcgacgacatcccccgcgtcgtgcaggaggctttcttcctcgcctcctctggtcgaccagggccggtgcttgtcgacatccccaaggacatccagcagcagatggcggtgcctgtctgggacaagcccatgagtctgcctgggtacattgcgcgccttcccaagccccctgcgactgagttgcttgagcaggtgctgcgtcttgttggtgaatcgcggcgccctgttctttatgtgggcggtggctgcgcagcatctggtgaggagttgcgacgctttgtggagctgactggaatcccggtcacaactactcttatgggcctcggcaacttccccagcgacgacccactgtctctgcgcatgctaggtatgcatgggacggtgtatgcaaattatgcagtggataaggccgatctgttgcttgcacttggtgtgcggtttgatgatcgcgtgacagggaagattgaggcttttgcaagcagggctaagattgtgcacgttgatattgatccggctgagattggcaagaacaagcagccacatgtgtccatctgtgcagatgttaagcttgctttgcagggcatgaatgctcttcttgaaggaagcacatcaaagaagagctttgactttggctcatggaacgatgagttggatcagcagaagagggaattcccccttgggtataaaacatctaatgaggagatccagccacaatatgctattcaggttcttgatgagctgacgaaaggcgaggccatcatcggcacaggtgttgggcagcaccagatgtgggcggcacagtactacacttacaagcggccaaggcagtggttgtcttcagctggtcttggggctatgggatttggtttgccggctgctgctggtgcttctgtggcaaacccaggtgtcactgttgttgacatcgatggagatggtagctttctcatgaacgttcaggagctagctatgatccgaattgagaacctcccagtgaaggtctttgtgctaaacaaccagcacctggggatggtggtgcagttggaggacaggttctataaggccaacagagcgcacacatacttgggaaacccagagaatgaaagtgagatatatccagatttcgtgacgatcgccaaagggttcaacattccagcggtccgtgtgacaaagaagaacgaagtccgcgcagcgataaagaagatgctcgagactccagggccgtacctcttggatataatcgtcccacaccaggagcatgtgttgcctatgatccctagtggtggggctttcaaggatatgatcctggatggtgatggcaggactgtgtactgactagctagtcagttaacagatctgccagatcctcggtgtacaaataacccgtcttatcctatgagacgggccggcgtcagtgtgttctggaggaatttttatgtcagagcctttttctttgtgtgcttgatgtagatgccaagggaagcttattggctgttgaagcttgatgcaaaataaattatggaactctgttttttgtttatctaataataactagcaaatatgcttccattgcattgaaactaacagccttttgtgtttccaagttttattttgtgacaatgtcatctatttcaattagttgtggaatcggaaacttgcaggactaacttggaaactccaatccctcagcatcctggactttttcctggtgtaatccatgtagatattattttaatcatcattttagttctggaggtttttccatctccggttttgctcccctttcttcaaaaaaaaaaaaaaaatgccgtaggcgccgcaacgcccacctgttgttcaaactcatgggcacgagtggctcgaagattttatacaacaattgctgtagtttcaccgttgctggtgaagaagcatttttttaaaaaaatatagtggtattcattttaattagtttagttgtgcagcgagcaaaatttggacatgctctgctcggaatctgatcgacctagacacagattagcagcagtagctttgtcatctgttccaagagttgcgatctgatagaagaaaaaaaaaccttcccttcaatgtaaaaccgaaactaacaagaaagaagcacagtgccgtttaggcaagtatggagtacgtattaagcatgtagaaggccatgcatgaaccactaacaagaaagaagcgcagtgccattcaggcaagcataagcatgtagattggcatgcatgaacaactaacagtagatcgtctctggtctgattagaagttttttgggaagccaagaaatcatgtacaactggttccatctcaaattccgtggcaaaaagaggcctaagcaacatacctcgagtagatcacattcaagcttggtcacccggtccgtcaatattctgattccgatgacttcgtaggttcctagctcaagccgctcgtgtccaagcgtcacttacgattagctaatgattacggcatctaggaccgactagtggcgcgccgactagctagctaaggtaccgagctcgaattcattccgattaatcgtggcctcttgctcttcaggatgaagagctatgtttaaacgtgcaagcgctactagacaattcagtacattaaaaacgtccgcaatgtgttattaagttgtctaagcgtcaatttgtttacaccacaatatatcctgcca

SEQ ID NO: 87 - DNA, 20678 bp, synthetic construct
  misc_feature 1..20678: note = PHP98310
  source 1..20678: mol_type = other DNA
gtttacccgccaatatatcctgtcaaacactgatagtttaaactgaaggcgggaaacgacaatctgatcatgagcggagaattaagggagtcacgttatgacccccgccgatgacgcgggacaagccgttttacgtttggaactgacagaaccgcaacgttgaaggagccactcagcaagctggtacgattgtaatacgactcactatagggcgaattgagcgctgtttaaacgctcttcaactggaagagcggttacgctgtttaaacgctcttcaactggaagagcggttactaccggttcactagctagctgctaatcgagctagttaccctatgaggtgacatgaagcgctcacggttactatgacggttagcttcacgactgttggtggcagtagcgtacgacttagctatagttccggacttacccttaagcgatttaaatctgcggttaccgaattcgagctcggtacctagtacccttgtacttttggtttcacctgcatagagaaaacccacaagaatatgacagtctgatttgtcagtctcattctcaagcaacatttctctatccgttactttcatggtgaataacacaatccatcatcaatactttgtgttactcagaaactgaaagttattccgagtcttgcatatctttggacctactcgtttttctaccattattgctgattgttaagctctcgctacttgaatcggcattgttggagtgggaaggttcaaaaaattggagttatgactagttgtctctttctatgtacgatggagaaaatgaataaacaactgagaaaatggctcttgtttagttgatgatgctcttaagctttccactggttgccatatatgatttgggcatttcactttgatcttaatgggccttgtaaagcccaagactcatgattatctttagttgatgctcttaattaggtgtgggcaaataattcaaactgtatgtacccgaccaaaaccaaagcaaaaataatcgaaccaaaccgaaaatttaaaaataaccgaatgaaaactaaatcctataactgaaagaactgaaaccgaatcaaaatatttaatgtaaccaaaaatatccgaaatataattatattgtcaaaaatattaataatttctagattaaataattaaaaatacttaaaaatttatataaaatagtaaaaatactcgaaaataaccacaaatattcaaaaacaaccgaaatatcccaaaatattcaaagcaaaataaccgaatggataccaaattttaaaaccgaaaaaactggaacaaaaccaaaatcgaaccaaaatttcaaaaatcgaataaatactaaactttagaacaaaaaaaaacgataaccgaatgtatacgaaccaaagccgaattagataaccgaacgtccaggactactcttaatctttccgccacttatgatttgggctattactttgtttataatgagccttttcaagctcaagttcatgattgtccgtgagatgagaaactgacttgttggattcgaaaccctagctagtattggttaatacttaatacataaatgacctgcattgacatcatcatccaagaaaataaaaattgtatgcttgagatatttagttttcctagctaggttttctttattttagtaccgaatctttaggtgtgccacgttaatttagacccattttttcatacttaccaactgagtctagtttaatcatgactataatcgtataaaatgattcagtcgacgtcattgcgaacgtatataaaatcatccaaattgacgtcattccaaagaggtaagcatgcttatctaagagtccgagcatactaaacaagacgacattttatttgcactccaaatcaaattttgtattgcctaaagaaaaacaatcaaactcaagtttcttaaaattaatttcattcaaactaatcactttcaatatctcacatattattcatgccatttctatttgtctaaacatgatttaaaaaaaaaagtaaaatacaaagattactatgcaaaaactctataaaaaaaaattcaaatttcttatttatttgtgacatcaaattttcaaaataatttttttaattatcggttgatccggtcagtcgataaaaacataaactttcagcgaccgttaaaactttcctactaccgatttagagaaaatcttagcttgaaacgtaattgtaacctgccttcatgcaagtcgcaagatatgtcatcctaagttgtatatgttttctcaaaagatgtatttacttgagaaaatacgtttcaacgttgatggacaaccaattaagaatcaagcacctttcgtaatcaatttaggcttatcgtctaaggtatactgatttacgacagttgactagacttataaggaacaaaataatagaatagtttctaaacacttcacctaatcatagagactaagatggtaattcgtaaacgacaaagcctagtgacactgtccattgtaaaattccacatcatattagtattaaacatatacatgtagtttcctgaacacatgtagtatcaaacacacttcgtggcttcttcctcgaaacctgcggccgcgctatagttccggacttacccttaagataacttcgtatagcatacattatacgaagttatgggcccacgcgtgaagagcggttaccagagctggtcacctttgtccaccaagatggaactgtcttcggccagaatggccatctggattcagcaggcctagaaggccatttatcgctatcaactttgtatagaaaagttgggccgaattcgagctcggtacggccagaatggcccggaccgaagcttgcggccgcacactgatagtttaaactgaaggcgggaaacgacaatctgatcatgagcggagaattaagggagtcacgttatgacccccgccgatgacgcgggacaagccgttttacgtttggaactgacagaaccgcaacgttgaaggagccactcagccgcgggtttctggagtttaatgagctaagcacatacgtcagaaaccattattgcgcgttcaaaagtcgcctaaggtcactatcagctagcaaatatttcttgtcaaaaatgctccactgacgttccataaattcccctcggtatccaattagagtctcatattcactctcccgggggatctcgactctagaggatcgctcaggaaggccgctgagatagaggcatggcggccaatgcgggcggcggtggagcgggaggaggcagcggcagcggcagcgtggctgcgccggcggtgtgccgccccagcggctcgcggtggacgccgacgccggagcagatcaggatgctgaaggagctctactacggctgcggcatccggtcgcccagctcggagcagatccagcgcatcaccgccatgctgcggcagcacggcaagatcgagggcaagaacgtcttctactggttccagaaccacaaggcccgcgagcgccagaagcgccgcctcaccagcctcgacgtcaacgtgcccgccgccggcgcggccgacgccaccaccagccaactcggcgtcctctcgctgtcgtcgccgccgccttcaggcgcggcgcctccctcgcccaccctcggcttctacgccgccggcaatggcggcggatcggctgtgctgctggacacgagttccgactggggcagcagcggcgctgccatggccaccgagacatgcttcctgcaggactacatgggcgtgacggacacgggcagctcgtcgcagtggccacgcttctcgtcgtcggacacgataatggcggcggccgcggcgcgggcggcgacgacgcgggcgcccgagacgctccctctcttcccgacctgcggcgacgacggcggcagcggtagcagcagctacttgccgttctggggtgccgcgtccacaactgccggcgccacttcttccgttgcgatccagcagcaacaccagctgcaggagcagtacagcttttacagcaacagcaacagcacccagctggccggcaccggcaaccaagacgtatcggcaacagcagcagcagccgccgccctggagctgagcctcagctcatggtgctccccttaccctgctgcagggagtatgtgagagcaacgcgagctgccactgctcttcactgatgtctctggaatggaaggaggaggaagtgagcatagcgttggtgcgttgctgtcaagggcgaattcacatggttaacctagacttgtccatcttctggattggccaacttaattaatgtatgaaataaaaggatgcacacatagtgacatgctaatcactataatgtgggcatcaaagttgtgtgttatgtgtaattactagttatctgaataaaagagaaagagatcatccatatttcttatcctaaatgaatgtcacgtgtctttataattctttgatgaaccagatgcatttcattaaccaaatccatatacatataaatattaatcatatataattaatatcaattgggttagcaaaacaaatctagtctaggtgtgttttgcgaatgcggccgccaccgcggtggagctcgaattccggtccgggcctagaaggccagcttcaagtttgtacaaaaaagcaggctccggccagagttacccggaccgaagcttgcatgcctgcagtgcagcgtgacccggtcgtgcccctctctagagataatgagcattgcatgtctaagttataaaaaattaccacatattttttttgtcacacttgtttgaagtgcagtttatctatctttatacatatatttaaactttactctacgaataatataatctatagtactacaataatatcagtgttttagagaatcatataaatgaacagttagacatggtctaaaggacaattgagtattttgacaacaggactctacagttttatctttttagtgtgcatgtgttctcctttttttttgcaaatagcttcacctatataatacttcatccattttattagtacatccatttagggtttagggttaatggtttttatagactaatttttttagtacatctattttattctattttagcctctaaattaagaaaactaaaactctattttagtttttttatttaataatttagatataaaatagaataaaataaagtgactaaaaattaaacaaataccctttaagaaattaaaaaaactaaggaaacatttttcttgtttcgagtagataatgccagcctgttaaacgccgtcgacgagtctaacggacaccaaccagcgaaccagcagcgtcgcgtcgggccaagcgaagcagacggcacggcatctctgtcgctgcctctggacccctctcgagagttccgctccaccgttggacttgctccgctgtcggcatccagaaattgcgtggcggagcggcagacgtgagccggcacggcaggcggcctcctcctcctctcacggcaccggcagctacgggggattcctttcccaccgctccttcgctttcccttcctcgcccgccgtaataaatagacaccccctccacaccctctttccccaacctcgtgttgttcggagcgcacacacacacaaccagatctcccccaaatccacccgtcggcacctccgcttcaaggtacgccgctcgtcctcccccccccccctctctaccttctctagatcggcgttccggtccatgcatggttagggcccggtagttctacttctgttcatgtttgtgttagatccgtgtttgtgttagatccgtgctgctagcgttcgtacacggatgcgacctgtacgtcagacacgttctgattgctaacttgccagtgtttctctttggggaatcctgggatggctctagccgttccgcagacgggatcgatttcatgattttttttgtttcgttgcatagggtttggtttgcccttttcctttatttcaatatatgccgtgcacttgtttgtcgggtcatcttttcatgcttttttttgtcttggttgtgatgatgtggtctggttgggcggtcgttctagatcggagtagaattctgtttcaaactacctggtggatttattaattttggatctgtatgtgtgtgccatacatattcatagttacgaattgaagatgatggatggaaatatcgatctaggataggtatacatgttgatgcgggttttactgatgcatatacagagatgctttttgttcgcttggttgtgatgatgtggtgtggttgggcggtcgttcattcgttctagatcggagtagaatactgtttcaaactacctggtgtatttattaattttggaactgtatgtgtgtgtcatacatcttcatagttacgagtttaagatggatggaaatatcgatctaggataggtatacatgttgatgtgggttttactgatgcatatacatgatggcatatgcagcatctattcatatgctctaaccttgagtacctatctattataataaacaagtatgttttataattattttgatcttgatatacttggatgatggcatatgcagcagctatatgtggatttttttagccctgccttcatacgctatttatttgcttggtactgtttcttttgtcgatgctcaccctgttgtttggtgttacttctgcaggtcgactttaacttagcctaggatccatgatgatgatgagcagcggccgggcgggcggcggggccaccgcggggcgatacccgttcacggcgtcgcagtggcaggagctggagcaccaggcgctcatctacaagtgcctggcgtccggcaagcccatcccttcctacctcatgccgccgctccgccgcatcctcgactccgccctcgccacgtcgccgtccctcgcctacccgccgcaaccctcactgggctggggctgcttcgggatgggcttcacccggaaggccgacgaggacccggagcccgggcggtgccggcgcacggacggcaagaagtggcgctgctccaaggaggcgtacccggactccaagtactgcgagaagcacatgcaccggggcaagaaccgttcaagaaagcctgtggaaatgtccttggccacgccggccccggcgccggcccccgccgccgccacaaccgccaccgccacctcatccccggcgccgtcctaccaccgcccggcccacgacgccacgccgtctccgtaccacgcgctgtatggaggcggcggcggcggcggcggtagcccttactcggcgtcggcacgcccaggagcaaccggaggcggcggcgcgtaccaccacgcgcagcatgtgagccccttccacctccacctcgagaccacccacccgcacccgccgccgccctacaactactccgccgaccagagggactacgcgtacgggcacgcggccgccaaggaggtcggcgagcacgccttcttctcggacggcgcgggcgagcgggtcgaccggcaggccgcggcggggcagtggcagttcaggcagctcggggtggagacgaagccgggccccacgccgctgttccccgtcgccgggtacgggcacggcgcggcgtcgccgtacggcgtggagatgggcaaggacgacgacgagcaggaggagaggcgccgccagcactgcttcgttcttggagccgacctgcggctggagcggccgtcgtcgggccatggccatggccatgaccatgacgacgccgccgccgcgcagaagccgctccggcccttcttcgacgagtggccgcaccagaagggggacaaggccgggtcgtggatggggctcgacggcgagacgcagctctccatgtccatccccatggccgccaccgacctccccgtcacctcccgcttccgtaacgacgagtgaggtaccgttaacagatctactaactatctatactgtaataatgttgtatagccgccggatagctagctagtttagtcattcagcggcgatgggtaataataaagtgtcatccatccatcaccatgcgtggcaacgtgagcaatgacctgattgaacaaattgaaatgaaaagaagaaatatgttatatgtcaacgagatttcctcataatgccactgacgacgtgtgtccaagaaatgtatcagtgatacgtatattcacaatttttttatgacttatactcacaatttgtttttttactacttatactcacaatttgttgtgcgtaccataacaatttcgatcgaatatatatcagaaagttgacgaaagtaagctcactcaaaaagttaaatgggctgcggaagctgcgtcaggcccaagttttggctattctatccggtatccacgattttgatggctgagggacatatgttcgcttaagcttcggtccgggcctagaaggccgatctcccgggcacccagctttcttgtacaaagtggccgttaacggatcggccagaatggcccggaccgggttaccgaattcgagctcggtaccctggttcacaaactcaatacaacacacagtggagtagggtattacgctccggcggcccgaaccactctaaatccttgtgtcctcgtgtgctcttccaccattaatgactgtaattgcagggacacgaagagttgtagcgcttttgccaacaagatccgctatatgctagtagagtggaacctgcacagcaacaagcatccaataatctgagaataagaattatgtgtggtgatggttctcatctctgcaactcgccattttcgcgagagaaccaaatccaagttggtgaagatcatgatttgggctcatgggctggcatagtagctattacctttgcaattgtggttcgaatctatccgatattctccttttcagggagagctaatgcttatgcttattgggtattttggtttgacactgcttcacgcccaaaaaaaggcaactatgtctgagttggatatggcccaaaaaaaggcagctatgtctgagttggatatggaagtcttctttcgtttagggtgaagtaagaccaagctcatgagcttattatcttaggtcggaacaaattagttgataggcatggcacatttatcaaattataatgattttaacagaaaagcaacacctctttttcagcagcaccagctttgcaagctgcaattgacactccaagcatagtatttgctccaaactcagcctgcatttcgcacaatatcatatctatttccatttggataaaatatattttccagaaatatgggaacagaatcaagatacagaaaaaagttgtggtagtagtggtaagtggaaacacaagtacagtgaaaagatagcattatttctgaacagtcaaattaaccgaaataagtagtatcacatactgcccctaaattgactacacccaatgtaaagaattgcttgagcatattgagccatcagttgtttgtttgtgtaacggatttgacaatgcagagttcaggagcaaaaaaccgcaaaggagagaaagagggaaaggatctcctagtatcccaccttgtggcgcgccctgtcaagtgcatgatggcctggtcgatctgcgtctgctgctgcggttccatcccaacgagtgcctccgacaccttgtcgttgatcacccgcaccgcgtaggcgacccccctggcgaggaacttccgcctctcggaggccccggccgcgtcggcggcggcgccctcgagcgcgcccacgctagccgtagatgctcggtgcacggccttgttggtgtgcaactcgacctcaacggccggtgcgctacgcccgtcaaggatctggcgcgcccgcaccctcgtgatcacggtgggcgcctcccgcctcatgtggccgacgatgaaaagcgccgggttaggggccttggcgcgcaccgccgtattcagggcctcctcgctcttgcgcgagagcaggtgcttccccaggtactcctgcactgacaaggctgccacagcggtggaatttgtcctcacgacttcgccacgtcgtcctcacctccctggcttcccacgactccgccgtatcgaggtgctcggtgggtcgtcttaatccgaagtccgaactaggaagacgagacagagaggtctgaggaatgggcctcgtttgatgttgagctgaattatttttccagcataagcccaggtcttggtccatgaacaaaattactagaaacccagcccagtactacgatctaaaagagggactgccactggatagctctctctagcattctccacgctccaatacagcggcgtcgtgtctatccgggtctatccgcgaacacgtgagaactctccagaaactgctttctcctccacttcatctctctcgctttccctctataaaaagaccccttctaggaattgagggagacagcaagcaccaagcagcgatccgaagctcaatcaattcactcaaacctcttccccaaatcttcgattagatcttcgttgacaagaagactagaaccgaacctgacatgtccaacctgctcacggttcaccagaaccttccggctcttccagtggacgcgacgtccgatgaagtcaggaagaacctcatggacatgttccgcgacaggcaagcgttcagcgagcacacctggaagatgctgctctccgtctgccgctcctgggctgcatggtgcaagctgaacaacaggaagtggttccccgctgagcccgaggacgtgagggattaccttctgtacctgcaagcgcgaggtttgtttctgcttctacctttgatatatatataataattatcattaattagtagtaatataatatttcaaatatttttttcaaaataaaagaatgtagtatatagcaattgcttttctgtagtttataagtgtgtatattttaatttataacttttctaatatatgaccaaaacatggtgatgcctaggtctggcagtgaagaccatccagcaacaccttggacaactgaacatgcttcacaggcgctccggcctcccgcgccccagcgactcgaacgccgtgagcctcgtcatgcgccgcatcaggaaggaaaacgtcgatgccggcgaaagggcaaagcaggccctcgcgttcgagaggaccgatttcgaccaggtccgcagcctgatggagaacagcgacaggtgccaggacattaggaacctggcgttcctcggaattgcatacaacacgctcctcaggatcgcggaaattgcccgcattcgcgtgaaggacattagccgcaccgacggcggcaggatgcttatccacattggcaggaccaagacgctcgtttccaccgcaggcgtcgaaaaggccctcagcctcggagtgaccaagctcgtcgaacgctggatctccgtgtccggcgtcgcggacgacccaaacaactacctcttctgccgcgtccgcaagaacggggtggctgcccctagcgccaccagccaactcagcacgagggccttggaaggtattttcgaggccacccaccgcctgatctacggcgcgaaggatgacagcggtcaacgctacctcgcatggtccgggcactccgcccgcgttggagctgctagggacatggcccgcgccggtgtttccatccccgaaatcatgcaggcgggtggatggacgaacgtgaacattgtcatgaactacattcgcaaccttgacagcgagacgggcgcaatggttcgcctcctggaagatggtgactgaggtacccaacctagacttgtccatcttctggattggccaacttaattaatgtatgaaataaaaggatgcacacatagtgacatgctaatcactataatgtgggcatcaaagttgtgtgttatgtgtaattactagttatctgaataaaagagaaagagatcatccatatttcttatcctaaatgaatgtcacgtgtctttataattctttgatgaaccagatgcatttcattaaccaaatccatatacatataaatattaatcatatataattaatatcaattgggttagcaaaacaaatctagtctaggtgtgttttgcgatccgatatcgaattggccacggtaccagctgctgctgttctagggttcacaagtctgcctatttgtcttccccaatggagctatggttgtctggtctggtccttggtcgtgtcccgtttcattgtgtactatttacctgtaatgtgtatccttaagtctggtttgatggtgtctgaaacgttttgctgtggtagagcagcatggaagaactataatgaataagtgatccctaatcattgtgtccaaattttgcttctgctatacccttttgtgctgtttcttatgttttgcttaaaaatttgatctgacaaacaaatttgtctaaattatgctcttgttctgactgtgtactgtacacatttgtattgctaccggtttggcacatagttttctctttgattgcagatcaaacccttctgattgcagattgcttggctatggctgatgtgctcactgttcttctttagcttgtatattgctgatggtggcttggctacggctgaaaaagttgctgctgcgccgacttggcaactgttgctccagtaatgctttgtcctctcttcctagccgccgacttggcacttggcagctgttgctcctgtaatgcgttgttatctcttatctcttgagatgtactatgattttgaggctgtttgacttgtgccagattgccagtgctgatgctatattatctcaggtttttatgctagtatatgttttactgtgtgctgcctgtgtcgagttacgtaatctattgaaccgctatgcgtgttgatgccctgttgttgcttgccagattgatgcccctgttgcttgcagcttgcaagctgtagtgaaatcctaaaattccaaaccaaatctattctgaacttttgaagatctgtgatgtccggaagaaaagattcaaacagataaacgggactctccagaatctataaaataaatgatcgacaaacgctttgctttggtaggcttcaagcttggtcacccggtccgggcctagaaggccagcttcggccgccccgggcaactttattatacaaagttgatagataaatcagatatctggttcctaaggacccggcggaccgattaaactgattcggtccgacgcgttacctaataacttcgtatagcatacattatacgaagttattagctaactaactagtaagcttaagccatgggtcgacggatccgttaactagcgtggcatttggcaccgccgcacactatgcgagctaggagtgctagtttacagatgaaactatgaaaccaagaaaacacaattgtccgtagctagcgcgtggcgtcgtgtcaagcttcacacagtatcttcgttcttcactataaatcgcgcctgttgttcgtgagacccaccaccgtggataacagtcccctaataataagcgatcaacagcactgctgatggctgaacaccgaggcgccgccgcgcgtaaccatccgccggagcagcccgtcgtgccggcgaacgacgccttccccgaccgcgcccagcagctctgcctcgacgccgggcgcgcgctcgcgatgtgcggcgtgctcgtcgccgtccctcccgcattttacgcgtcgacgtcgcggacgacaccgcacttgccttcgtcggcttcgtcctctggatcatcggtgcgtggctgtgcctcctggcgctcacgcccttggctccacgggcggtgagggcgggcggggccgccgccagcaccttgctgatcaggtgcctgtccctttcatgaactactagcgcccgcgcccgcggccgccgggcacaagagaacacatcgatgttcgctgcgtacgtcagcaataaggcactctttgtcagtagtcgagtgcatatgttgggtgtttgccctgggagatttcaagtgttgtggccattatcccgcaggataaaaaatcggcggcttttggattgatacggaaaataacgatgtttcatgctcgtgttgtgtgtgtgacatcttgtcagccaagtttttaaccgttgctactccccctctgtgggctcagtgtgtggaccggaatacgtcgtacataggccgtagcctaagcccaatatgccgtttttcaggttggcctgtgtgacgacaagcgggtctcaaaagcccatcacgcaactggcctgcaattattggaggagagcgcgtcgagttggttccagaggctgcgtggtggggccggactctgcgacgacctctcgttcgcgtccgatttggttgccgtgagccgtgacgtaacgcctccttccgttcctccctatataagttccacccccgggtccggtttccccaagccccagtgacccccgatcccgatcgcgaaatctccgcacccgccggcaagggaccgaagcaagcctctctcccgaccgtcgcatcaaggtacgcgtccgctcgatctgtcctcttccttctcgatttgacttgctgtggtgcccgatcacgggatcagaatcgcaccagtgtagatttcgcatgttctaagatgtgttagtttccaggctaatccagttctcttgacgcccgatccgatcgagctccgtgtttatttcagcctaatcgtagtattcccctaaaatttcctcattagggggttcgcaagattgttggtcgacaggttcacttatgctcgatcgcttacttttagtcgattcatgctgcgtactattgttgccccccgtggttttatcttttctcgtgtgaaatccagtagatatagtagatatcgtagcattaggttttaattcaatcgattgattattgtatcatcaaaattgagaagttcgaatcatgcctatcatgctgcctcaaccgaaatcctgtatattgaagtttcaattcaattgattgatcattcattagattcaaccaaaatctagaaggttagatgacgcatgtcatgctgcctgcgtagtttacctttgatctgtttatgattaccttatcagtaggatatttgtgattttgggaagtagcactaactgattcatgctgacatgatgttccctttcagattatactgttgagtcctatctaattgatgctttgtatgctatatgaatacgtcatggtaaattagcagttaattagcatattagcaattgggcgtacctcatcaggattgctcttgtagatgtgtgtggtgatgtttcttgttcaattcatgttctgctttaaaagtatgtgttctctgtttgttaattaagattcatggttataatgatttggacctaattaatcagggttgcccttttagatgcgtggttacttgttgagttcatttttttcctgctatagttgtatgcgtttgttcattcatggttagatttgatttgtttcttctctattccatgccttccatatacttcaattgtagcttaacatgagatttctgtatatgcaggtcgaccgccggggatccacacgacaccatggcccagtccaagcacggcctgaccaaggagatgaccatgaagtaccgcatggagggctgcgtggacggccacaagttcgtgatcaccggcgagggcatcggctaccccttcaagggcaagcaggccatcaacctgtgcgtggtggagggcggccccttgcccttcgccgaggacatcttgtccgccgccttcatgtacggcaaccgcgtgttcaccgagtacccccaggacatcgtcgactacttcaagaactcctgccccgccggctacacctgggaccgctccttcctgttcgaggacggcgccgtgtgcatctgcaacgccgacatcaccgtgagcgtggaggagaactgcatgtaccacgagtccaagttctacggcgtgaacttccccgccgacggccccgtgatgaagaagatgaccgacaactgggagccctcctgcgagaagatcatccccgtgcccaagcagggcatcttgaagggcgacgtgagcatgtacctgctgctgaaggacggtggccgcttgcgctgccagttcgacaccgtgtacaaggccaagtccgtgccccgcaagatgcccgactggcacttcatccagcacaagctgacccgcgaggaccgcagcgacgccaagaaccagaagtggcacctgaccgagcacgccatcgcctccggctccgccttgccctccggactcagatctcgatagagtcaacctagacttgtccatcttctggattggccaacttaattaatgtatgaaataaaaggatgcacacatagtgacatgctaatcactataatgtgggcatcaaagttgtgtgttatgtgtaattactagttatctgaataaaagagaaagagatcatccatatttcttatcctaaatgaatgtcacgtgtctttataattctttgatgaaccagatgcatttcattaaccaaatccatatacatataaatattaatcatatataattaatatcaattgggttagcaaaacaaatctagtctaggtgtgttttgcgaattgcggcgcccttactttaacgcctctaaccaacacccctttatctttataaggaacaataaacagaatttgccccactgttctaaatcacctaataatatccccagctaaaaacaataaaggtttcctagaattaagacaagcatgactgttcctccaggagggtttggaacattgttgcagtcttgcagatacgggcgaagggtgagaaacagagcggagggctggaggtgacctcggtagtcgacgccggagttgagcttgacaacgacggggcggcccctgatggacttgaggaagtccgatggcgtcttcaccgtcccgccggcgcccgaggcgggcctgtcgctgccgccgccgccgctgctcatcttgcgcgctgtgcccccggcggtgtccctgtgttgcggatcgcgggtgggccaggtggatgcgagggcgacccgtttggactccggccggagccgccggatccctggtcggtgtcagtgccgtttactctgggccccacgtgtcagtaccgtctgtagatgacaacaacccgtcgtccacagtcatgtccaaaatatcctttcttcttttttttcgattcggatatctatcttccttttttttttccaaaaatcttcttgacgcaccagcgcgcacgtttgtggtaaacgccgacacgtcggtcccacgtcgatagaccccacccaccagtgagtagcgtgtacgtattcgggggtgacggacgtgtcgccgtcgtcttgctagtcccattcccatctgagccacacatctctgaacaaaaaaaaggagggaggcctccacgcacatccccctccgtgccacccgccccaaaccctcgcgccgcctccgagacagccgccgcaaccatggccaccgccgccgccgcgtctaccgcgctcactggcgccactaccgctgcgcccaaggcgaggcgccgggcgcacctcctggccacccgccgcgccctcgccgcgcccatcaggtgctcagcggcgtcacccgccatgccgatggctcccccggccaccccgctccggccgtggggccccaccgagccccgcaagggtgctgacatcctcgtcgagtccctcgagcgctgcggcgtccgcgacgtcttcgcctaccccggcggcgcgtccatggagatccaccaggcactcacccgctcccccgtcatcgccaaccacctcttccgccacgagcaaggggaggcctttgccgcctccggctacgcgcgctcctcgggccgcgtcggcgtctgcatcgccacctccggccccggcgccaccaacctagtctccgcgctcgccgacgcgctgctcgattccgtccccatggtcgccatcacgggacaggtggcgcgacgcatgattggcaccgacgccttccaggagacgcccatcgtcgaggtcacccgctccatcaccaagcacaactacctggtcctcgacgtcgacgacatcccccgcgtcgtgcaggaggctttcttcctcgcctcctctggtcgaccagggccggtgcttgtcgacatccccaaggacatccagcagcagatggcggtgcctgtctgggacaagcccatgagtctgcctgggtacattgcgcgccttcccaagccccctgcgactgagttgcttgagcaggtgctgcgtcttgttggtgaatcgcggcgccctgttctttatgtgggcggtggctgcgcagcatctggtgaggagttgcgacgctttgtggagctgactggaatcccggtcacaactactcttatgggcctcggcaacttccccagcgacgacccactgtctctgcgcatgctaggtatgcatgggacggtgtatgcaaattatgcagtggataaggccgatctgttgcttgcacttggtgtgcggtttgatgatcgcgtgacagggaagattgaggcttttgcaagcagggctaagattgtgcacgttgatattgatccggctgagattggcaagaacaagcagccacatgtgtccatctgtgcagatgttaagcttgctttgcagggcatgaatgctcttcttgaaggaagcacatcaaagaagagctttgactttggctcatggaacgatgagttggatcagcagaagagggaattcccccttgggtataaaacatctaatgaggagatccagccacaatatgctattcaggttcttgatgagctgacgaaaggcgaggccatcatcggcacaggtgttgggcagcaccagatgtgggcggcacagtactacacttacaagcggccaaggcagtggttgtcttcagctggtcttggggctatgggatttggtttgccggctgctgctggtgcttctgtggcaaacccaggtgtcactgttgttgacatcgatggagatggtagctttctcatgaacgttcaggagctagctatgatccgaattgagaacctcccagtgaaggtctttgtgctaaacaaccagcacctggggatggtggtgcagttggaggacaggttctataaggccaacagagcgcacacatacttgggaaacccagagaatgaaagtgagatatatccagatttcgtgacgatcgccaaagggttcaacattccagcggtccgtgtgacaaagaagaacgaagtccgcgcagcgataaagaagatgctcgagactccagggccgtacctcttggatataatcgtcccacaccaggagcatgtgttgcctatgatccctagtggtggggctttcaaggatatgatcctggatggtgatggcaggactgtgtactgactagctagtcagttaacagatctgccagatcctcggtgtacaaataacccgtcttatcctatgagacgggccggcgtcagtgtgttctggaggaatttttatgtcagagcctttttctttgtgtgcttgatgtagatgccaagggaagcttattggctgttgaagcttgatgcaaaataaattatggaactctgttttttgtttatctaataataactagcaaatatgcttccattgcattgaaactaacagccttttgtgtttccaagttttattttgtgacaatgtcatctatttcaattagttgtggaatcggaaacttgcaggactaacttggaaactccaatccctcagcatcctggactttttcctggtgtaatccatgtagatattattttaatcatcattttagttctggaggtttttccatctccggttttgctcccctttcttcaaaaaaaaaaaaaaaatgccgtaggcgccgcaacgcccacctgttgttcaaactcatgggcacgagtggctcgaagattttatacaacaattgctgtagtttcaccgttgctggtgaagaagcatttttttaaaaaaatatagtggtattcattttaattagtttagttgtgcagcgagcaaaatttggacatgctctgctcggaatctgatcgacctagacacagattagcagcagtagctttgtcatctgttccaagagttgcgatctgatagaagaaaaaaaaaccttcccttcaatgtaaaaccgaaactaacaagaaagaagcacagtgccgtttaggcaagtatggagtacgtattaagcatgtagaaggccatgcatgaaccactaacaagaaagaagcgcagtgccattcaggcaagcataagcatgtagattggcatgcatgaacaactaacagtagatcgtctctggtctgattagaagttttttgggaagccaagaaatcatgtacaactggttccatctcaaattccgtggcaaaaagaggcctaagcaacatacctcgagtagatcacattcaagcttggtcacccggtccgtcaatattctgattccgatgacttcgtaggttcctagctcaagccgctcgtgtccaagcgtcacttacgattagctaatgattacggcatctaggaccgactagtggcgcgccgactagctagctaaggtaccgagctcgaattcattccgattaatcgtggcctcttgctcttcaggatgaagagctatgtttaaacgtgcaagcgctactagacaattcagtacattaaaaacgtccgcaatgtgttattaagttgtctaagcgtcaatttgtttacaccacaatatatcctgcca

SEQ ID NO: 88 - DNA, 23775 bp, synthetic construct
  misc_feature 1..23775: note = PHP98392
  source 1..23775: mol_type = other DNA
gtttacccgccaatatatcctgtcaaacactgcggccgcacttgaccgcggatggagccggagctgtggtgaggccatcgacgggaggtgggggagaacacagtctcagtgttctttgtgagtccgcaaggtttttagcttttctgtattaattaaggttgctgttggctgtagaatacggtcgtggaagagctgtatcggtagctactacgtaagctattatatactggaagtctggagctcgtcgatctccggtcgtcttcctccatttctcctcgtcttgctttgactgctgctaccatttgcttctgttttctgatgaagcatgccatgtcggccaccagtgtttgtgtggtttttgcagggaatggctttcaagtgctgtgattgaatggccctcgtcgtcctcggctgagctcacatggacgcgtcatgtgagtgagatatatgatcatatgatgagtggggttcgggtgagtgcgtacttgaagtaggatcccgctttcactcattcattcattggcctttaaaccgggaaattttcgcgaggagatggagggaagcaagcagggtgacgagtgcagagtgccgcgagcgctttgtcaaaaggcaccgccgtaggcaaaaaaatcaatggccctgactgactcgatggtagtactactgtagagactagagagggttgctccccatatcttcgtgtgacttttactccagcattgcatttccgtcattgagacgttaattaatagcagctttcgggacagatgactgtggccatgtttcgtcacggccgcttcgtgccagctgggggtactatagtactgtgattttgttagtaaaaactttcattaggccaccattgacgaccgggccttcgcttttgctgcgctaattaaccatttcccggcgaccgaagggaacatgaacatgccccgacacatgagggcatgaggactagtgttctccctgtcgttcgttgacttgactagtgatagtttaaacgctcttcaactggaagagcggttactaccggttcactagctagctgctaatcgagctagttaccctatgaggtgacatgaagcgctcacggttactatgacggttagcttcacgactgttggtggcagtagcgtacgacttagctatagttccggacttacctagcgtgcagcgtgacccggtcgtgcccctctctagagataatgagcattgcatgtctaagttataaaaaattaccacatattttttttgtcacacttgtttgaagtgcagtttatctatctttatacatatatttaaactttactctacgaataatataatctatagtactacaataatatcagtgttttagagaatcatataaatgaacagttagacatggtctaaaggacaattgagtattttgacaacaggactctacagttttatctttttagtgtgcatgtgttctcctttttttttgcaaatagcttcacctatataatacttcatccattttattagtacatccatttagggtttagggttaatggtttttatagactaatttttttagtacatctattttattctattttagcctctaaattaagaaaactaaaactctattttagtttttttatttaataatttagatataaaatagaataaaataaagtgactaaaaattaaacaaataccctttaagaaattaaaaaaactaaggaaacatttttcttgtttcgagtagataatgccagcctgttaaacgccgtcgacgagtctaacggacaccaaccagcgaaccagcagcgtcgcgtcgggccaagcgaagcagacggcacggcatctctgtcgctgcctctggacccctctcgagagttccgctccaccgttggacttgctccgctgtcggcatccagaaattgcgtggcggagcggcagacgtgagccggcacggcaggcggcctcctcctcctctcacggcaccggcagctacgggggattcctttcccaccgctccttcgctttcccttcctcgcccgccgtaataaatagacaccccctccacaccctctttccccaacctcgtgttgttcggagcgcacacacacacaaccagatctcccccaaatccacccgtcggcacctccgcttcaaggtacgccgctcgtcctcccccccccccctctctaccttctctagatcggcgttccggtccatgcatggttagggcccggtagttctacttctgttcatgtttgtgttagatccgtgtttgtgttagatccgtgctgctagcgttcgtacacggatgcgacctgtacgtcagacacgttctgattgctaacttgccagtgtttctctttggggaatcctgggatggctctagccgttccgcagacgggatcgatttcatgattttttttgtttcgttgcatagggtttggtttgcccttttcctttatttcaatatatgccgtgcacttgtttgtcgggtcatcttttcatgcttttttttgtcttggttgtgatgatgtggtctggttgggcggtcgttctagatcggagtagaattctgtttcaaactacctggtggatttattaattttggatctgtatgtgtgtgccatacatattcatagttacgaattgaagatgatggatggaaatatcgatctaggataggtatacatgttgatgcgggttttactgatgcatatacagagatgctttttgttcgcttggttgtgatgatgtggtgtggttgggcggtcgttcattcgttctagatcggagtagaatactgtttcaaactacctggtgtatttattaattttggaactgtatgtgtgtgtcatacatcttcatagttacgagtttaagatggatggaaatatcgatctaggataggtatacatgttgatgtgggttttactgatgcatatacatgatggcatatgcagcatctattcatatgctctaaccttgagtacctatctattataataaacaagtatgttttataattattttgatcttgatatacttggatgatggcatatgcagcagctatatgtggatttttttagccctgccttcatacgctatttatttgcttggtactgtttcttttgtcgatgctcaccctgttgtttggtgttacttctgcaggtcgactctagaggatcaattcgctagcataacttcgtatagcatacattatacgaagttatccagatccacgttaccaagcggccgcacactgatagtttaaactgaaggcgggaaacgacaatctgatcatgagcggagaattaagggagtcacgttatgacccccgccgatgacgcgggacaagccgttttacgtttggaactgacagaaccgcaacgattgaaggagccactcagccgcgggtttctggagtttaatgagctaagcacatacgtcagaaaccattattgcgcgttcaaaagtcgcctaaggtcactatcagctagcaaatatttcttgtcaaaaatgctccactgacgttccataaattcccctcggtatccaattagagtctcatattcactcccatggcggccaatgcgggcggcggtggagcgggaggaggcagcggcagcggcagcgtggctgcgccggcggtgtgccgccccagcggctcgcggtggacgccgacgccggagcagatcaggatgctgaaggagctctactacggctgcggcatccggtcgcccagctcggagcagatccagcgcatcaccgccatgctgcggcagcacggcaagatcgagggcaagaacgtcttctactggttccagaaccacaaggcccgcgagcgccagaagcgccgcctcaccagcctcgacgtcaacgtgcccgccgccggcgcggccgacgccaccaccagccaactcggcgtcctctcgctgtcgtcgccgccgccttcaggcgcggcgcctccctcgcccaccctcggcttctacgccgccggcaatggcggcggatcggctgtgctgctggacacgagttccgactggggcagcagcggcgctgctatggccaccgagacatgcttcctgcaggactacatgggcgtgacggacacgggcagctcgtcgcagtggccacgcttctcgtcgtcggacacgataatggcggcggccgcggcgcgggcggcgacgacgcgggcgcccgagacgctccctctcttcccgacctgcggcgacgacggcggcagcggtagcagcagctacttgccgttctggggtgccgcgtccacaactgccggcgccacttcttccgttgcgatccaacagcaacaccagctgcaggagcagtacagcttttacagcaacagcaacagcacccagctggccggcaccggcaaccaagacgtatcggcaacagcagcagcagccgccgccctggagctgagcctcagctcatggtgctccccttaccctgctgcagggagtatgtgagagcaacgcgagctgccactgctcttcactgatgtctctggaatggaaggaggaggaagtgagaacagatcattcgacaaagcagcattagtccgttgatcggtggaagaccactcgtcagtgttgagttgaatgtttgatcaataaaatacggcaatgctgtaagggttgttttttatgccattgataatacactgtactgttcagttgttgaactctatttcttagccatgccaagtgcttttcttattttgaataacattacagcaaaaagttgaaagacaaaaaaaaaaacccccgaacagagtgctttgggtcccaagcttctttagactgtgttcggcgttccccctaaatttctccccctatatctcactcacttgtcacatcagcgttctctttccccctatatctccacgctctacagcagttccacctatatcaaacctctataccccaccacaacaatattatatactttcatcttcaactaactcatgtaccttccaatttttttctactaataattatttacgtgcacagaaacttagcaaggagagagagagcgggaatttaaatgctcggcgttaggcttttagtccgctaggtggctagaccgaggttaggacgctagttcactaggggcctagtggtgttttaagacgtcacggtcactacgaatcgaccgaagcttgcatgggccgcatcgagcagctggcttgtggggaccagacaaaaaaggaatggtgcagaattgttaggcgcacctaccaaaagcatctttgcctttattgcaaagataaagcagattcctctagtacaagtggggaacaaaataacgtggaaaagagctgtcctgacagcccactcactaatgcgtatgacgaacgcagtgacgaccacaaaactcgagcaacgagatcatgagccaatcaaagaggagtgatgtagacctaaagcaataatggagccatgacgtaagggcttacgcccatacgaaataattaaaggctgatgtgacctgtcggtctctcagaacctttactttttatgtttggcgtgtatttttaaatttccacggcaatgacgatgtgaccgtcgacccactaaaacattgctttgtcaaaagctaaaaaagatgatgcccgacagccacttgtgtgaagcatgagaagccggtccctccactaagaaaattagtgaagcatcttccagtggtccctccactcacagctcaatcagtgagcaacaggacgaaggaaatgacgtaagccatgacgtctaatcccagggccagcttgcatgcctgcagtgcagcgtgacccggtcgtgcccctctctagagataatgagcattgcatgtctaagttataaaaaattaccacatattttttttgtcacacttgtttgaagtgcagtttatctatctttatacatatatttaaactttactctacgaataatataatctatagtactacaataatatcagtgttttagagaatcatataaatgaacagttagacatggtctaaaggacaattgagtattttgacaacaggactctacagttttatctttttagtgtgcatgtgttctcctttttttttgcaaatagcttcacctatataatacttcatccattttattagtacatccatttagggtttagggttaatggtttttatagactaatttttttagtacatctattttattctattttagcctctaaattaagaaaactaaaactctattttagtttttttatttaataatttagatataaaatagaataaaataaagtgactaaaaattaaacaaataccctttaagaaattaaaaaaactaaggaaacatttttcttgtttcgagtagataatgccagcctgttaaacgccgtcgacgagtctaacggacaccaaccagcgaaccagcagcgtcgcgtcgggccaagcgaagcagacggcacggcatctctgtcgctgcctctggacccctctcgagagttccgctccaccgttggacttgctccgctgtcggcatccagaaattgcgtggcggagcggcagacgtgagccggcacggcaggcggcctcctcctcctctcacggcaccggcagctacgggggattcctttcccaccgctccttcgctttcccttcctcgcccgccgtaataaatagacaccccctccacaccctctttccccaacctcgtgttgttcggagcgcacacacacacaaccagatctcccccaaatccacccgtcggcacctccgcttcaaggtacgccgctcgtcctcccccccccccctctctaccttctctagatcggcgttccggtccatgcatggttagggcccggtagttctacttctgttcatgtttgtgttagatccgtgtttgtgttagatccgtgctgctagcgttcgtacacggatgcgacctgtacgtcagacacgttctgattgctaacttgccagtgtttctctttggggaatcctgggatggctctagccgttccgcagacgggatcgatttcatgattttttttgtttcgttgcatagggtttggtttgcccttttcctttatttcaatatatgccgtgcacttgtttgtcgggtcatcttttcatgcttttttttgtcttggttgtgatgatgtggtctggttgggcggtcgttctagatcggagtagaattctgtttcaaactacctggtggatttattaattttggatctgtatgtgtgtgccatacatattcatagttacgaattgaagatgatggatggaaatatcgatctaggataggtatacatgttgatgcgggttttactgatgcatatacagagatgctttttgttcgcttggttgtgatgatgtggtgtggttgggcggtcgttcattcgttctagatcggagtagaatactgtttcaaactacctggtgtatttattaattttggaactgtatgtgtgtgtcatacatcttcatagttacgagtttaagatggatggaaatatcgatctaggataggtatacatgttgatgtgggttttactgatgcatatacatgatggcatatgcagcatctattcatatgctctaaccttgagtacctatctattataataaacaagtatgttttataattattttgatcttgatatacttggatgatggcatatgcagcagctatatgtggatttttttagccctgccttcatacgctatttatttgcttggtactgtttcttttgtcgatgctcaccctgttgtttggtgttacttctgcaggtcgactttaacttagcctaggatccatggccactgtgaacaactggctcgctttctccctctccccgcaggagctgccgccctcccagacgacggactccacactcatctcggccgccaccgccgaccatgtctccggcgatgtctgcttcaacatcccccaagattggagcatgaggggatcagagctttcggcgctcgtcgcggagccgaagctggaggacttcctcggcggcatctccttctccgagcagcatcacaaggccaactgcaacatgatacccagcactagcagcacagtttgctacgcgagctcaggtgctagcaccggctaccatcaccagctgtaccaccagcccaccagctcagcgctccacttcgcggactccgtaatggtggcttcctcggccggtgtccacgacggcggtgccatgctcagcgcggccgccgctaacggtgtcgctggcgctgccagtgccaacggcggcggcatcgggctgtccatgattaagaactggctgcggagccaaccggcgcccatgcagccgagggtggcggcggctgagggcgcgcaggggctctctttgtccatgaacatggcggggacgacccaaggcgctgctggcatgccacttctcgctggagagcgcgcacgggcgcccgagagtgtatcgacgtcagcacagggtggagccgtcgtcgtcacggcgccgaaggaggatagcggtggcagcggtgttgccggcgctctagtagccgtgagcacggacacgggtggcagcggcggcgcgtcggctgacaacacggcaaggaagacggtggacacgttcgggcagcgcacgtcgatttaccgtggcgtgacaaggcatagatggactgggagatatgaggcacatctttgggataacagttgcagaagggaagggcaaactcgtaagggtcgtcaagtctatttaggtggctatgataaagaggagaaagctgctagggcttatgatcttgctgctctgaagtactggggtgccacaacaacaacaaattttccagtgagtaactacgaaaaggagctcgaggacatgaagcacatgacaaggcaggagtttgtagcgtctctgagaaggaagagcagtggtttctccagaggtgcatccatttacaggggagtgactaggcatcaccaacatggaagatggcaagcacggattggacgagttgcagggaacaaggatctttacttgggcaccttcagcacccaggaggaggcagcggaggcgtacgacatcgcggcgatcaagttccgcggcctcaacgccgtcaccaacttcgacatgagccgctacgacgtgaagagcatcctggacagcagcgccctccccatcggcagcgccgccaagcgcctcaaggaggccgaggccgcagcgtccgcgcagcaccaccacgccggcgtggtgagctacgacgtcggccgcatcgcctcgcagctcggcgacggcggagccctggcggcggcgtacggcgcgcactaccacggcgccgcctggccgaccatcgcgttccagccgggcgccgccagcacaggcctgtaccacccgtacgcgcagcagccaatgcgcggcggcgggtggtgcaagcaggagcaggaccacgcggtgatcgcggccgcgcacagcctgcaggacctccaccacctgaacctgggcgcggccggcgcgcacgactttttctcggcagggcagcaggccgccgccgctgcgatgcacggcctgggtagcatcgacagtgcgtcgctcgagcacagcaccggctccaactccgtcgtctacaacggcggggtcggcgacagcaacggcgccagcgccgtcggcggcagtggcggtggctacatgatgccgatgagcgctgccggagcaaccactacatcggcaatggtgagccacgagcaggtgcatgcacgggcctacgacgaagccaagcaggctgctcagatggggtacgagagctacctggtgaacgcggagaacaatggtggcggaaggatgtctgcatgggggactgtcgtgtctgcagccgcggcggcagcagcaagcagcaacgacaacatggccgccgacgtcgggcatggcggcgcgcagctcttcagtgtctggaacgacacttaagcgtacctagtggtacctgacatcttatagtctgcaacctctcgtgtctgaattcctatctttatcaagtgttattgcttccacgactataggacagctttcgtcgaaagcttttgctcatgtgatctcgaaggattcatctagtctgatttttcgtgacttgtatcggttttattggattcatccaacatatatcaataaaaaatgagttgtgtttcctttcttcctagttcagttaaaattatttccctcctgcgcttgtgctgtaattgtctgtgtacctgttgtttgtgactgtgttagttcccttggatatgatttcgtatttgatatgtacatggagatagcttagcttcattattggagtatgaagttagtatgacatagtcactctcctggaaaattgacactgcaaaccatatttttattctgaaccacaaatcctagtcagtccgctggcatatgccgtccgtttgctgaatccagaacgtgggtttggagatgtacggctgagatgcctctatgcgaaggggatttcgtggtgaaacgagatgggagtagagcaacgcccgtggaagatgcttcaaacttccacacttttgagcaacgatcggcagtagtaaggtagacgatttcaagatcaaagcatatgaagataaacaacatcaacaacaaaatttgttggggttctatagagagaaacagagctacatacatacactgttttgtatctaccatctgagatgatgaaaagatgaaaaactaaagaatgccccggcgccaacgccaggacacgccgcgcgcgcgtcacccgagccatctcttgacccagccggcgctgtatatttacacacgttgcagcatcgatcaccacctgttcgatcgcgtcgccgtcaccggcgcgccgcgacttattgaactagtctagggcgcggctaacaacctagcttagattgccttgtctaaacccttaggctaacgcgccactctagaaggccgatctcccccgaacgcgccagatccgatatcgatgggccctggccgaagcttggtcacccgcaccttgctagttggatattacctcttctcttcaaagtatccttgaacgctcaccggttatcaaatctctacactatagctctgtagtcttgctagatagttagttctttagctctctctagaggttcacaaactcaatacaacacacagtggagtagggtattacgctccggcggcccgaaccactctaaatccttgtgtcctcgtgtgctcttccaccattaatgactgtaattgcagggacacgaagagttgtagcgcttttgccaacaagatccgctatatgctagtagagtggaacctgcacagcaacaagcatccaataatctgagaataagaattatgtgtggtgatggttctcatctctgcaactcgccattttcgcgagagaaccaaatccaagttggtgaagatcatgatttgggctcatgggctggcatagtagctattacctttgcaattgtggttcgaatctatccgatattctccttttcagggagagctaatgcttatgcttattgggtattttggtttgacactgcttcacgcccaaaaaaaggcaactatgtctgagttggatatggcccaaaaaaaggcagctatgtctgagttggatatggaagtcttctttcgtttagggtgaagtaagaccaagctcatgagcttattatcttaggtcggaacaaattagttgataggcatggcacatttatcaaattataatgattttaacagaaaagcaacacctctttttcagcagcaccagctttgcaagctgcaattgacactccaagcatagtatttgctccaaactcagcctgcatttcgcacaatatcatatctatttccatttggataaaatatattttccagaaatatgggaacagaatcaagatacagaaaaaagttgtggtagtagtggtaagtggaaacacaagtacagtgaaaagatagcattatttctgaacagtcaaattaaccgaaataagtagtatcacatactgcccctaaattgactacacccaatgtaaagaattgcttgagcatattgagccatcagttgtttgtttgtgtaacggatttgacaatgcagagttcaggagcaaaaaaccgcaaaggagagaaagagggaaaggatctcctagtatcccaccttgtggcgcgccctgtcaagtgcatgatggcctggtcgatctgcgtctgctgctgcggttccatcccaacgagtgcctccgacaccttgtcgttgatcacccgcaccgcgtaggcgacccccctggcgaggaacttccgcctctcggaggccccggccgcgtcggcggcggcgccctcgagcgcgcccacgctagccgtagatgctcggtgcacggccttgttggtgtgcaactcgacctcaacggccggtgcgctacgcccgtcaaggatctggcgcgcccgcaccctcgtgatcacggtgggcgcctcccgcctcatgtggccgacgatgaaaagcgccgggttaggggccttggcgcgcaccgccgtattcagggcctcctcgctcttgcgcgagagcaggtgcttccccaggtactcctgcactgacaaggctgccacagcggtggaatttgtcctcacgacttcgccacgtcgtcctcacctccctggcttcccacgactccgccgtatcgaggtgctcggtgggtcgtcttaatccgaagtccgaactaggaagacgagacagagaggtctgaggaatgggcctcgtttgatgttgagctgaattatttttccagcataagcccaggtcttggtccatgaacaaaattactagaaacccagcccagtactacgatctaaaagagggactgccactggatagctctctctagcattctccacgctccaatacagcggcgtcgtgtctatccgggtctatccgcgaacacgtgagaactctccagaaactgctttctcctccacttcatctctctcgctttccctctataaaaagaccccttctaggaattgagggagacagcaagcaccaagcagcgatccgaagctcaatcaattcactcaaacctcttccccaaatcttcgattagatcttcgttgacaagaagactagaaccgaacctgacatgtccaacctgctcacggttcaccagaaccttccggctcttccagtggacgcgacgtccgatgaagtcaggaagaacctcatggacatgttccgcgacaggcaagcgttcagcgagcacacctggaagatgctgctctccgtctgccgctcctgggctgcatggtgcaagctgaacaacaggaagtggttccccgctgagcccgaggacgtgagggattaccttctgtacctgcaagcgcgaggtttgtttctgcttctacctttgatatatatataataattatcattaattagtagtaatataatatttcaaatatttttttcaaaataaaagaatgtagtatatagcaattgcttttctgtagtttataagtgtgtatattttaatttataacttttctaatatatgaccaaaacatggtgatgcctaggtctggcagtgaagaccatccagcaacaccttggacaactgaacatgcttcacaggcgctccggcctcccgcgccccagcgactcgaacgccgtgagcctcgtcatgcgccgcatcaggaaggaaaacgtcgatgccggcgaaagggcaaagcaggccctcgcgttcgagaggaccgatttcgaccaggtccgcagcctgatggagaacagcgacaggtgccaggacattaggaacctggcgttcctcggaattgcatacaacacgctcctcaggatcgcggaaattgcccgcattcgcgtgaaggacattagccgcaccgacggcggcaggatgcttatccacattggcaggaccaagacgctcgtttccaccgcaggcgtcgaaaaggccctcagcctcggagtgaccaagctcgtcgaacgctggatctccgtgtccggcgtcgcggacgacccaaacaactacctcttctgccgcgtccgcaagaacggggtggctgcccctagcgccaccagccaactcagcacgagggccttggaaggtattttcgaggccacccaccgcctgatctacggcgcgaaggatgacagcggtcaacgctacctcgcatggtccgggcactccgcccgcgttggagctgctagggacatggcccgcgccggtgtttccatccccgaaatcatgcaggcgggtggatggacgaacgtgaacattgtcatgaactacattcgcaaccttgacagcgagacgggcgcaatggttcgcctcctggaagatggtgactgaggtacccaacctagacttgtccatcttctggattggccaacttaattaatgtatgaaataaaaggatgcacacatagtgacatgctaatcactataatgtgggcatcaaagttgtgtgttatgtgtaattactagttatctgaataaaagagaaagagatcatccatatttcttatcctaaatgaatgtcacgtgtctttataattctttgatgaaccagatgcatttcattaaccaaatccatatacatataaatattaatcatatataattaatatcaattgggttagcaaaacaaatctagtctaggtgtgttttgcgatccgatatcgacgtctaaaaacggcccctaactaacgcttagttgcccgctagattagtcccccgttagtgcctagttagacacacgacgaactaggggctagtgccaccttgctagttggatattacctcttctcttcaaagtatccttgaacgctcaccggttatcaaatctctacactatagctctgtagtcttgctagatagttagttctttagctctcgcacgataacttcgtatagcatacattatacgaagttattcgccgcctagaagcccgatctcccggttaaaaccaaaatccagtggcgagctctcgactttaacttagcctaggatccatgatgatgatgagcagcggccgggcgggcggcggggccaccgcggggcgatacccgttcacggcgtcgcagtggcaggagctggagcaccaggcgctcatctacaagtgcctggcgtccggcaagcccatcccttcctacctcatgccgccgctccgccgcatcctcgactccgccctcgccacgtcgccgtccctcgcctacccgccgcaaccctcactgggctggggctgcttcgggatgggcttcacccggaaggccgacgaggacccggagcccgggcggtgccggcgcacggacggcaagaagtggcgctgctccaaggaggcgtacccggactccaagtactgcgagaagcacatgcaccggggcaagaaccgttcaagaaagcctgtggaaatgtccttggccacgccggccccggcgccggcccccgccgccgccacaaccgccaccgccacctcatccccggcgccgtcctaccaccgcccggcccacgacgccacgccgtctccgtaccacgcgctgtatggaggcggcggcggcggcggcggtagcccttactcggcgtcggcacgcccaggagcaaccggaggcggcggcgcgtaccaccacgcgcagcatgtgagccccttccacctccacctcgagaccacccacccgcacccgccgccgccctacaactactccgccgaccagagggactacgcgtacgggcacgcggccgccaaggaggtcggcgagcacgccttcttctcggacggcgcgggcgagcgggtcgaccggcaggccgcggcggggcagtggcagttcaggcagctcggggtggagacgaagccgggccccacgccgctgttccccgtcgccgggtacgggcacggcgcggcgtcgccgtacggcgtggagatgggcaaggacgacgacgagcaggaggagaggcgccgccagcactgcttcgttcttggagccgacctgcggctggagcggccgtcgtcgggccatggccatggccatgaccatgacgacgccgccgccgcgcagaagccgctccggcccttcttcgacgagtggccgcaccagaagggggacaaggccgggtcgtggatggggctcgacggcgagacgcagctctccatgtccatccccatggccgccaccgacctccccgtcacctcccgcttccgtaacgacgagtgaggtaccgttaacagatctactaactatctatactgtaataatgttgtatagccgccggatagctagctagtttagtcattcagcggcgatgggtaataataaagtgtcatccatccatcaccatgcgtggcaacgtgagcaatgacctgattgaacaaattgaaatgaaaagaagaaatatgttatatgtcaacgagatttcctcataatgccactgacgacgtgtgtccaagaaatgtatcagtgatacgtatattcacaatttttttatgacttatactcacaatttgtttttttactacttatactcacaatttgttgtgcgtaccataacaatttcgatcgaatatatatcagaaagttgacgaaagtaagctcactcaaaaagttaaatgggctgcggaagctgcgtcaggcccaagttttggctattctatccggtatccacgattttgatggctgagggacatatgttcgcttcgaattcctgcccttaaggccaattgttcaagattcattcaacaattgaaacatctcccatgattaaatcagtataaggttgctatggtcttgcttgacaaagtttttttttgagggaatttcaactaaatttttgagtgaaactatcaaatactgattttaaaaaatttttataaaaggaagcgcagagataaaaggccatctatgctacaaaagtacccaaaaatgtaatcctaaagtatgaattgcattttttttttgtttggacgaaaggaaaggagtattaccacaagaatgatatcatcttcatatttagatcttttttgggtaaagcttgagattctctaaatatagagaaatcagaagaaaaaaaaaccgtgttttggtggttttgatttctagcctccacaataactttgacggcgtcgacaagtctaacggacaccaagcagcgaaccaccagcgccgagccaagcgaagcagacggccgagacgttgacaccttcggcgcggcatctctcgagagttccgctccggcgctccacctccaccgctggcggtttcttattccgttccgttccgcctcctgctctgctcctctccacaccacacggcacgaaaccgttacggcaccggcagcacccagcacgggagaggggattcctttcccaccgttccttccctttccgccccgccgctataaatagccagccccatccccagcttttttccccaatctcatctcctctctcctgttgttcggagcacacgcacaatccgatcgatccccaaatccccttcgtctctcctcgcgagcctcgtggatcccagcttcaaggtacggcgatcgatcatcccccctccttctctctaccttcttttctctagactacatcggatggcgatccatggttagggcctgctagtttcccttcctgttttgtcgatggctgcgaggcacaatagatctgatggcgttatgacggctaacttgtcatgttgttgcgatttatagtccctttaggagatcagtttaatttctcggatggttcgagatcggtggtccatggttagtaccctaagatccgcgctgttagggttcgtagatggaggcgacctgttctgattgttaacttgtcagtacctgggaaatcctgggatggttctagctcgtccgcagatgagatcgatttcatgatcctctgtatcttgtttcgttgcctaggttccgtctaatctatccgtggtatgatgtagatgttttgatcgtgctaactacgtcttgtaaagttaattgtcaggtcataatttttagcatgcctttttttttgtttggttttgtctaattgggctgtcgttctagatcagagtagaagactgttccaaactacctgctggatttattgaacttggatctgtatgtgtgtcacatatcttcataaattcatgattaagatggattgaaatatcttttatctttttggtatggatagttctatatgttggtgtggctttgttagatgtatacatgcttagatacatgaagcaacgtgctgctactgtttagtaattgctgttcatttgtctaataaacagataaggatatgtatttatgttgctgttggttttgctggtactttgttggatacaaatgcttcaatacagaaaacagcatgctgctacgatttaccatttatctaatcttatcatatgtctaatctaataaacaaacatgcttttaaattatcttcatatgcttggatgatggcatacacagcggctatgtgtggttttttaaatacccagcatcatgggcatgcatgacactgctttaatatgctttttatttgcttgagactgtttcttttgtttatactgaccctttagttcggtgactcttctgcaggtcgactttaacttagcctaggatccatggcccagtccaagcacggcctgaccaaggagatgaccatgaagtaccgcatggagggctgcgtggacggccacaagttcgtgatcaccggcgagggcatcggctaccccttcaagggcaagcaggccatcaacctgtgcgtggtggagggcggccccttgcccttcgccgaggacatcttgtccgccgccttcatgtacggcaaccgcgtgttcaccgagtacccccaggacatcgtcgactacttcaagaactcctgccccgccggctacacctgggaccgctccttcctgttcgaggacggcgccgtgtgcatctgcaacgccgacatcaccgtgagcgtggaggagaactgcatgtaccacgagtccaagttctacggcgtgaacttccccgccgacggccccgtgatgaagaagatgaccgacaactgggagccctcctgcgagaagatcatccccgtgcccaagcagggcatcttgaagggcgacgtgagcatgtacctgctgctgaaggacggtggccgcttgcgctgccagttcgacaccgtgtacaaggccaagtccgtgccccgcaagatgcccgactggcacttcatccagcacaagctgacccgcgaggaccgcagcgacgccaagaaccagaagtggcacctgaccgagcacgccatcgcctccggctccgccttgccctccggactcagatctcgatagggtaccaatggccagttaacagatccagctgctgctgttctagggttcacaagtctgcctatttgtcttccccaatggagctatggttgtctggtctggtccttggtcgtgtcccgtttcattgtgtactatttacctgtaatgtgtatccttaagtctggtttgatggtgtctgaaacgttttgctgtggtagagcagcatggaagaactataatgaataagtgatccctaatcattgtgtccaaattttgcttctgctatacccttttgtgctgtttcttatgttttgcttaaaaatttgatctgacaaacaaatttgtctaaattatgctcttgttctgactgtgtactgtacacatttgtattgctaccggtttggcacatagttttctctttgattgcagatcaaacccttctgattgcagattgcttggctatggctgatgtgctcactgttcttctttagcttgtatattgctgatggtggcttggctacggctgaaaaagttgctgctgcgccgacttggcaactgttgctccagtaatgctttgtcctctcttcctagccgccgacttggcacttggcagctgttgctcctgtaatgcgttgttatctcttatctcttgagatgtactatgattttgaggctgtttgacttgtgccagattgccagtgctgatgctatattatctcaggtttttatgctagtatatgttttactgtgtgctgcctgtgtcgagttacgtaatctattgaaccgctatgcgtgttgatgccctgttgttgcttgccagattgatgcccctgttgcttgcagcttgcaagctgtagtgaaatcctaaaattcgaaaccaaatctattctgaacttttgaagatctgtgatgtccggaagaaaagattcaaacagataaacgggactctccagaatctataaaataaatgatcgacaaacgctttgctttggtaggcttcctagttagttagcggaccgaagcttcggtgaattcaggtgactcttagcgatccgacggcgtcttcaccgccccgccgccgcccgagccggacttgtcgctgccgccgccgctgctcatcttgcgcgcttgtgtccctccctcagtccctgcgttcgcggatcgcgggcgggtgcgacccgtttggactccggccggtagccttcgtgccgacctcgctcggtccaccggtttgtcggggacccacatgtcagtgaaggtacgcgtccacgtccacagaccctactaccccagacgagtccaaatcgctgttccctcacactctcgtgtaccagcgcgcggcggaaagcacctttccaacaaccgccgacacgtcggtcccacgtcggcatgctccaccggtcagtgtttggcgtgtacggctcccggcgacgaacgagtgtggcctaagctttcctactcccatcccatctgagccacacatctctctcacgccacgcgcacaaaacagccaggctcccacgcgcatcaaccggctctccctttccgtgccactcgcccccaagccccaaaccctcgccgccgcctccgagacagccgccgccacctaggccatggccaccgccgccgccgcgtctaccgcgctcactggcgccactaccgctgcgcccaaggcgaggcgccgggcgcacctcctggccacccgccgcgccctcgccgcgcccatcaggtgctcagcggcgtcacccgccatgccgatggctcccccggccaccccgctccggccgtggggccccaccgagccccgcaagggtgctgacatcctcgtcgagtccctcgagcgctgcggcgtccgcgacgtcttcgcctaccccggcggcgcgtcgatggagatccaccaggcactcacccgctcccccgtcatcgccaaccacctcttccgccacgagcaaggggaggcctttgccgcctccggctacgcgcgctcctcgggccgcgtcggcgtctgcatcgccacctccggccccggcgccaccaacctagtctccgcgctcgccgacgcgctgctcgattccgtcccgatggtcgccatcacgggacaggtggcgcgacgcatgattggcaccgacgccttccaggagacgcccatcgtcgaggtcacgcgctccatcaccaagcacaactacctggtcctcgacgtcgacgacatcccccgcgtcgtgcaggaggctttcttcctcgcctcctctggtcgaccagggccggtgcttgtcgacatccccaaggacatccagcagcagatggcggtgcctgtctgggacaagcccatgagtctgcctgggtacattgcgcgccttcccaagccccctgcgactgagttgcttgagcaggtgctgcgtcttgttggtgaatcgcggcgccctgttctttatgtgggcggtggctgcgcagcatctggtgaggagttgcgacgctttgtggagctgactggaatcccggtcacaactactcttatgggcctcggcaacttccccagcgacgacccactgtctctgcgcatgctaggtatgcatgggacggtgtatgcaaattatgcagtggataaggccgatctgttgcttgcacttggtgtgcggtttgatgatcgcgtgacagggaagattgaggcttttgcaagcagggctaagattgtgcacgttgatattgatccggctgagattggcaagaacaagcagccacatgtgtccatctgtgcagatgttaagcttgctttgcagggcatgaatgctcttcttgaaggaagcacatcaaagaagagctttgactttggctcatggaacgatgagttggatcagcagaagagggaattcccccttgggtataaaacatctaatgaggagatccagccacaatatgctattcaggttcttgatgagctgacgaaaggcgaggccatcatcggcacaggtgttgggcagcaccagatgtgggcggcacagtactacacttacaagcggccaaggcagtggttgtcttcagctggtcttggggctatgggatttggtttgccggctgctgctggtgcttctgtggcaaacccaggtgtcactgttgttgacatcgatggagatggtagctttctcatgaacgttcaggagctagctatgatccgaattgagaacctcccagtgaaggtctttgtgctaaacaaccagcacctggggatggtggtgcagttggaggacaggttctataaggccaacagagcgcacacatacttgggaaacccagagaatgaaagtgagatatatccagatttcgtgacgatcgccaaagggttcaacattccagccgtccgtgtgacaaagaagaacgaagtccgcgcagcgataaagaagatgctcgagactccagggccgtacctcttggatataatcgtcccacaccaggagcatgtgttgcctatgatccctagtggtggggctttcaaggatatgatcctggatggtgatggcaggactgtgtactgacttcgaataggtacccggggatcctctagtgccgtgggtcgtttaagctgccgctgtacctgtgtcgtctggtgccttctggtgtacctgggaggttgtcgtctatcaagtatctgtggttggtgtcatgagtcagtgagtcccaatactgttcgtgtcctgtgtgcattatacccaaaactgttatgggcaaatcatgaataagcttgatgttcgaacttaaaagtctctgctcaatatggtattatggttgtttttgttcgtctcctaatatttgcctgggatcaaattttattggctggtgttcatttgacctccatgttcttgctaggctccattttttactctacagccataatatgtttgattgtttggtttgttctttgttgtacacctggttctgtcgagcttagttttcgacactggcttacagcttaacatgttgctattttattgggttctgattgctattttattgggttctgattgctagtttttgctgaatccaaaaaccatgttatttatttaagcgatccaggttattattatgatggtggctaagtttttttttttccaagggtaaattttctggattctccagtgtttctgtggcctgtttctgtggccgaattcaatcactagagtcgacctgcatgattccgatgacttcgtaggttcctagctcaagccgctcgtgtccaagcgtcacttacgattagctaatgattacggcatctaggaccgactagctagctagctaagagctcggtaccgagctcgaattcattccgattaatcgtggcctcttgctcttcaggatgaagagctatgtttaaacgtgcaagcgctactagacaattcagtacattaaaaacgtccgcaatgtgttattaagttgtctaagcgtcaatttgtttacaccacaatatatcctgcca

SEQ ID NO: 89 - DNA, 20318 bp, synthetic construct
  misc_feature 1..20318: note = PHP98393
  source 1..20318: mol_type = other DNA
gtttacccgccaatatatcctgtcaaacactgcggccgcacttgaccgcggatggagccggagctgtggtgaggccatcgacgggaggtgggggagaacacagtctcagtgttctttgtgagtccgcaaggtttttagcttttctgtattaattaaggttgctgttggctgtagaatacggtcgtggaagagctgtatcggtagctactacgtaagctattatatactggaagtctggagctcgtcgatctccggtcgtcttcctccatttctcctcgtcttgctttgactgctgctaccatttgcttctgttttctgatgaagcatgccatgtcggccaccagtgtttgtgtggtttttgcagggaatggctttcaagtgctgtgattgaatggccctcgtcgtcctcggctgagctcacatggacgcgtcatgtgagtgagatatatgatcatatgatgagtggggttcgggtgagtgcgtacttgaagtaggatcccgctttcactcattcattcattggcctttaaaccgggaaattttcgcgaggagatggagggaagcaagcagggtgacgagtgcagagtgccgcgagcgctttgtcaaaaggcaccgccgtaggcaaaaaaatcaatggccctgactgactcgatggtagtactactgtagagactagagagggttgctccccatatcttcgtgtgacttttactccagcattgcatttccgtcattgagacgttaattaatagcagctttcgggacagatgactgtggccatgtttcgtcacggccgcttcgtgccagctgggggtactatagtactgtgattttgttagtaaaaactttcattaggccaccattgacgaccgggccttcgcttttgctgcgctaattaaccatttcccggcgaccgaagggaacatgaacatgccccgacacatgagggcatgaggactagtgttctccctgtcgttcgttgacttgactagtgatagtttaaacgctcttcaactggaagagcggttactaccggttcactagctagctgctaatcgagctagttaccctatgaggtgacatgaagcgctcacggttactatgacggttagcttcacgactgttggtggcagtagcgtacgacttagctatagttccggacttacctagcatcgagcagctggcttgtggggaccagacaaaaaaggaatggtgcagaattgttaggcgcacctaccaaaagcatctttgcctttattgcaaagataaagcagattcctctagtacaagtggggaacaaaataacgtggaaaagagctgtcctgacagcccactcactaatgcgtatgacgaacgcagtgacgaccacaaaactcgagcaacgagatcatgagccaatcaaagaggagtgatgtagacctaaagcaataatggagccatgacgtaagggcttacgcccatacgaaataattaaaggctgatgtgacctgtcggtctctcagaacctttactttttatgtttggcgtgtatttttaaatttccacggcaatgacgatgtgaccgtcgacccactaaaacattgctttgtcaaaagctaaaaaagatgatgcccgacagccacttgtgtgaagcatgagaagccggtccctccactaagaaaattagtgaagcatcttccagtggtccctccactcacagctcaatcagtgagcaacaggacgaaggaaatgacgtaagccatgacgtctaatcccagggccagcttgcatgcctgcagtgcagcgtgacccggtcgtgcccctctctagagataatgagcattgcatgtctaagttataaaaaattaccacatattttttttgtcacacttgtttgaagtgcagtttatctatctttatacatatatttaaactttactctacgaataatataatctatagtactacaataatatcagtgttttagagaatcatataaatgaacagttagacatggtctaaaggacaattgagtattttgacaacaggactctacagttttatctttttagtgtgcatgtgttctcctttttttttgcaaatagcttcacctatataatacttcatccattttattagtacatccatttagggtttagggttaatggtttttatagactaatttttttagtacatctattttattctattttagcctctaaattaagaaaactaaaactctattttagtttttttatttaataatttagatataaaatagaataaaataaagtgactaaaaattaaacaaataccctttaagaaattaaaaaaactaaggaaacatttttcttgtttcgagtagataatgccagcctgttaaacgccgtcgacgagtctaacggacaccaaccagcgaaccagcagcgtcgcgtcgggccaagcgaagcagacggcacggcatctctgtcgctgcctctggacccctctcgagagttccgctccaccgttggacttgctccgctgtcggcatccagaaattgcgtggcggagcggcagacgtgagccggcacggcaggcggcctcctcctcctctcacggcaccggcagctacgggggattcctttcccaccgctccttcgctttcccttcctcgcccgccgtaataaatagacaccccctccacaccctctttccccaacctcgtgttgttcggagcgcacacacacacaaccagatctcccccaaatccacccgtcggcacctccgcttcaaggtacgccgctcgtcctcccccccccccctctctaccttctctagatcggcgttccggtccatgcatggttagggcccggtagttctacttctgttcatgtttgtgttagatccgtgtttgtgttagatccgtgctgctagcgttcgtacacggatgcgacctgtacgtcagacacgttctgattgctaacttgccagtgtttctctttggggaatcctgggatggctctagccgttccgcagacgggatcgatttcatgattttttttgtttcgttgcatagggtttggtttgcccttttcctttatttcaatatatgccgtgcacttgtttgtcgggtcatcttttcatgcttttttttgtcttggttgtgatgatgtggtctggttgggcggtcgttctagatcggagtagaattctgtttcaaactacctggtggatttattaattttggatctgtatgtgtgtgccatacatattcatagttacgaattgaagatgatggatggaaatatcgatctaggataggtatacatgttgatgcgggttttactgatgcatatacagagatgctttttgttcgcttggttgtgatgatgtggtgtggttgggcggtcgttcattcgttctagatcggagtagaatactgtttcaaactacctggtgtatttattaattttggaactgtatgtgtgtgtcatacatcttcatagttacgagtttaagatggatggaaatatcgatctaggataggtatacatgttgatgtgggttttactgatgcatatacatgatggcatatgcagcatctattcatatgctctaaccttgagtacctatctattataataaacaagtatgttttataattattttgatcttgatatacttggatgatggcatatgcagcagctatatgtggatttttttagccctgccttcatacgctatttatttgcttggtactgtttcttttgtcgatgctcaccctgttgtttggtgttacttctgcaggtcgactctagaggatcaattcgctagcataacttcgtatagcatacattatacgaagttatccagatccaccatggccactgtgaacaactggctcgctttctccctctccccgcaggagctgccgccctcccagacgacggactccacactcatctcggccgccaccgccgaccatgtctccggcgatgtctgcttcaacatcccccaagattggagcatgaggggatcagagctttcggcgctcgtcgcggagccgaagctggaggacttcctcggcggcatctccttctccgagcagcatcacaaggccaactgcaacatgatacccagcactagcagcacagtttgctacgcgagctcaggtgctagcaccggctaccatcaccagctgtaccaccagcccaccagctcagcgctccacttcgcggactccgtaatggtggcttcctcggccggtgtccacgacggcggtgccatgctcagcgcggccgccgctaacggtgtcgctggcgctgccagtgccaacggcggcggcatcgggctgtccatgattaagaactggctgcggagccaaccggcgcccatgcagccgagggtggcggcggctgagggcgcgcaggggctctctttgtccatgaacatggcggggacgacccaaggcgctgctggcatgccacttctcgctggagagcgcgcacgggcgcccgagagtgtatcgacgtcagcacagggtggagccgtcgtcgtcacggcgccgaaggaggatagcggtggcagcggtgttgccggcgctctagtagccgtgagcacggacacgggtggcagcggcggcgcgtcggctgacaacacggcaaggaagacggtggacacgttcgggcagcgcacgtcgatttaccgtggcgtgacaaggcatagatggactgggagatatgaggcacatctttgggataacagttgcagaagggaagggcaaactcgtaagggtcgtcaagtctatttaggtggctatgataaagaggagaaagctgctagggcttatgatcttgctgctctgaagtactggggtgccacaacaacaacaaattttccagtgagtaactacgaaaaggagctcgaggacatgaagcacatgacaaggcaggagtttgtagcgtctctgagaaggaagagcagtggtttctccagaggtgcatccatttacaggggagtgactaggcatcaccaacatggaagatggcaagcacggattggacgagttgcagggaacaaggatctttacttgggcaccttcagcacccaggaggaggcagcggaggcgtacgacatcgcggcgatcaagttccgcggcctcaacgccgtcaccaacttcgacatgagccgctacgacgtgaagagcatcctggacagcagcgccctccccatcggcagcgccgccaagcgcctcaaggaggccgaggccgcagcgtccgcgcagcaccaccacgccggcgtggtgagctacgacgtcggccgcatcgcctcgcagctcggcgacggcggagccctggcggcggcgtacggcgcgcactaccacggcgccgcctggccgaccatcgcgttccagccgggcgccgccagcacaggcctgtaccacccgtacgcgcagcagccaatgcgcggcggcgggtggtgcaagcaggagcaggaccacgcggtgatcgcggccgcgcacagcctgcaggacctccaccacctgaacctgggcgcggccggcgcgcacgactttttctcggcagggcagcaggccgccgccgctgcgatgcacggcctgggtagcatcgacagtgcgtcgctcgagcacagcaccggctccaactccgtcgtctacaacggcggggtcggcgacagcaacggcgccagcgccgtcggcggcagtggcggtggctacatgatgccgatgagcgctgccggagcaaccactacatcggcaatggtgagccacgagcaggtgcatgcacgggcctacgacgaagccaagcaggctgctcagatggggtacgagagctacctggtgaacgcggagaacaatggtggcggaaggatgtctgcatgggggactgtcgtgtctgcagccgcggcggcagcagcaagcagcaacgacaacatggccgccgacgtcgggcatggcggcgcgcagctcttcagtgtctggaacgacactggctccggcgagggtcgcggttccctcctgacctgcggcgacgtggaggaaaaccccggtccgatggcggccaatgcgggcggcggtggagcgggaggaggcagcggcagcggcagcgtggctgcgccggcggtgtgccgccccagcggctcgcggtggacgccgacgccggagcagatcaggatgctgaaggagctctactacggctgcggcatccggtcgcccagctcggagcagatccagcgcatcaccgccatgctgcggcagcacggcaagatcgagggcaagaacgtcttctactggttccagaaccacaaggcccgcgagcgccagaagcgccgcctcaccagcctcgacgtcaacgtgcccgccgccggcgcggccgacgccaccaccagccaactcggcgtcctctcgctgtcgtcgccgccgccttcaggcgcggcgcctccctcgcccaccctcggcttctacgccgccggcaatggcggcggatcggctgtgctgctggacacgagttccgactggggcagcagcggcgctgctatggccaccgagacatgcttcctgcaggactacatgggcgtgacggacacgggcagctcgtcgcagtggccacgcttctcgtcgtcggacacgataatggcggcggccgcggcgcgggcggcgacgacgcgggcgcccgagacgctccctctcttcccgacctgcggcgacgacggcggcagcggtagcagcagctacttgccgttctggggtgccgcgtccacaactgccggcgccacttcttccgttgcgatccaacagcaacaccagctgcaggagcagtacagcttttacagcaacagcaacagcacccagctggccggcaccggcaaccaagacgtatcggcaacagcagcagcagccgccgccctggagctgagcctcagctcatggtgctccccttaccctgctgcagggagtatgtgagaggtaccgacaaagcagcattagtccgttgatcggtggaagaccactcgtcagtgttgagttgaatgtttgatcaataaaatacggcaatgctgtaagggttgttttttatgccattgataatacactgtactgttcagttgttgaactctatttcttagccatgccaagtgcttttcttattttgaataacattacagcaaaaagttgaaagacaaaaaaaaaaacccccgaacagagtgctttgggtcccaagcttctttagactgtgttcggcgttccccctaaatttctccccctatatctcactcacttgtcacatcagcgttctctttccccctatatctccacgctctacagcagttccacctatatcaaacctctataccccaccacaacaatattatatactttcatcttcaactaactcatgtaccttccaatttttttctactaataattatttacgtgcacagaaacttagcaaggagagagagagcgggaatttaaatgctcggcgttaggcttttagtccgctaggtggctagaccgaggttaggacgctagttcactaggggcctagtggtgttttaagagtcaccaccttgctagttggatattacctcttctcttcaaagtatccttgaacgctcaccggttatcaaatctctacactatagctctgtagtcttgctagatagttagttctttagctctctctagaggttcacaaactcaatacaacacacagtggagtagggtattacgctccggcggcccgaaccactctaaatccttgtgtcctcgtgtgctcttccaccattaatgactgtaattgcagggacacgaagagttgtagcgcttttgccaacaagatccgctatatgctagtagagtggaacctgcacagcaacaagcatccaataatctgagaataagaattatgtgtggtgatggttctcatctctgcaactcgccattttcgcgagagaaccaaatccaagttggtgaagatcatgatttgggctcatgggctggcatagtagctattacctttgcaattgtggttcgaatctatccgatattctccttttcagggagagctaatgcttatgcttattgggtattttggtttgacactgcttcacgcccaaaaaaaggcaactatgtctgagttggatatggcccaaaaaaaggcagctatgtctgagttggatatggaagtcttctttcgtttagggtgaagtaagaccaagctcatgagcttattatcttaggtcggaacaaattagttgataggcatggcacatttatcaaattataatgattttaacagaaaagcaacacctctttttcagcagcaccagctttgcaagctgcaattgacactccaagcatagtatttgctccaaactcagcctgcatttcgcacaatatcatatctatttccatttggataaaatatattttccagaaatatgggaacagaatcaagatacagaaaaaagttgtggtagtagtggtaagtggaaacacaagtacagtgaaaagatagcattatttctgaacagtcaaattaaccgaaataagtagtatcacatactgcccctaaattgactacacccaatgtaaagaattgcttgagcatattgagccatcagttgtttgtttgtgtaacggatttgacaatgcagagttcaggagcaaaaaaccgcaaaggagagaaagagggaaaggatctcctagtatcccaccttgtggcgcgccctgtcaagtgcatgatggcctggtcgatctgcgtctgctgctgcggttccatcccaacgagtgcctccgacaccttgtcgttgatcacccgcaccgcgtaggcgacccccctggcgaggaacttccgcctctcggaggccccggccgcgtcggcggcggcgccctcgagcgcgcccacgctagccgtagatgctcggtgcacggccttgttggtgtgcaactcgacctcaacggccggtgcgctacgcccgtcaaggatctggcgcgcccgcaccctcgtgatcacggtgggcgcctcccgcctcatgtggccgacgatgaaaagcgccgggttaggggccttggcgcgcaccgccgtattcagggcctcctcgctcttgcgcgagagcaggtgcttccccaggtactcctgcactgacaaggctgccacagcggtggaatttgtcctcacgacttcgccacgtcgtcctcacctccctggcttcccacgactccgccgtatcgaggtgctcggtgggtcgtcttaatccgaagtccgaactaggaagacgagacagagaggtctgaggaatgggcctcgtttgatgttgagctgaattatttttccagcataagcccaggtcttggtccatgaacaaaattactagaaacccagcccagtactacgatctaaaagagggactgccactggatagctctctctagcattctccacgctccaatacagcggcgtcgtgtctatccgggtctatccgcgaacacgtgagaactctccagaaactgctttctcctccacttcatctctctcgctttccctctataaaaagaccccttctaggaattgagggagacagcaagcaccaagcagcgatccgaagctcaatcaattcactcaaacctcttccccaaatcttcgattagatcttcgttgacaagaagactagaaccgaacctgacatgtccaacctgctcacggttcaccagaaccttccggctcttccagtggacgcgacgtccgatgaagtcaggaagaacctcatggacatgttccgcgacaggcaagcgttcagcgagcacacctggaagatgctgctctccgtctgccgctcctgggctgcatggtgcaagctgaacaacaggaagtggttccccgctgagcccgaggacgtgagggattaccttctgtacctgcaagcgcgaggtttgtttctgcttctacctttgatatatatataataattatcattaattagtagtaatataatatttcaaatatttttttcaaaataaaagaatgtagtatatagcaattgcttttctgtagtttataagtgtgtatattttaatttataacttttctaatatatgaccaaaacatggtgatgcctaggtctggcagtgaagaccatccagcaacaccttggacaactgaacatgcttcacaggcgctccggcctcccgcgccccagcgactcgaacgccgtgagcctcgtcatgcgccgcatcaggaaggaaaacgtcgatgccggcgaaagggcaaagcaggccctcgcgttcgagaggaccgatttcgaccaggtccgcagcctgatggagaacagcgacaggtgccaggacattaggaacctggcgttcctcggaattgcatacaacacgctcctcaggatcgcggaaattgcccgcattcgcgtgaaggacattagccgcaccgacggcggcaggatgcttatccacattggcaggaccaagacgctcgtttccaccgcaggcgtcgaaaaggccctcagcctcggagtgaccaagctcgtcgaacgctggatctccgtgtccggcgtcgcggacgacccaaacaactacctcttctgccgcgtccgcaagaacggggtggctgcccctagcgccaccagccaactcagcacgagggccttggaaggtattttcgaggccacccaccgcctgatctacggcgcgaaggatgacagcggtcaacgctacctcgcatggtccgggcactccgcccgcgttggagctgctagggacatggcccgcgccggtgtttccatccccgaaatcatgcaggcgggtggatggacgaacgtgaacattgtcatgaactacattcgcaaccttgacagcgagacgggcgcaatggttcgcctcctggaagatggtgactgaggtacccaacctagacttgtccatcttctggattggccaacttaattaatgtatgaaataaaaggatgcacacatagtgacatgctaatcactataatgtgggcatcaaagttgtgtgttatgtgtaattactagttatctgaataaaagagaaagagatcatccatatttcttatcctaaatgaatgtcacgtgtctttataattctttgatgaaccagatgcatttcattaaccaaatccatatacatataaatattaatcatatataattaatatcaattgggttagcaaaacaaatctagtctaggtgtgttttgcgatccgatatcgacgtctaaaaacggcccctaactaacgcttagttgcccgctagattagtcccccgttagtgcctagttagacacacgacgaactaggggctagtgccaccttgctagttggatattacctcttctcttcaaagtatccttgaacgctcaccggttatcaaatctctacactatagctctgtagtcttgctagatagttagttctttagctctcgcacgataacttcgtatagcatacattatacgaagttattcgccgcctagaagcccgatctcccggttaaaaccaaaatccagtggcgagctctcgactttaacttagcctaggatccatgatgatgatgagcagcggccgggcgggcggcggggccaccgcggggcgatacccgttcacggcgtcgcagtggcaggagctggagcaccaggcgctcatctacaagtgcctggcgtccggcaagcccatcccttcctacctcatgccgccgctccgccgcatcctcgactccgccctcgccacgtcgccgtccctcgcctacccgccgcaaccctcactgggctggggctgcttcgggatgggcttcacccggaaggccgacgaggacccggagcccgggcggtgccggcgcacggacggcaagaagtggcgctgctccaaggaggcgtacccggactccaagtactgcgagaagcacatgcaccggggcaagaaccgttcaagaaagcctgtggaaatgtccttggccacgccggccccggcgccggcccccgccgccgccacaaccgccaccgccacctcatccccggcgccgtcctaccaccgcccggcccacgacgccacgccgtctccgtaccacgcgctgtatggaggcggcggcggcggcggcggtagcccttactcggcgtcggcacgcccaggagcaaccggaggcggcggcgcgtaccaccacgcgcagcatgtgagccccttccacctccacctcgagaccacccacccgcacccgccgccgccctacaactactccgccgaccagagggactacgcgtacgggcacgcggccgccaaggaggtcggcgagcacgccttcttctcggacggcgcgggcgagcgggtcgaccggcaggccgcggcggggcagtggcagttcaggcagctcggggtggagacgaagccgggccccacgccgctgttccccgtcgccgggtacgggcacggcgcggcgtcgccgtacggcgtggagatgggcaaggacgacgacgagcaggaggagaggcgccgccagcactgcttcgttcttggagccgacctgcggctggagcggccgtcgtcgggccatggccatggccatgaccatgacgacgccgccgccgcgcagaagccgctccggcccttcttcgacgagtggccgcaccagaagggggacaaggccgggtcgtggatggggctcgacggcgagacgcagctctccatgtccatccccatggccgccaccgacctccccgtcacctcccgcttccgtaacgacgagtgaggtaccgttaacagatctactaactatctatactgtaataatgttgtatagccgccggatagctagctagtttagtcattcagcggcgatgggtaataataaagtgtcatccatccatcaccatgcgtggcaacgtgagcaatgacctgattgaacaaattgaaatgaaaagaagaaatatgttatatgtcaacgagatttcctcataatgccactgacgacgtgtgtccaagaaatgtatcagtgatacgtatattcacaatttttttatgacttatactcacaatttgtttttttactacttatactcacaatttgttgtgcgtaccataacaatttcgatcgaatatatatcagaaagttgacgaaagtaagctcactcaaaaagttaaatgggctgcggaagctgcgtcaggcccaagttttggctattctatccggtatccacgattttgatggctgagggacatatgttcgcttcgaattcctgcccttaaggccaattgttcaagattcattcaacaattgaaacatctcccatgattaaatcagtataaggttgctatggtcttgcttgacaaagtttttttttgagggaatttcaactaaatttttgagtgaaactatcaaatactgattttaaaaaatttttataaaaggaagcgcagagataaaaggccatctatgctacaaaagtacccaaaaatgtaatcctaaagtatgaattgcattttttttttgtttggacgaaaggaaaggagtattaccacaagaatgatatcatcttcatatttagatcttttttgggtaaagcttgagattctctaaatatagagaaatcagaagaaaaaaaaaccgtgttttggtggttttgatttctagcctccacaataactttgacggcgtcgacaagtctaacggacaccaagcagcgaaccaccagcgccgagccaagcgaagcagacggccgagacgttgacaccttcggcgcggcatctctcgagagttccgctccggcgctccacctccaccgctggcggtttcttattccgttccgttccgcctcctgctctgctcctctccacaccacacggcacgaaaccgttacggcaccggcagcacccagcacgggagaggggattcctttcccaccgttccttccctttccgccccgccgctataaatagccagccccatccccagcttttttccccaatctcatctcctctctcctgttgttcggagcacacgcacaatccgatcgatccccaaatccccttcgtctctcctcgcgagcctcgtggatcccagcttcaaggtacggcgatcgatcatcccccctccttctctctaccttcttttctctagactacatcggatggcgatccatggttagggcctgctagtttcccttcctgttttgtcgatggctgcgaggcacaatagatctgatggcgttatgacggctaacttgtcatgttgttgcgatttatagtccctttaggagatcagtttaatttctcggatggttcgagatcggtggtccatggttagtaccctaagatccgcgctgttagggttcgtagatggaggcgacctgttctgattgttaacttgtcagtacctgggaaatcctgggatggttctagctcgtccgcagatgagatcgatttcatgatcctctgtatcttgtttcgttgcctaggttccgtctaatctatccgtggtatgatgtagatgttttgatcgtgctaactacgtcttgtaaagttaattgtcaggtcataatttttagcatgcctttttttttgtttggttttgtctaattgggctgtcgttctagatcagagtagaagactgttccaaactacctgctggatttattgaacttggatctgtatgtgtgtcacatatcttcataaattcatgattaagatggattgaaatatcttttatctttttggtatggatagttctatatgttggtgtggctttgttagatgtatacatgcttagatacatgaagcaacgtgctgctactgtttagtaattgctgttcatttgtctaataaacagataaggatatgtatttatgttgctgttggttttgctggtactttgttggatacaaatgcttcaatacagaaaacagcatgctgctacgatttaccatttatctaatcttatcatatgtctaatctaataaacaaacatgcttttaaattatcttcatatgcttggatgatggcatacacagcggctatgtgtggttttttaaatacccagcatcatgggcatgcatgacactgctttaatatgctttttatttgcttgagactgtttcttttgtttatactgaccctttagttcggtgactcttctgcaggtcgactttaacttagcctaggatccatggcccagtccaagcacggcctgaccaaggagatgaccatgaagtaccgcatggagggctgcgtggacggccacaagttcgtgatcaccggcgagggcatcggctaccccttcaagggcaagcaggccatcaacctgtgcgtggtggagggcggccccttgcccttcgccgaggacatcttgtccgccgccttcatgtacggcaaccgcgtgttcaccgagtacccccaggacatcgtcgactacttcaagaactcctgccccgccggctacacctgggaccgctccttcctgttcgaggacggcgccgtgtgcatctgcaacgccgacatcaccgtgagcgtggaggagaactgcatgtaccacgagtccaagttctacggcgtgaacttccccgccgacggccccgtgatgaagaagatgaccgacaactgggagccctcctgcgagaagatcatccccgtgcccaagcagggcatcttgaagggcgacgtgagcatgtacctgctgctgaaggacggtggccgcttgcgctgccagttcgacaccgtgtacaaggccaagtccgtgccccgcaagatgcccgactggcacttcatccagcacaagctgacccgcgaggaccgcagcgacgccaagaaccagaagtggcacctgaccgagcacgccatcgcctccggctccgccttgccctccggactcagatctcgatagggtaccaatggccagttaacagatccagctgctgctgttctagggttcacaagtctgcctatttgtcttccccaatggagctatggttgtctggtctggtccttggtcgtgtcccgtttcattgtgtactatttacctgtaatgtgtatccttaagtctggtttgatggtgtctgaaacgttttgctgtggtagagcagcatggaagaactataatgaataagtgatccctaatcattgtgtccaaattttgcttctgctatacccttttgtgctgtttcttatgttttgcttaaaaatttgatctgacaaacaaatttgtctaaattatgctcttgttctgactgtgtactgtacacatttgtattgctaccggtttggcacatagttttctctttgattgcagatcaaacccttctgattgcagattgcttggctatggctgatgtgctcactgttcttctttagcttgtatattgctgatggtggcttggctacggctgaaaaagttgctgctgcgccgacttggcaactgttgctccagtaatgctttgtcctctcttcctagccgccgacttggcacttggcagctgttgctcctgtaatgcgttgttatctcttatctcttgagatgtactatgattttgaggctgtttgacttgtgccagattgccagtgctgatgctatattatctcaggtttttatgctagtatatgttttactgtgtgctgcctgtgtcgagttacgtaatctattgaaccgctatgcgtgttgatgccctgttgttgcttgccagattgatgcccctgttgcttgcagcttgcaagctgtagtgaaatcctaaaattcgaaaccaaatctattctgaacttttgaagatctgtgatgtccggaagaaaagattcaaacagataaacgggactctccagaatctataaaataaatgatcgacaaacgctttgctttggtaggcttcctagttagttagcggaccgaagcttcggtgaattcaggtgactcttagcgatccgacggcgtcttcaccgccccgccgccgcccgagccggacttgtcgctgccgccgccgctgctcatcttgcgcgcttgtgtccctccctcagtccctgcgttcgcggatcgcgggcgggtgcgacccgtttggactccggccggtagccttcgtgccgacctcgctcggtccaccggtttgtcggggacccacatgtcagtgaaggtacgcgtccacgtccacagaccctactaccccagacgagtccaaatcgctgttccctcacactctcgtgtaccagcgcgcggcggaaagcacctttccaacaaccgccgacacgtcggtcccacgtcggcatgctccaccggtcagtgtttggcgtgtacggctcccggcgacgaacgagtgtggcctaagctttcctactcccatcccatctgagccacacatctctctcacgccacgcgcacaaaacagccaggctcccacgcgcatcaaccggctctccctttccgtgccactcgcccccaagccccaaaccctcgccgccgcctccgagacagccgccgccacctaggccatggccaccgccgccgccgcgtctaccgcgctcactggcgccactaccgctgcgcccaaggcgaggcgccgggcgcacctcctggccacccgccgcgccctcgccgcgcccatcaggtgctcagcggcgtcacccgccatgccgatggctcccccggccaccccgctccggccgtggggccccaccgagccccgcaagggtgctgacatcctcgtcgagtccctcgagcgctgcggcgtccgcgacgtcttcgcctaccccggcggcgcgtcgatggagatccaccaggcactcacccgctcccccgtcatcgccaaccacctcttccgccacgagcaaggggaggcctttgccgcctccggctacgcgcgctcctcgggccgcgtcggcgtctgcatcgccacctccggccccggcgccaccaacctagtctccgcgctcgccgacgcgctgctcgattccgtcccgatggtcgccatcacgggacaggtggcgcgacgcatgattggcaccgacgccttccaggagacgcccatcgtcgaggtcacgcgctccatcaccaagcacaactacctggtcctcgacgtcgacgacatcccccgcgtcgtgcaggaggctttcttcctcgcctcctctggtcgaccagggccggtgcttgtcgacatccccaaggacatccagcagcagatggcggtgcctgtctgggacaagcccatgagtctgcctgggtacattgcgcgccttcccaagccccctgcgactgagttgcttgagcaggtgctgcgtcttgttggtgaatcgcggcgccctgttctttatgtgggcggtggctgcgcagcatctggtgaggagttgcgacgctttgtggagctgactggaatcccggtcacaactactcttatgggcctcggcaacttccccagcgacgacccactgtctctgcgcatgctaggtatgcatgggacggtgtatgcaaattatgcagtggataaggccgatctgttgcttgcacttggtgtgcggtttgatgatcgcgtgacagggaagattgaggcttttgcaagcagggctaagattgtgcacgttgatattgatccggctgagattggcaagaacaagcagccacatgtgtccatctgtgcagatgttaagcttgctttgcagggcatgaatgctcttcttgaaggaagcacatcaaagaagagctttgactttggctcatggaacgatgagttggatcagcagaagagggaattcccccttgggtataaaacatctaatgaggagatccagccacaatatgctattcaggttcttgatgagctgacgaaaggcgaggccatcatcggcacaggtgttgggcagcaccagatgtgggcggcacagtactacacttacaagcggccaaggcagtggttgtcttcagctggtcttggggctatgggatttggtttgccggctgctgctggtgcttctgtggcaaacccaggtgtcactgttgttgacatcgatggagatggtagctttctcatgaacgttcaggagctagctatgatccgaattgagaacctcccagtgaaggtctttgtgctaaacaaccagcacctggggatggtggtgcagttggaggacaggttctataaggccaacagagcgcacacatacttgggaaacccagagaatgaaagtgagatatatccagatttcgtgacgatcgccaaagggttcaacattccagccgtccgtgtgacaaagaagaacgaagtccgcgcagcgataaagaagatgctcgagactccagggccgtacctcttggatataatcgtcccacaccaggagcatgtgttgcctatgatccctagtggtggggctttcaaggatatgatcctggatggtgatggcaggactgtgtactgacttcgaataggtacccggggatcctctagtgccgtgggtcgtttaagctgccgctgtacctgtgtcgtctggtgccttctggtgtacctgggaggttgtcgtctatcaagtatctgtggttggtgtcatgagtcagtgagtcccaatactgttcgtgtcctgtgtgcattatacccaaaactgttatgggcaaatcatgaataagcttgatgttcgaacttaaaagtctctgctcaatatggtattatggttgtttttgttcgtctcctaatatttgcctgggatcaaattttattggctggtgttcatttgacctccatgttcttgctaggctccattttttactctacagccataatatgtttgattgtttggtttgttctttgttgtacacctggttctgtcgagcttagttttcgacactggcttacagcttaacatgttgctattttattgggttctgattgctattttattgggttctgattgctagtttttgctgaatccaaaaaccatgttatttatttaagcgatccaggttattattatgatggtggctaagtttttttttttccaagggtaaattttctggattctccagtgtttctgtggcctgtttctgtggccgaattcaatcactagagtcgacctgcatgattccgatgacttcgtaggttcctagctcaagccgctcgtgtccaagcgtcacttacgattagctaatgattacggcatctaggaccgactagctagctagctaagagctcggtaccgagctcgaattcattccgattaatcgtggcctcttgctcttcaggatgaagagctatgtttaaacgtgcaagcgctactagacaattcagtacattaaaaacgtccgcaatgtgttattaagttgtctaagcgtcaatttgtttacaccacaatatatcctgcca

SEQ ID NO: 90 - DNA, 19912 bp, synthetic construct
  misc_feature 1..19912: note = PHP98407
  source 1..19912: mol_type = other DNA
gtttacccgccaatatatcctgtcaaacactgatagtttaaactgaaggcgggaaacgacaatctgatcatgagcggagaattaagggagtcacgttatgacccccgccgatgacgcgggacaagccgttttacgtttggaactgacagaaccgcaacgttgaaggagccactcagcaagctggtacgattgtaatacgactcactatagggcgaattgagcgctgtttaaacgctcttcaactggaagagcggttacgctgtttaaacgctcttcaactggaagagcggttactaccggttcactagctagctgctaatcgagctagttaccctatgaggtgacatgaagcgctcacggttactatgacggttagcttcacgactgttggtggcagtagcgtacgacttagctatagttccggacttacccttaagcgatttaaatctgcggttaccgaattcgagctcggtacctagtacccttgtacttttggtttcacctgcatagagaaaacccacaagaatatgacagtctgatttgtcagtctcattctcaagcaacatttctctatccgttactttcatggtgaataacacaatccatcatcaatactttgtgttactcagaaactgaaagttattccgagtcttgcatatctttggacctactcgtttttctaccattattgctgattgttaagctctcgctacttgaatcggcattgttggagtgggaaggttcaaaaaattggagttatgactagttgtctctttctatgtacgatggagaaaatgaataaacaactgagaaaatggctcttgtttagttgatgatgctcttaagctttccactggttgccatatatgatttgggcatttcactttgatcttaatgggccttgtaaagcccaagactcatgattatctttagttgatgctcttaattaggtgtgggcaaataattcaaactgtatgtacccgaccaaaaccaaagcaaaaataatcgaaccaaaccgaaaatttaaaaataaccgaatgaaaactaaatcctataactgaaagaactgaaaccgaatcaaaatatttaatgtaaccaaaaatatccgaaatataattatattgtcaaaaatattaataatttctagattaaataattaaaaatacttaaaaatttatataaaatagtaaaaatactcgaaaataaccacaaatattcaaaaacaaccgaaatatcccaaaatattcaaagcaaaataaccgaatggataccaaattttaaaaccgaaaaaactggaacaaaaccaaaatcgaaccaaaatttcaaaaatcgaataaatactaaactttagaacaaaaaaaaacgataaccgaatgtatacgaaccaaagccgaattagataaccgaacgtccaggactactcttaatctttccgccacttatgatttgggctattactttgtttataatgagccttttcaagctcaagttcatgattgtccgtgagatgagaaactgacttgttggattcgaaaccctagctagtattggttaatacttaatacataaatgacctgcattgacatcatcatccaagaaaataaaaattgtatgcttgagatatttagttttcctagctaggttttctttattttagtaccgaatctttaggtgtgccacgttaatttagacccattttttcatacttaccaactgagtctagtttaatcatgactataatcgtataaaatgattcagtcgacgtcattgcgaacgtatataaaatcatccaaattgacgtcattccaaagaggtaagcatgcttatctaagagtccgagcatactaaacaagacgacattttatttgcactccaaatcaaattttgtattgcctaaagaaaaacaatcaaactcaagtttcttaaaattaatttcattcaaactaatcactttcaatatctcacatattattcatgccatttctatttgtctaaacatgatttaaaaaaaaaagtaaaatacaaagattactatgcaaaaactctataaaaaaaaattcaaatttcttatttatttgtgacatcaaattttcaaaataatttttttaattatcggttgatccggtcagtcgataaaaacataaactttcagcgaccgttaaaactttcctactaccgatttagagaaaatcttagcttgaaacgtaattgtaacctgccttcatgcaagtcgcaagatatgtcatcctaagttgtatatgttttctcaaaagatgtatttacttgagaaaatacgtttcaacgttgatggacaaccaattaagaatcaagcacctttcgtaatcaatttaggcttatcgtctaaggtatactgatttacgacagttgactagacttataaggaacaaaataatagaatagtttctaaacacttcacctaatcatagagactaagatggtaattcgtaaacgacaaagcctagtgacactgtccattgtaaaattccacatcatattagtattaaacatatacatgtagtttcctgaacacatgtagtatcaaacacacttcgtggcttcttcctcgaaacctgcggccgcgctatagttccggacttacccttaagataacttcgtatagcatacattatacgaagttatgggcccacgcgtgaagagcggttaccagagctggtcacctttgtccaccaagatggaactgtcttcggccagaatggccatctggattcagcaggcctagaaggccatttatcgctatcaactttgtatagaaaagttgcccgacattccggcctagtgcttagctaacgggaaacccgcttaacgattagttagtggacggggcccgggaagcttggcgcgcctctgttaatgaacgtaaggagcttctggatgacggctgggacttctttgacaaagagacagagctctaagtgtcttcttttcagtagattatcggtgctagaataaaagagatatgaagggattctgggttctgctctatgtagagtaaagcttggatctttgatctaatctaccgttagtataaaacatctattgagctctcttttatttttcttctcagtgtatagtttgcttattgtttttttggtgtttttttccacctctttgtggtactgacataaacaaagactatcgttttgtcatagaattttgagattttgaagaaaagttggataatttagtatactttttaactgactttataaaacgaattagcttcaattagagcttcacaattctcggattttactgaatgacaagttaacaatttaagctagaaaaaaatatgctctaagcctggacatgttgttagtcatggccagcgtatgtgtacattaggtaaatgaaaacaaaaacaaaaactttgaaggtttctgttaagaaaggaactaatttagcaataagagacatgatattacaagctcaacactgtcgctatatctaccagaagccaacaaatcttccagtgcgtaccattggagccacttttcaggctcattagacaaaagtagcacatataatgtaaagacgaaacgatgataaagagactcacaaggacataatttcaatacagaagaagtttgatgtcattactcattagaaagaaaggtataacacaggaacggaaacatagttgaacaattattcatcaggggctttacaaggccccaaaacacaaaccaccaaagttttaaatgaaacgagacatgaacttcttctgattcataacagagataagtttggtaccgtggccaattcgaatatccatggatccgaattccgcggccgcttgtaaccgttaacgcaagtttgtacaaaaaagcaggctccggccagagttacccggaccgaagcttgcatgcctgcagtgcagcgtgacccggtcgtgcccctctctagagataatgagcattgcatgtctaagttataaaaaattaccacatattttttttgtcacacttgtttgaagtgcagtttatctatctttatacatatatttaaactttactctacgaataatataatctatagtactacaataatatcagtgttttagagaatcatataaatgaacagttagacatggtctaaaggacaattgagtattttgacaacaggactctacagttttatctttttagtgtgcatgtgttctcctttttttttgcaaatagcttcacctatataatacttcatccattttattagtacatccatttagggtttagggttaatggtttttatagactaatttttttagtacatctattttattctattttagcctctaaattaagaaaactaaaactctattttagtttttttatttaataatttagatataaaatagaataaaataaagtgactaaaaattaaacaaataccctttaagaaattaaaaaaactaaggaaacatttttcttgtttcgagtagataatgccagcctgttaaacgccgtcgacgagtctaacggacaccaaccagcgaaccagcagcgtcgcgtcgggccaagcgaagcagacggcacggcatctctgtcgctgcctctggacccctctcgagagttccgctccaccgttggacttgctccgctgtcggcatccagaaattgcgtggcggagcggcagacgtgagccggcacggcaggcggcctcctcctcctctcacggcaccggcagctacgggggattcctttcccaccgctccttcgctttcccttcctcgcccgccgtaataaatagacaccccctccacaccctctttccccaacctcgtgttgttcggagcgcacacacacacaaccagatctcccccaaatccacccgtcggcacctccgcttcaaggtacgccgctcgtcctcccccccccccctctctaccttctctagatcggcgttccggtccatgcatggttagggcccggtagttctacttctgttcatgtttgtgttagatccgtgtttgtgttagatccgtgctgctagcgttcgtacacggatgcgacctgtacgtcagacacgttctgattgctaacttgccagtgtttctctttggggaatcctgggatggctctagccgttccgcagacgggatcgatttcatgattttttttgtttcgttgcatagggtttggtttgcccttttcctttatttcaatatatgccgtgcacttgtttgtcgggtcatcttttcatgcttttttttgtcttggttgtgatgatgtggtctggttgggcggtcgttctagatcggagtagaattctgtttcaaactacctggtggatttattaattttggatctgtatgtgtgtgccatacatattcatagttacgaattgaagatgatggatggaaatatcgatctaggataggtatacatgttgatgcgggttttactgatgcatatacagagatgctttttgttcgcttggttgtgatgatgtggtgtggttgggcggtcgttcattcgttctagatcggagtagaatactgtttcaaactacctggtgtatttattaattttggaactgtatgtgtgtgtcatacatcttcatagttacgagtttaagatggatggaaatatcgatctaggataggtatacatgttgatgtgggttttactgatgcatatacatgatggcatatgcagcatctattcatatgctctaaccttgagtacctatctattataataaacaagtatgttttataattattttgatcttgatatacttggatgatggcatatgcagcagctatatgtggatttttttagccctgccttcatacgctatttatttgcttggtactgtttcttttgtcgatgctcaccctgttgtttggtgttacttctgcaggtcgactttaacttagcctaggatccatgatgatgatgagcagcggccgggcgggcggcggggccaccgcggggcgatacccgttcacggcgtcgcagtggcaggagctggagcaccaggcgctcatctacaagtgcctggcgtccggcaagcccatcccttcctacctcatgccgccgctccgccgcatcctcgactccgccctcgccacgtcgccgtccctcgcctacccgccgcaaccctcactgggctggggctgcttcgggatgggcttcacccggaaggccgacgaggacccggagcccgggcggtgccggcgcacggacggcaagaagtggcgctgctccaaggaggcgtacccggactccaagtactgcgagaagcacatgcaccggggcaagaaccgttcaagaaagcctgtggaaatgtccttggccacgccggccccggcgccggcccccgccgccgccacaaccgccaccgccacctcatccccggcgccgtcctaccaccgcccggcccacgacgccacgccgtctccgtaccacgcgctgtatggaggcggcggcggcggcggcggtagcccttactcggcgtcggcacgcccaggagcaaccggaggcggcggcgcgtaccaccacgcgcagcatgtgagccccttccacctccacctcgagaccacccacccgcacccgccgccgccctacaactactccgccgaccagagggactacgcgtacgggcacgcggccgccaaggaggtcggcgagcacgccttcttctcggacggcgcgggcgagcgggtcgaccggcaggccgcggcggggcagtggcagttcaggcagctcggggtggagacgaagccgggccccacgccgctgttccccgtcgccgggtacgggcacggcgcggcgtcgccgtacggcgtggagatgggcaaggacgacgacgagcaggaggagaggcgccgccagcactgcttcgttcttggagccgacctgcggctggagcggccgtcgtcgggccatggccatggccatgaccatgacgacgccgccgccgcgcagaagccgctccggcccttcttcgacgagtggccgcaccagaagggggacaaggccgggtcgtggatggggctcgacggcgagacgcagctctccatgtccatccccatggccgccaccgacctccccgtcacctcccgcttccgtaacgacgagtgaggtaccgttaacagatctactaactatctatactgtaataatgttgtatagccgccggatagctagctagtttagtcattcagcggcgatgggtaataataaagtgtcatccatccatcaccatgcgtggcaacgtgagcaatgacctgattgaacaaattgaaatgaaaagaagaaatatgttatatgtcaacgagatttcctcataatgccactgacgacgtgtgtccaagaaatgtatcagtgatacgtatattcacaatttttttatgacttatactcacaatttgtttttttactacttatactcacaatttgttgtgcgtaccataacaatttcgatcgaatatatatcagaaagttgacgaaagtaagctcactcaaaaagttaaatgggctgcggaagctgcgtcaggcccaagttttggctattctatccggtatccacgattttgatggctgagggacatatgttcgcttaagcttcggtccgggcctagaaggccgatctcccgggcacccagctttcttgtacaaagtggccgttaacggatcggccagaatggcccggaccgggttaccgaattcgagctcggtaccctggttcacaaactcaatacaacacacagtggagtagggtattacgctccggcggcccgaaccactctaaatccttgtgtcctcgtgtgctcttccaccattaatgactgtaattgcagggacacgaagagttgtagcgcttttgccaacaagatccgctatatgctagtagagtggaacctgcacagcaacaagcatccaataatctgagaataagaattatgtgtggtgatggttctcatctctgcaactcgccattttcgcgagagaaccaaatccaagttggtgaagatcatgatttgggctcatgggctggcatagtagctattacctttgcaattgtggttcgaatctatccgatattctccttttcagggagagctaatgcttatgcttattgggtattttggtttgacactgcttcacgcccaaaaaaaggcaactatgtctgagttggatatggcccaaaaaaaggcagctatgtctgagttggatatggaagtcttctttcgtttagggtgaagtaagaccaagctcatgagcttattatcttaggtcggaacaaattagttgataggcatggcacatttatcaaattataatgattttaacagaaaagcaacacctctttttcagcagcaccagctttgcaagctgcaattgacactccaagcatagtatttgctccaaactcagcctgcatttcgcacaatatcatatctatttccatttggataaaatatattttccagaaatatgggaacagaatcaagatacagaaaaaagttgtggtagtagtggtaagtggaaacacaagtacagtgaaaagatagcattatttctgaacagtcaaattaaccgaaataagtagtatcacatactgcccctaaattgactacacccaatgtaaagaattgcttgagcatattgagccatcagttgtttgtttgtgtaacggatttgacaatgcagagttcaggagcaaaaaaccgcaaaggagagaaagagggaaaggatctcctagtatcccaccttgtggcgcgccctgtcaagtgcatgatggcctggtcgatctgcgtctgctgctgcggttccatcccaacgagtgcctccgacaccttgtcgttgatcacccgcaccgcgtaggcgacccccctggcgaggaacttccgcctctcggaggccccggccgcgtcggcggcggcgccctcgagcgcgcccacgctagccgtagatgctcggtgcacggccttgttggtgtgcaactcgacctcaacggccggtgcgctacgcccgtcaaggatctggcgcgcccgcaccctcgtgatcacggtgggcgcctcccgcctcatgtggccgacgatgaaaagcgccgggttaggggccttggcgcgcaccgccgtattcagggcctcctcgctcttgcgcgagagcaggtgcttccccaggtactcctgcactgacaaggctgccacagcggtggaatttgtcctcacgacttcgccacgtcgtcctcacctccctggcttcccacgactccgccgtatcgaggtgctcggtgggtcgtcttaatccgaagtccgaactaggaagacgagacagagaggtctgaggaatgggcctcgtttgatgttgagctgaattatttttccagcataagcccaggtcttggtccatgaacaaaattactagaaacccagcccagtactacgatctaaaagagggactgccactggatagctctctctagcattctccacgctccaatacagcggcgtcgtgtctatccgggtctatccgcgaacacgtgagaactctccagaaactgctttctcctccacttcatctctctcgctttccctctataaaaagaccccttctaggaattgagggagacagcaagcaccaagcagcgatccgaagctcaatcaattcactcaaacctcttccccaaatcttcgattagatcttcgttgacaagaagactagaaccgaacctgacatgtccaacctgctcacggttcaccagaaccttccggctcttccagtggacgcgacgtccgatgaagtcaggaagaacctcatggacatgttccgcgacaggcaagcgttcagcgagcacacctggaagatgctgctctccgtctgccgctcctgggctgcatggtgcaagctgaacaacaggaagtggttccccgctgagcccgaggacgtgagggattaccttctgtacctgcaagcgcgaggtttgtttctgcttctacctttgatatatatataataattatcattaattagtagtaatataatatttcaaatatttttttcaaaataaaagaatgtagtatatagcaattgcttttctgtagtttataagtgtgtatattttaatttataacttttctaatatatgaccaaaacatggtgatgcctaggtctggcagtgaagaccatccagcaacaccttggacaactgaacatgcttcacaggcgctccggcctcccgcgccccagcgactcgaacgccgtgagcctcgtcatgcgccgcatcaggaaggaaaacgtcgatgccggcgaaagggcaaagcaggccctcgcgttcgagaggaccgatttcgaccaggtccgcagcctgatggagaacagcgacaggtgccaggacattaggaacctggcgttcctcggaattgcatacaacacgctcctcaggatcgcggaaattgcccgcattcgcgtgaaggacattagccgcaccgacggcggcaggatgcttatccacattggcaggaccaagacgctcgtttccaccgcaggcgtcgaaaaggccctcagcctcggagtgaccaagctcgtcgaacgctggatctccgtgtccggcgtcgcggacgacccaaacaactacctcttctgccgcgtccgcaagaacggggtggctgcccctagcgccaccagccaactcagcacgagggccttggaaggtattttcgaggccacccaccgcctgatctacggcgcgaaggatgacagcggtcaacgctacctcgcatggtccgggcactccgcccgcgttggagctgctagggacatggcccgcgccggtgtttccatccccgaaatcatgcaggcgggtggatggacgaacgtgaacattgtcatgaactacattcgcaaccttgacagcgagacgggcgcaatggttcgcctcctggaagatggtgactgaggtacccaacctagacttgtccatcttctggattggccaacttaattaatgtatgaaataaaaggatgcacacatagtgacatgctaatcactataatgtgggcatcaaagttgtgtgttatgtgtaattactagttatctgaataaaagagaaagagatcatccatatttcttatcctaaatgaatgtcacgtgtctttataattctttgatgaaccagatgcatttcattaaccaaatccatatacatataaatattaatcatatataattaatatcaattgggttagcaaaacaaatctagtctaggtgtgttttgcgatccgatatcgaattggccacggtaccagctgctgctgttctagggttcacaagtctgcctatttgtcttccccaatggagctatggttgtctggtctggtccttggtcgtgtcccgtttcattgtgtactatttacctgtaatgtgtatccttaagtctggtttgatggtgtctgaaacgttttgctgtggtagagcagcatggaagaactataatgaataagtgatccctaatcattgtgtccaaattttgcttctgctatacccttttgtgctgtttcttatgttttgcttaaaaatttgatctgacaaacaaatttgtctaaattatgctcttgttctgactgtgtactgtacacatttgtattgctaccggtttggcacatagttttctctttgattgcagatcaaacccttctgattgcagattgcttggctatggctgatgtgctcactgttcttctttagcttgtatattgctgatggtggcttggctacggctgaaaaagttgctgctgcgccgacttggcaactgttgctccagtaatgctttgtcctctcttcctagccgccgacttggcacttggcagctgttgctcctgtaatgcgttgttatctcttatctcttgagatgtactatgattttgaggctgtttgacttgtgccagattgccagtgctgatgctatattatctcaggtttttatgctagtatatgttttactgtgtgctgcctgtgtcgagttacgtaatctattgaaccgctatgcgtgttgatgccctgttgttgcttgccagattgatgcccctgttgcttgcagcttgcaagctgtagtgaaatcctaaaattccaaaccaaatctattctgaacttttgaagatctgtgatgtccggaagaaaagattcaaacagataaacgggactctccagaatctataaaataaatgatcgacaaacgctttgctttggtaggcttcaagcttggtcacccggtccgggcctagaaggccagcttcggccgccccgggcaactttattatacaaagttgatagataaatcagatatctggttcctaaggacccggcggaccgattaaactgattcggtccgacgcgttacctaataacttcgtatagcatacattatacgaagttattagctaactaactagtaagcttaagccatgggtcgacggatccgttaactagcgtggcatttggcaccgccgcacactatgcgagctaggagtgctagtttacagatgaaactatgaaaccaagaaaacacaattgtccgtagctagcgcgtggcgtcgtgtcaagcttcacacagtatcttcgttcttcactataaatcgcgcctgttgttcgtgagacccaccaccgtggataacagtcccctaataataagcgatcaacagcactgctgatggctgaacaccgaggcgccgccgcgcgtaaccatccgccggagcagcccgtcgtgccggcgaacgacgccttccccgaccgcgcccagcagctctgcctcgacgccgggcgcgcgctcgcgatgtgcggcgtgctcgtcgccgtccctcccgcattttacgcgtcgacgtcgcggacgacaccgcacttgccttcgtcggcttcgtcctctggatcatcggtgcgtggctgtgcctcctggcgctcacgcccttggctccacgggcggtgagggcgggcggggccgccgccagcaccttgctgatcaggtgcctgtccctttcatgaactactagcgcccgcgcccgcggccgccgggcacaagagaacacatcgatgttcgctgcgtacgtcagcaataaggcactctttgtcagtagtcgagtgcatatgttgggtgtttgccctgggagatttcaagtgttgtggccattatcccgcaggataaaaaatcggcggcttttggattgatacggaaaataacgatgtttcatgctcgtgttgtgtgtgtgacatcttgtcagccaagtttttaaccgttgctactccccctctgtgggctcagtgtgtggaccggaatacgtcgtacataggccgtagcctaagcccaatatgccgtttttcaggttggcctgtgtgacgacaagcgggtctcaaaagcccatcacgcaactggcctgcaattattggaggagagcgcgtcgagttggttccagaggctgcgtggtggggccggactctgcgacgacctctcgttcgcgtccgatttggttgccgtgagccgtgacgtaacgcctccttccgttcctccctatataagttccacccccgggtccggtttccccaagccccagtgacccccgatcccgatcgcgaaatctccgcacccgccggcaagggaccgaagcaagcctctctcccgaccgtcgcatcaaggtacgcgtccgctcgatctgtcctcttccttctcgatttgacttgctgtggtgcccgatcacgggatcagaatcgcaccagtgtagatttcgcatgttctaagatgtgttagtttccaggctaatccagttctcttgacgcccgatccgatcgagctccgtgtttatttcagcctaatcgtagtattcccctaaaatttcctcattagggggttcgcaagattgttggtcgacaggttcacttatgctcgatcgcttacttttagtcgattcatgctgcgtactattgttgccccccgtggttttatcttttctcgtgtgaaatccagtagatatagtagatatcgtagcattaggttttaattcaatcgattgattattgtatcatcaaaattgagaagttcgaatcatgcctatcatgctgcctcaaccgaaatcctgtatattgaagtttcaattcaattgattgatcattcattagattcaaccaaaatctagaaggttagatgacgcatgtcatgctgcctgcgtagtttacctttgatctgtttatgattaccttatcagtaggatatttgtgattttgggaagtagcactaactgattcatgctgacatgatgttccctttcagattatactgttgagtcctatctaattgatgctttgtatgctatatgaatacgtcatggtaaattagcagttaattagcatattagcaattgggcgtacctcatcaggattgctcttgtagatgtgtgtggtgatgtttcttgttcaattcatgttctgctttaaaagtatgtgttctctgtttgttaattaagattcatggttataatgatttggacctaattaatcagggttgcccttttagatgcgtggttacttgttgagttcatttttttcctgctatagttgtatgcgtttgttcattcatggttagatttgatttgtttcttctctattccatgccttccatatacttcaattgtagcttaacatgagatttctgtatatgcaggtcgaccgccggggatccacacgacaccatggcccagtccaagcacggcctgaccaaggagatgaccatgaagtaccgcatggagggctgcgtggacggccacaagttcgtgatcaccggcgagggcatcggctaccccttcaagggcaagcaggccatcaacctgtgcgtggtggagggcggccccttgcccttcgccgaggacatcttgtccgccgccttcatgtacggcaaccgcgtgttcaccgagtacccccaggacatcgtcgactacttcaagaactcctgccccgccggctacacctgggaccgctccttcctgttcgaggacggcgccgtgtgcatctgcaacgccgacatcaccgtgagcgtggaggagaactgcatgtaccacgagtccaagttctacggcgtgaacttccccgccgacggccccgtgatgaagaagatgaccgacaactgggagccctcctgcgagaagatcatccccgtgcccaagcagggcatcttgaagggcgacgtgagcatgtacctgctgctgaaggacggtggccgcttgcgctgccagttcgacaccgtgtacaaggccaagtccgtgccccgcaagatgcccgactggcacttcatccagcacaagctgacccgcgaggaccgcagcgacgccaagaaccagaagtggcacctgaccgagcacgccatcgcctccggctccgccttgccctccggactcagatctcgatagagtcaacctagacttgtccatcttctggattggccaacttaattaatgtatgaaataaaaggatgcacacatagtgacatgctaatcactataatgtgggcatcaaagttgtgtgttatgtgtaattactagttatctgaataaaagagaaagagatcatccatatttcttatcctaaatgaatgtcacgtgtctttataattctttgatgaaccagatgcatttcattaaccaaatccatatacatataaatattaatcatatataattaatatcaattgggttagcaaaacaaatctagtctaggtgtgttttgcgaattgcggcgcccttactttaacgcctctaaccaacacccctttatctttataaggaacaataaacagaatttgccccactgttctaaatcacctaataatatccccagctaaaaacaataaaggtttcctagaattaagacaagcatgactgttcctccaggagggtttggaacattgttgcagtcttgcagatacgggcgaagggtgagaaacagagcggagggctggaggtgacctcggtagtcgacgccggagttgagcttgacaacgacggggcggcccctgatggacttgaggaagtccgatggcgtcttcaccgtcccgccggcgcccgaggcgggcctgtcgctgccgccgccgccgctgctcatcttgcgcgctgtgcccccggcggtgtccctgtgttgcggatcgcgggtgggccaggtggatgcgagggcgacccgtttggactccggccggagccgccggatccctggtcggtgtcagtgccgtttactctgggccccacgtgtcagtaccgtctgtagatgacaacaacccgtcgtccacagtcatgtccaaaatatcctttcttcttttttttcgattcggatatctatcttccttttttttttccaaaaatcttcttgacgcaccagcgcgcacgtttgtggtaaacgccgacacgtcggtcccacgtcgatagaccccacccaccagtgagtagcgtgtacgtattcgggggtgacggacgtgtcgccgtcgtcttgctagtcccattcccatctgagccacacatctctgaacaaaaaaaaggagggaggcctccacgcacatccccctccgtgccacccgccccaaaccctcgcgccgcctccgagacagccgccgcaaccatggccaccgccgccgccgcgtctaccgcgctcactggcgccactaccgctgcgcccaaggcgaggcgccgggcgcacctcctggccacccgccgcgccctcgccgcgcccatcaggtgctcagcggcgtcacccgccatgccgatggctcccccggccaccccgctccggccgtggggccccaccgagccccgcaagggtgctgacatcctcgtcgagtccctcgagcgctgcggcgtccgcgacgtcttcgcctaccccggcggcgcgtccatggagatccaccaggcactcacccgctcccccgtcatcgccaaccacctcttccgccacgagcaaggggaggcctttgccgcctccggctacgcgcgctcctcgggccgcgtcggcgtctgcatcgccacctccggccccggcgccaccaacctagtctccgcgctcgccgacgcgctgctcgattccgtccccatggtcgccatcacgggacaggtggcgcgacgcatgattggcaccgacgccttccaggagacgcccatcgtcgaggtcacccgctccatcaccaagcacaactacctggtcctcgacgtcgacgacatcccccgcgtcgtgcaggaggctttcttcctcgcctcctctggtcgaccagggccggtgcttgtcgacatccccaaggacatccagcagcagatggcggtgcctgtctgggacaagcccatgagtctgcctgggtacattgcgcgccttcccaagccccctgcgactgagttgcttgagcaggtgctgcgtcttgttggtgaatcgcggcgccctgttctttatgtgggcggtggctgcgcagcatctggtgaggagttgcgacgctttgtggagctgactggaatcccggtcacaactactcttatgggcctcggcaacttccccagcgacgacccactgtctctgcgcatgctaggtatgcatgggacggtgtatgcaaattatgcagtggataaggccgatctgttgcttgcacttggtgtgcggtttgatgatcgcgtgacagggaagattgaggcttttgcaagcagggctaagattgtgcacgttgatattgatccggctgagattggcaagaacaagcagccacatgtgtccatctgtgcagatgttaagcttgctttgcagggcatgaatgctcttcttgaaggaagcacatcaaagaagagctttgactttggctcatggaacgatgagttggatcagcagaagagggaattcccccttgggtataaaacatctaatgaggagatccagccacaatatgctattcaggttcttgatgagctgacgaaaggcgaggccatcatcggcacaggtgttgggcagcaccagatgtgggcggcacagtactacacttacaagcggccaaggcagtggttgtcttcagctggtcttggggctatgggatttggtttgccggctgctgctggtgcttctgtggcaaacccaggtgtcactgttgttgacatcgatggagatggtagctttctcatgaacgttcaggagctagctatgatccgaattgagaacctcccagtgaaggtctttgtgctaaacaaccagcacctggggatggtggtgcagttggaggacaggttctataaggccaacagagcgcacacatacttgggaaacccagagaatgaaagtgagatatatccagatttcgtgacgatcgccaaagggttcaacattccagcggtccgtgtgacaaagaagaacgaagtccgcgcagcgataaagaagatgctcgagactccagggccgtacctcttggatataatcgtcccacaccaggagcatgtgttgcctatgatccctagtggtggggctttcaaggatatgatcctggatggtgatggcaggactgtgtactgactagctagtcagttaacagatctgccagatcctcggtgtacaaataacccgtcttatcctatgagacgggccggcgtcagtgtgttctggaggaatttttatgtcagagcctttttctttgtgtgcttgatgtagatgccaagggaagcttattggctgttgaagcttgatgcaaaataaattatggaactctgttttttgtttatctaataataactagcaaatatgcttccattgcattgaaactaacagccttttgtgtttccaagttttattttgtgacaatgtcatctatttcaattagttgtggaatcggaaacttgcaggactaacttggaaactccaatccctcagcatcctggactttttcctggtgtaatccatgtagatattattttaatcatcattttagttctggaggtttttccatctccggttttgctcccctttcttcaaaaaaaaaaaaaaaatgccgtaggcgccgcaacgcccacctgttgttcaaactcatgggcacgagtggctcgaagattttatacaacaattgctgtagtttcaccgttgctggtgaagaagcatttttttaaaaaaatatagtggtattcattttaattagtttagttgtgcagcgagcaaaatttggacatgctctgctcggaatctgatcgacctagacacagattagcagcagtagctttgtcatctgttccaagagttgcgatctgatagaagaaaaaaaaaccttcccttcaatgtaaaaccgaaactaacaagaaagaagcacagtgccgtttaggcaagtatggagtacgtattaagcatgtagaaggccatgcatgaaccactaacaagaaagaagcgcagtgccattcaggcaagcataagcatgtagattggcatgcatgaacaactaacagtagatcgtctctggtctgattagaagttttttgggaagccaagaaatcatgtacaactggttccatctcaaattccgtggcaaaaagaggcctaagcaacatacctcgagtagatcacattcaagcttggtcacccggtccgtcaatattctgattccgatgacttcgtaggttcctagctcaagccgctcgtgtccaagcgtcacttacgattagctaatgattacggcatctaggaccgactagtggcgcgccgactagctagctaaggtaccgagctcgaattcattccgattaatcgtggcctcttgctcttcaggatgaagagctatgtttaaacgtgcaagcgctactagacaattcagtacattaaaaacgtccgcaatgtgttattaagttgtctaagcgtcaatttgtttacaccacaatatatcctgcca

SEQ ID NO: 91 - DNA, 31289 bp, synthetic construct
  misc_feature 1..31289: note = PHP98784
  source 1..31289: mol_type = other DNA
gtttacccgccaatatatcctgtcaaacactgcggccgcacttgaccgcggatggagccggagctgtggtgaggccatcgacgggaggtgggggagaacacagtctcagtgttctttgtgagtccgcaaggtttttagcttttctgtattaattaaggttgctgttggctgtagaatacggtcgtggaagagctgtatcggtagctactacgtaagctattatatactggaagtctggagctcgtcgatctccggtcgtcttcctccatttctcctcgtcttgctttgactgctgctaccatttgcttctgttttctgatgaagcatgccatgtcggccaccagtgtttgtgtggtttttgcagggaatggctttcaagtgctgtgattgaatggccctcgtcgtcctcggctgagctcacatggacgcgtcatgtgagtgagatatatgatcatatgatgagtggggttcgggtgagtgcgtacttgaagtaggatcccgctttcactcattcattcattggcctttaaaccgggaaattttcgcgaggagatggagggaagcaagcagggtgacgagtgcagagtgccgcgagcgctttgtcaaaaggcaccgccgtaggcaaaaaaatcaatggccctgactgactcgatggtagtactactgtagagactagagagggttgctccccatatcttcgtgtgacttttactccagcattgcatttccgtcattgagacgttaattaatagcagctttcgggacagatgactgtggccatgtttcgtcacggccgcttcgtgccagctgggggtactatagtactgtgattttgttagtaaaaactttcattaggccaccattgacgaccgggccttcgcttttgctgcgctaattaaccatttcccggcgaccgaagggaacatgaacatgccccgacacatgagggcatgaggactagtgttctccctgtcgttcgttgacttgactagtgatagtttaaacgctcttcaactggaagagcggttactaccggttcactagctagctgctaatcgagctagttaccctatgaggtgacatgaagcgctcacggttactatgacggttagcttcacgactgttggtggcagtagcgtacgacttagctatagttccggacttacctagctaataacttcgtatagcatacattatacgaagttatggttaccgagctgttaccaagcggccgcacactgatagtttaaactgaaggcgggaaacgacaatctgatcatgagcggagaattaagggagtcacgttatgacccccgccgatgacgcgggacaagccgttttacgtttggaactgacagaaccgcaacgattgaaggagccactcagccgcgggtttctggagtttaatgagctaagcacatacgtcagaaaccattattgcgcgttcaaaagtcgcctaaggtcactatcagctagcaaatatttcttgtcaaaaatgctccactgacgttccataaattcccctcggtatccaattagagtctcatattcactcccatggcggccaatgcgggcggcggtggagcgggaggaggcagcggcagcggcagcgtggctgcgccggcggtgtgccgccccagcggctcgcggtggacgccgacgccggagcagatcaggatgctgaaggagctctactacggctgcggcatccggtcgcccagctcggagcagatccagcgcatcaccgccatgctgcggcagcacggcaagatcgagggcaagaacgtcttctactggttccagaaccacaaggcccgcgagcgccagaagcgccgcctcaccagcctcgacgtcaacgtgcccgccgccggcgcggccgacgccaccaccagccaactcggcgtcctctcgctgtcgtcgccgccgccttcaggcgcggcgcctccctcgcccaccctcggcttctacgccgccggcaatggcggcggatcggctgtgctgctggacacgagttccgactggggcagcagcggcgctgctatggccaccgagacatgcttcctgcaggactacatgggcgtgacggacacgggcagctcgtcgcagtggccacgcttctcgtcgtcggacacgataatggcggcggccgcggcgcgggcggcgacgacgcgggcgcccgagacgctccctctcttcccgacctgcggcgacgacggcggcagcggtagcagcagctacttgccgttctggggtgccgcgtccacaactgccggcgccacttcttccgttgcgatccaacagcaacaccagctgcaggagcagtacagcttttacagcaacagcaacagcacccagctggccggcaccggcaaccaagacgtatcggcaacagcagcagcagccgccgccctggagctgagcctcagctcatggtgctccccttaccctgctgcagggagtatgtgagagcaacgcgagctgccactgctcttcactgatgtctctggaatggaaggaggaggaagtgagaacagatcattcgacaaagcagcattagtccgttgatcggtggaagaccactcgtcagtgttgagttgaatgtttgatcaataaaatacggcaatgctgtaagggttgttttttatgccattgataatacactgtactgttcagttgttgaactctatttcttagccatgccaagtgcttttcttattttgaataacattacagcaaaaagttgaaagacaaaaaaaaaaacccccgaacagagtgctttgggtcccaagcttctttagactgtgttcggcgttccccctaaatttctccccctatatctcactcacttgtcacatcagcgttctctttccccctatatctccacgctctacagcagttccacctatatcaaacctctataccccaccacaacaatattatatactttcatcttcaactaactcatgtaccttccaatttttttctactaataattatttacgtgcacagaaacttagcaaggagagagagagcgggaatttaaatgctcggcgttaggcttttagtccgctaggtggctagaccgaggttaggacgctagttcactaggggcctagtggtgttttaagacgtcacggtcactacgaatcgaccgaagcttgcatgggccgcatcgagcagctggcttgtggggaccagacaaaaaaggaatggtgcagaattgttaggcgcacctaccaaaagcatctttgcctttattgcaaagataaagcagattcctctagtacaagtggggaacaaaataacgtggaaaagagctgtcctgacagcccactcactaatgcgtatgacgaacgcagtgacgaccacaaaactcgagcaacgagatcatgagccaatcaaagaggagtgatgtagacctaaagcaataatggagccatgacgtaagggcttacgcccatacgaaataattaaaggctgatgtgacctgtcggtctctcagaacctttactttttatgtttggcgtgtatttttaaatttccacggcaatgacgatgtgaccgtcgacccactaaaacattgctttgtcaaaagctaaaaaagatgatgcccgacagccacttgtgtgaagcatgagaagccggtccctccactaagaaaattagtgaagcatcttccagtggtccctccactcacagctcaatcagtgagcaacaggacgaaggaaatgacgtaagccatgacgtctaatcccagggccagcttgcatgcctgcagtgcagcgtgacccggtcgtgcccctctctagagataatgagcattgcatgtctaagttataaaaaattaccacatattttttttgtcacacttgtttgaagtgcagtttatctatctttatacatatatttaaactttactctacgaataatataatctatagtactacaataatatcagtgttttagagaatcatataaatgaacagttagacatggtctaaaggacaattgagtattttgacaacaggactctacagttttatctttttagtgtgcatgtgttctcctttttttttgcaaatagcttcacctatataatacttcatccattttattagtacatccatttagggtttagggttaatggtttttatagactaatttttttagtacatctattttattctattttagcctctaaattaagaaaactaaaactctattttagtttttttatttaataatttagatataaaatagaataaaataaagtgactaaaaattaaacaaataccctttaagaaattaaaaaaactaaggaaacatttttcttgtttcgagtagataatgccagcctgttaaacgccgtcgacgagtctaacggacaccaaccagcgaaccagcagcgtcgcgtcgggccaagcgaagcagacggcacggcatctctgtcgctgcctctggacccctctcgagagttccgctccaccgttggacttgctccgctgtcggcatccagaaattgcgtggcggagcggcagacgtgagccggcacggcaggcggcctcctcctcctctcacggcaccggcagctacgggggattcctttcccaccgctccttcgctttcccttcctcgcccgccgtaataaatagacaccccctccacaccctctttccccaacctcgtgttgttcggagcgcacacacacacaaccagatctcccccaaatccacccgtcggcacctccgcttcaaggtacgccgctcgtcctcccccccccccctctctaccttctctagatcggcgttccggtccatgcatggttagggcccggtagttctacttctgttcatgtttgtgttagatccgtgtttgtgttagatccgtgctgctagcgttcgtacacggatgcgacctgtacgtcagacacgttctgattgctaacttgccagtgtttctctttggggaatcctgggatggctctagccgttccgcagacgggatcgatttcatgattttttttgtttcgttgcatagggtttggtttgcccttttcctttatttcaatatatgccgtgcacttgtttgtcgggtcatcttttcatgcttttttttgtcttggttgtgatgatgtggtctggttgggcggtcgttctagatcggagtagaattctgtttcaaactacctggtggatttattaattttggatctgtatgtgtgtgccatacatattcatagttacgaattgaagatgatggatggaaatatcgatctaggataggtatacatgttgatgcgggttttactgatgcatatacagagatgctttttgttcgcttggttgtgatgatgtggtgtggttgggcggtcgttcattcgttctagatcggagtagaatactgtttcaaactacctggtgtatttattaattttggaactgtatgtgtgtgtcatacatcttcatagttacgagtttaagatggatggaaatatcgatctaggataggtatacatgttgatgtgggttttactgatgcatatacatgatggcatatgcagcatctattcatatgctctaaccttgagtacctatctattataataaacaagtatgttttataattattttgatcttgatatacttggatgatggcatatgcagcagctatatgtggatttttttagccctgccttcatacgctatttatttgcttggtactgtttcttttgtcgatgctcaccctgttgtttggtgttacttctgcaggtcgactttaacttagcctaggatccatggccactgtgaacaactggctcgctttctccctctccccgcaggagctgccgccctcccagacgacggactccacactcatctcggccgccaccgccgaccatgtctccggcgatgtctgcttcaacatcccccaagattggagcatgaggggatcagagctttcggcgctcgtcgcggagccgaagctggaggacttcctcggcggcatctccttctccgagcagcatcacaaggccaactgcaacatgatacccagcactagcagcacagtttgctacgcgagctcaggtgctagcaccggctaccatcaccagctgtaccaccagcccaccagctcagcgctccacttcgcggactccgtaatggtggcttcctcggccggtgtccacgacggcggtgccatgctcagcgcggccgccgctaacggtgtcgctggcgctgccagtgccaacggcggcggcatcgggctgtccatgattaagaactggctgcggagccaaccggcgcccatgcagccgagggtggcggcggctgagggcgcgcaggggctctctttgtccatgaacatggcggggacgacccaaggcgctgctggcatgccacttctcgctggagagcgcgcacgggcgcccgagagtgtatcgacgtcagcacagggtggagccgtcgtcgtcacggcgccgaaggaggatagcggtggcagcggtgttgccggcgctctagtagccgtgagcacggacacgggtggcagcggcggcgcgtcggctgacaacacggcaaggaagacggtggacacgttcgggcagcgcacgtcgatttaccgtggcgtgacaaggcatagatggactgggagatatgaggcacatctttgggataacagttgcagaagggaagggcaaactcgtaagggtcgtcaagtctatttaggtggctatgataaagaggagaaagctgctagggcttatgatcttgctgctctgaagtactggggtgccacaacaacaacaaattttccagtgagtaactacgaaaaggagctcgaggacatgaagcacatgacaaggcaggagtttgtagcgtctctgagaaggaagagcagtggtttctccagaggtgcatccatttacaggggagtgactaggcatcaccaacatggaagatggcaagcacggattggacgagttgcagggaacaaggatctttacttgggcaccttcagcacccaggaggaggcagcggaggcgtacgacatcgcggcgatcaagttccgcggcctcaacgccgtcaccaacttcgacatgagccgctacgacgtgaagagcatcctggacagcagcgccctccccatcggcagcgccgccaagcgcctcaaggaggccgaggccgcagcgtccgcgcagcaccaccacgccggcgtggtgagctacgacgtcggccgcatcgcctcgcagctcggcgacggcggagccctggcggcggcgtacggcgcgcactaccacggcgccgcctggccgaccatcgcgttccagccgggcgccgccagcacaggcctgtaccacccgtacgcgcagcagccaatgcgcggcggcgggtggtgcaagcaggagcaggaccacgcggtgatcgcggccgcgcacagcctgcaggacctccaccacctgaacctgggcgcggccggcgcgcacgactttttctcggcagggcagcaggccgccgccgctgcgatgcacggcctgggtagcatcgacagtgcgtcgctcgagcacagcaccggctccaactccgtcgtctacaacggcggggtcggcgacagcaacggcgccagcgccgtcggcggcagtggcggtggctacatgatgccgatgagcgctgccggagcaaccactacatcggcaatggtgagccacgagcaggtgcatgcacgggcctacgacgaagccaagcaggctgctcagatggggtacgagagctacctggtgaacgcggagaacaatggtggcggaaggatgtctgcatgggggactgtcgtgtctgcagccgcggcggcagcagcaagcagcaacgacaacatggccgccgacgtcgggcatggcggcgcgcagctcttcagtgtctggaacgacacttaagcgtacctagtggtacctgacatcttatagtctgcaacctctcgtgtctgaattcctatctttatcaagtgttattgcttccacgactataggacagctttcgtcgaaagcttttgctcatgtgatctcgaaggattcatctagtctgatttttcgtgacttgtatcggttttattggattcatccaacatatatcaataaaaaatgagttgtgtttcctttcttcctagttcagttaaaattatttccctcctgcgcttgtgctgtaattgtctgtgtacctgttgtttgtgactgtgttagttcccttggatatgatttcgtatttgatatgtacatggagatagcttagcttcattattggagtatgaagttagtatgacatagtcactctcctggaaaattgacactgcaaaccatatttttattctgaaccacaaatcctagtcagtccgctggcatatgccgtccgtttgctgaatccagaacgtgggtttggagatgtacggctgagatgcctctatgcgaaggggatttcgtggtgaaacgagatgggagtagagcaacgcccgtggaagatgcttcaaacttccacacttttgagcaacgatcggcagtagtaaggtagacgatttcaagatcaaagcatatgaagataaacaacatcaacaacaaaatttgttggggttctatagagagaaacagagctacatacatacactgttttgtatctaccatctgagatgatgaaaagatgaaaaactaaagaatgccccggcgccaacgccaggacacgccgcgcgcgcgtcacccgagccatctcttgacccagccggcgctgtatatttacacacgttgcagcatcgatcaccacctgttcgatcgcgtcgccgtcaccggcgcgccgcgacttattgaactagtctagggcgcggctaacaacctagcttagattgccttgtctaaacccttaggctaacgcgccactctagacaccttgctagttggatattacctcttctcttcaaagtatccttgaacgctcaccggttatcaaatctctacactatagctctgtagtcttgctagatagttagttctttagctctcgaattcgagctcggtaccctggttcacaaactcaatacaacacacagtggagtagggtattacgctccggcggcccgaaccactctaaatccttgtgtcctcgtgtgctcttccaccattaatgactgtaattgcagggacacgaagagttgtagcgcttttgccaacaagatccgctatatgctagtagagtggaacctgcacagcaacaagcatccaataatctgagaataagaattatgtgtggtgatggttctcatctctgcaactcgccattttcgcgagagaaccaaatccaagttggtgaagatcatgatttgggctcatgggctggcatagtagctattacctttgcaattgtggttcgaatctatccgatattctccttttcagggagagctaatgcttatgcttattgggtattttggtttgacactgcttcacgcccaaaaaaaggcaactatgtctgagttggatatggcccaaaaaaaggcagctatgtctgagttggatatggaagtcttctttcgtttagggtgaagtaagaccaagctcatgagcttattatcttaggtcggaacaaattagttgataggcatggcacatttatcaaattataatgattttaacagaaaagcaacacctctttttcagcagcaccagctttgcaagctgcaattgacactccaagcatagtatttgctccaaactcagcctgcatttcgcacaatatcatatctatttccatttggataaaatatattttccagaaatatgggaacagaatcaagatacagaaaaaagttgtggtagtagtggtaagtggaaacacaagtacagtgaaaagatagcattatttctgaacagtcaaattaaccgaaataagtagtatcacatactgcccctaaattgactacacccaatgtaaagaattgcttgagcatattgagccatcagttgtttgtttgtgtaacggatttgacaatgcagagttcaggagcaaaaaaccgcaaaggagagaaagagggaaaggatctcctagtatcccaccttgtggcgcgccctgtcaagtgcatgatggcctggtcgatctgcgtctgctgctgcggttccatcccaacgagtgcctccgacaccttgtcgttgatcacccgcaccgcgtaggcgacccccctggcgaggaacttccgcctctcggaggccccggccgcgtcggcggcggcgccctcgagcgcgcccacgctagccgtagatgctcggtgcacggccttgttggtgtgcaactcgacctcaacggccggtgcgctacgcccgtcaaggatctggcgcgcccgcaccctcgtgatcacggtgggcgcctcccgcctcatgtggccgacgatgaaaagcgccgggttaggggccttggcgcgcaccgccgtattcagggcctcctcgctcttgcgcgagagcaggtgcttccccaggtactcctgcactgacaaggctgccacagcggtggaatttgtcctcacgacttcgccacgtcgtcctcacctccctggcttcccacgactccgccgtatcgaggtgctcggtgggtcgtcttaatccgaagtccgaactaggaagacgagacagagaggtctgaggaatgggcctcgtttgatgttgagctgaattatttttccagcataagcccaggtcttggtccatgaacaaaattactagaaacccagcccagtactacgatctaaaagagggactgccactggatagctctctctagcattctccacgctccaatacagcggcgtcgtgtctatccgggtctatccgcgaacacgtgagaactctccagaaactgctttctcctccacttcatctctctcgctttccctctataaaaagaccccttctaggaattgagggagacagcaagcaccaagcagcgatccgaagctcaatcaattcactcaaacctcttccccaaatcttcgattagatcttcgttgacaagaagactagaaccgaacctgacatgtccaacctgctcacggttcaccagaaccttccggctcttccagtggacgcgacgtccgatgaagtcaggaagaacctcatggacatgttccgcgacaggcaagcgttcagcgagcacacctggaagatgctgctctccgtctgccgctcctgggctgcatggtgcaagctgaacaacaggaagtggttccccgctgagcccgaggacgtgagggattaccttctgtacctgcaagcgcgaggtttgtttctgcttctacctttgatatatatataataattatcattaattagtagtaatataatatttcaaatatttttttcaaaataaaagaatgtagtatatagcaattgcttttctgtagtttataagtgtgtatattttaatttataacttttctaatatatgaccaaaacatggtgatgcctaggtctggcagtgaagaccatccagcaacaccttggacaactgaacatgcttcacaggcgctccggcctcccgcgccccagcgactcgaacgccgtgagcctcgtcatgcgccgcatcaggaaggaaaacgtcgatgccggcgaaagggcaaagcaggccctcgcgttcgagaggaccgatttcgaccaggtccgcagcctgatggagaacagcgacaggtgccaggacattaggaacctggcgttcctcggaattgcatacaacacgctcctcaggatcgcggaaattgcccgcattcgcgtgaaggacattagccgcaccgacggcggcaggatgcttatccacattggcaggaccaagacgctcgtttccaccgcaggcgtcgaaaaggccctcagcctcggagtgaccaagctcgtcgaacgctggatctccgtgtccggcgtcgcggacgacccaaacaactacctcttctgccgcgtccgcaagaacggggtggctgcccctagcgccaccagccaactcagcacgagggccttggaaggtattttcgaggccacccaccgcctgatctacggcgcgaaggatgacagcggtcaacgctacctcgcatggtccgggcactccgcccgcgttggagctgctagggacatggcccgcgccggtgtttccatccccgaaatcatgcaggcgggtggatggacgaacgtgaacattgtcatgaactacattcgcaaccttgacagcgagacgggcgcaatggttcgcctcctggaagatggtgactgaggtacccaacctagacttgtccatcttctggattggccaacttaattaatgtatgaaataaaaggatgcacacatagtgacatgctaatcactataatgtgggcatcaaagttgtgtgttatgtgtaattactagttatctgaataaaagagaaagagatcatccatatttcttatcctaaatgaatgtcacgtgtctttataattctttgatgaaccagatgcatttcattaaccaaatccatatacatataaatattaatcatatataattaatatcaattgggttagcaaaacaaatctagtctaggtgtgttttgcgatccgatatcaggcctgacgtctaaaaacggcccctaactaacgcttagttgcccgctagattagtcccccgttagtgcctagttagacacacgacgaactaggggctagccaccttgctagttggatattacctcttctcttcaaagtatccttgaacgctcaccggttatcaaatctctacactatagctctgtagtcttgctagatagttagttctttagctctcgtgcgcacgataacttcgtatagcatacattatacgaagttataacagcggaccgggttaccgaattcctgcccaactttgtatagaaaagttgggccgaattcgagctcggtacggccagaatggcccggaccgaagcttgcatgcctgcagtgcagcgtgacccggtcgtgcccctctctagagataatgagcattgcatgtctaagttataaaaaattaccacatattttttttgtcacacttgtttgaagtgcagtttatctatctttatacatatatttaaactttactctacgaataatataatctatagtactacaataatatcagtgttttagagaatcatataaatgaacagttagacatggtctaaaggacaattgagtattttgacaacaggactctacagttttatctttttagtgtgcatgtgttctcctttttttttgcaaatagcttcacctatataatacttcatccattttattagtacatccatttagggtttagggttaatggtttttatagactaatttttttagtacatctattttattctattttagcctctaaattaagaaaactaaaactctattttagtttttttatttaataatttagatataaaatagaataaaataaagtgactaaaaattaaacaaataccctttaagaaattaaaaaaactaaggaaacatttttcttgtttcgagtagataatgccagcctgttaaacgccgtcgacgagtctaacggacaccaaccagcgaaccagcagcgtcgcgtcgggccaagcgaagcagacggcacggcatctctgtcgctgcctctggacccctctcgagagttccgctccaccgttggacttgctccgctgtcggcatccagaaattgcgtggcggagcggcagacgtgagccggcacggcaggcggcctcctcctcctctcacggcaccggcagctacgggggattcctttcccaccgctccttcgctttcccttcctcgcccgccgtaataaatagacaccccctccacaccctctttccccaacctcgtgttgttcggagcgcacacacacacaaccagatctcccccaaatccacccgtcggcacctccgcttcaaggtacgccgctcgtcctcccccccccccctctctaccttctctagatcggcgttccggtccatgcatggttagggcccggtagttctacttctgttcatgtttgtgttagatccgtgtttgtgttagatccgtgctgctagcgttcgtacacggatgcgacctgtacgtcagacacgttctgattgctaacttgccagtgtttctctttggggaatcctgggatggctctagccgttccgcagacgggatcgatttcatgattttttttgtttcgttgcatagggtttggtttgcccttttcctttatttcaatatatgccgtgcacttgtttgtcgggtcatcttttcatgcttttttttgtcttggttgtgatgatgtggtctggttgggcggtcgttctagatcggagtagaattctgtttcaaactacctggtggatttattaattttggatctgtatgtgtgtgccatacatattcatagttacgaattgaagatgatggatggaaatatcgatctaggataggtatacatgttgatgcgggttttactgatgcatatacagagatgctttttgttcgcttggttgtgatgatgtggtgtggttgggcggtcgttcattcgttctagatcggagtagaatactgtttcaaactacctggtgtatttattaattttggaactgtatgtgtgtgtcatacatcttcatagttacgagtttaagatggatggaaatatcgatctaggataggtatacatgttgatgtgggttttactgatgcatatacatgatggcatatgcagcatctattcatatgctctaaccttgagtacctatctattataataaacaagtatgttttataattattttgatcttgatatacttggatgatggcatatgcagcagctatatgtggatttttttagccctgccttcatacgctatttatttgcttggtactgtttcttttgtcgatgctcaccctgttgtttggtgttacttctgcaggtcgactttaacttagcctaggatccatggcaccgaagaagaagcgcaaggtgatggacaagaagtacagcatcggcctcgacatcggcaccaactcggtgggctgggccgtcatcacggacgaatataaggtcccgtcgaagaagttcaaggtcctcggcaatacagaccgccacagcatcaagaaaaacttgatcggcgccctcctgttcgatagcggcgagaccgcggaggcgaccaggctcaagaggaccgccaggagacggtacactaggcgcaagaacaggatctgctacctgcaggagatcttcagcaacgagatggcgaaggtggacgactccttcttccaccgcctggaggaatcattcctggtggaggaggacaagaagcatgagcggcacccaatcttcggcaacatcgtcgacgaggtaagtttctgcttctacctttgatatatatataataattatcattaattagtagtaatataatatttcaaatatttttttcaaaataaaagaatgtagtatatagcaattgcttttctgtagtttataagtgtgtatattttaatttataacttttctaatatatgaccaaaacatggtgatgtgcaggtggcctaccacgagaagtacccgacaatctaccacctccggaagaaactggtggacagcacagacaaggcggacctccggctcatctaccttgccctcgcgcatatgatcaagttccgcggccacttcctcatcgagggcgacctgaacccggacaactccgacgtggacaagctgttcatccagctcgtgcagacgtacaatcaactgttcgaggagaaccccataaacgctagcggcgtggacgccaaggccatcctctcggccaggctctcgaaatcaagaaggctggagaaccttatcgcgcagttgccaggcgaaaagaagaacggcctcttcggcaaccttattgcgctcagcctcggcctgacgccgaacttcaaatcaaacttcgacctcgcggaggacgccaagctccagctctcaaaggacacctacgacgacgacctcgacaacctcctggcccagataggagaccagtacgcggacctcttcctcgccgccaagaacctctccgacgctatcctgctcagcgacatccttcgggtcaacaccgaaattaccaaggcaccgctgtccgccagcatgattaaacgctacgacgagcaccatcaggacctcacgctgctcaaggcactcgtccgccagcagctccccgagaagtacaaggagatcttcttcgaccaatcaaaaaacggctacgcgggatatatcgacggcggtgccagccaggaagagttctacaagttcatcaaaccaatcctggagaagatggacggcaccgaggagttgctggtcaagctcaacagggaggacctcctcaggaagcagaggaccttcgacaacggctccatcccgcatcagatccacctgggcgaactgcatgccatcctgcggcgccaggaggacttctacccgttcctgaaggataaccgggagaagatcgagaagatcttgacgttccgcatcccatactacgtgggcccgctggctcgcggcaactcccggttcgcctggatgacccggaagtcggaggagaccatcacaccctggaactttgaggaggtggtcgataagggcgctagcgctcagagcttcatcgagcgcatgaccaacttcgataaaaacctgcccaatgaaaaagtcctccccaagcactcgctgctctacgagtacttcaccgtgtacaacgagctcaccaaggtcaaatacgtcaccgagggcatgcggaagccggcgttcctgagcggcgagcagaagaaggcgatagtggacctcctcttcaagaccaacaggaaggtgaccgtgaagcaattaaaagaggactacttcaagaaaatagagtgcttcgactccgtggagatctcgggcgtggaggatcggttcaacgcctcactcggcacgtatcacgacctcctcaagatcattaaagacaaggacttcctcgacaacgaggagaacgaggacatcctcgaggacatcgtcctcaccctgaccctgttcgaggaccgcgaaatgatcgaggagaggctgaagacctacgcgcacctgttcgacgacaaggtcatgaaacagctcaagaggcgccgctacactggttggggaaggctgtcccgcaagctcattaatggcatcagggacaagcagagcggcaagaccatcctggacttcctcaagtccgacgggttcgccaaccgcaacttcatgcagctcattcacgacgactcgctcacgttcaaggaagacatccagaaggcacaggtgagcgggcagggtgactccctccacgaacacatcgccaacctggccggctcgccggccattaaaaagggcatcctgcagacggtcaaggtcgtcgacgagctcgtgaaggtgatgggccggcacaagcccgaaaatatcgtcatagagatggccagggagaaccagaccacccaaaaagggcagaagaactcgcgcgagcggatgaaacggatcgaggagggcattaaagagctcgggtcccagatcctgaaggagcaccccgtggaaaatacccagctccagaatgaaaagctctacctctactacctgcagaacggccgcgacatgtacgtggaccaggagctggacattaatcggctatcggactacgacgtcgaccacatcgtgccgcagtcgttcctcaaggacgatagcatcgacaacaaggtgctcacccggtcggataaaaatcggggcaagagcgacaacgtgcccagcgaggaggtcgtgaagaagatgaaaaactactggcgccagctcctcaacgcgaaactgatcacccagcgcaagttcgacaacctgacgaaggcggaacgcggtggcttgagcgaactcgataaggcgggcttcataaaaaggcagctggtcgagacgcgccagatcacgaagcatgtcgcccagatcctggacagccgcatgaatactaagtacgatgaaaacgacaagctgatccgggaggtgaaggtgatcacgctgaagtccaagctcgtgtcggacttccgcaaggacttccagttctacaaggtccgcgagatcaacaactaccaccacgcccacgacgcctacctgaatgcggtggtcgggaccgccctgatcaagaagtacccgaagctggagtcggagttcgtgtacggcgactacaaggtctacgacgtgcgcaaaatgatcgccaagtccgagcaggagatcggcaaggccacggcaaaatacttcttctactcgaacatcatgaacttcttcaagaccgagatcaccctcgcgaacggcgagatccgcaagcgcccgctcatcgaaaccaacggcgagacgggcgagatcgtctgggataagggccgggatttcgcgacggtccgcaaggtgctctccatgccgcaagtcaatatcgtgaaaaagacggaggtccagacgggcgggttcagcaaggagtccatcctcccgaagcgcaactccgacaagctcatcgcgaggaagaaggattgggacccgaaaaaatatggcggcttcgacagcccgaccgtcgcatacagcgtcctcgtcgtggcgaaggtggagaagggcaagtcaaagaagctcaagtccgtgaaggagctgctcgggatcacgattatggagcggtcctccttcgagaagaacccgatcgacttcctagaggccaagggatataaggaggtcaagaaggacctgattattaaactgccgaagtactcgctcttcgagctggaaaacggccgcaagaggatgctcgcctccgcaggcgagttgcagaagggcaacgagctcgccctcccgagcaaatacgtcaatttcctgtacctcgctagccactatgaaaagctcaagggcagcccggaggacaacgagcagaagcagctcttcgtggagcagcacaagcattacctggacgagatcatcgagcagatcagcgagttctcgaagcgggtgatcctcgccgacgcgaacctggacaaggtgctgtcggcatataacaagcaccgcgacaaaccaatacgcgagcaggccgaaaatatcatccacctcttcaccctcaccaacctcggcgctccggcagccttcaagtacttcgacaccacgattgaccggaagcggtacacgagcacgaaggaggtgctcgatgcgacgctgatccaccagagcatcacagggctctatgaaacacgcatcgacctgagccagctgggcggagacaagagaccacgggaccgccacgatggcgagctgggaggccgcaagcgggcaaggtaggtaccgttaacctagacttgtccatcttctggattggccaacttaattaatgtatgaaataaaaggatgcacacatagtgacatgctaatcactataatgtgggcatcaaagttgtgtgttatgtgtaattactagttatctgaataaaagagaaagagatcatccatatttcttatcctaaatgaatgtcacgtgtctttataattctttgatgaaccagatgcatttcattaaccaaatccatatacatataaatattaatcatatataattaatatcaattgggttagcaaaacaaatctagtctaggtgtgttttgccccgggttaacggcaaacgctaattagtcactaggcccaggaaacactaactaagccctagcttatcctagcgcaacctagttaggtcttccccaagtttgtacaaaaaagcaggctccggccagaatggcccggaccgggttaccgaattcgagctcggtaccctgggatccgatatcgatgggccctggccgaagctttgagagtacaatgatgaacctagattaatcaatgccaaagtctgaaaaatgcaccctcagtctatgatccagaaaatcaagattgcttgaggccctgttcggttgttccggattagagccccggattaattcctagccggattacttctctaatttatatagattttgatgagctggaatgaatcctggcttattccggtacaaccgaacaggccctgaaggataccagtaatcgctgagctaaattggcatgctgtcagagtgtcagtattgcagcaaggtagtgagataaccggcatcatggtgccagtttgatggcaccattagggttagagatggtggccatgggcgcatgtcctggccaactttgtatgatatatggcagggtgaataggaaagtaaaattgtattgtaaaaagggatttcttctgtttgttagcgcatgtacaaggaatgcaagttttgagcgagggggcatcaaagatctggctgtgtttccagctgtttttgttagccccatcgaatccttgacataatgatcccgcttaaataagcaacctcgcttgtatagttccttgtgctctaacacacgatgatgataagtcgtaaaatagtggtgtccaaagaatttccaggcccagttgtaaaagctaaaatgctattcgaatttctactagcagtaagtcgtgtttagaaattatttttttatataccttttttccttctatgtacagtaggacacagtgtcagcgccgcgttgacggagaatatttgcaaaaaagtaaaagagaaagtcatagcggcgtatgtgccaaaaacttcgtcacagagagggccataagaaacatggcccacggcccaatacgaagcaccgcgacgaagcccaaacagcagtccgtaggtggagcaaagcgctgggtaatacgcaaacgttttgtcccaccttgactaatcacaagagtggagcgtaccttataaaccgagccgcaagcaccgaattgcccaaaacgctttcccgatgttttagagctagaaatagcaagttaaaataaggctagtccgttatcaacttgaaaaagtggcaccgagtcggtgctttttttttgcggccgcgaattcctgcagggccctcttgtcggaccagttgcccaccacgttggtgaggggcacccagctttcttgtacaaagtggccgttaacggatcggccagaatggcccggaccgggttaccgaattcgagctcggtaccctgggatccgatatcgatgggccctggccgaagctttgagagtacaatgatgaacctagattaatcaatgccaaagtctgaaaaatgcaccctcagtctatgatccagaaaatcaagattgcttgaggccctgttcggttgttccggattagagccccggattaattcctagccggattacttctctaatttatatagattttgatgagctggaatgaatcctggcttattccggtacaaccgaacaggccctgaaggataccagtaatcgctgagctaaattggcatgctgtcagagtgtcagtattgcagcaaggtagtgagataaccggcatcatggtgccagtttgatggcaccattagggttagagatggtggccatgggcgcatgtcctggccaactttgtatgatatatggcagggtgaataggaaagtaaaattgtattgtaaaaagggatttcttctgtttgttagcgcatgtacaaggaatgcaagttttgagcgagggggcatcaaagatctggctgtgtttccagctgtttttgttagccccatcgaatccttgacataatgatcccgcttaaataagcaacctcgcttgtatagttccttgtgctctaacacacgatgatgataagtcgtaaaatagtggtgtccaaagaatttccaggcccagttgtaaaagctaaaatgctattcgaatttctactagcagtaagtcgtgtttagaaattatttttttatataccttttttccttctatgtacagtaggacacagtgtcagcgccgcgttgacggagaatatttgcaaaaaagtaaaagagaaagtcatagcggcgtatgtgccaaaaacttcgtcacagagagggccataagaaacatggcccacggcccaatacgaagcaccgcgacgaagcccaaacagcagtccgtaggtggagcaaagcgctgggtaatacgcaaacgttttgtcccaccttgactaatcacaagagtggagcgtaccttataaaccgagccgcaagcaccgaattgcaatataaaattaccgatgttttagagctagaaatagcaagttaaaataaggctagtccgttatcaacttgaaaaagtggcaccgagtcggtgctttttttttgcggccgcgaattcctgcagggccctcttgtcggaccagttgcccaccacgttggtgaggggcaactttattatacaaagttgagctaactaactaggttaactcacttaagatgtactcgacaatggtgccctcataccggcatgtgtttcctagaaataatcaatatattgattgagatttatctcgatatatttctgaactatgttcatcatataaataactgaaaacatcaaatcgtaattttaaactcatgcttggtcaatacatagataatacaatattacttcatcatcccaatgatgtcctagcacaacctattgaatgttaatgtttggttgtgtgggggtgtgtttataacatagatgtgattatttgtgctttttgttgagtatatacatatatggtatgttgatttgatatagtgatggacacatgctttggccttggatattcaaatcacttgtacttgcacgaagcaaaacataatataagtttagaagtaaacttgtaactgtgtccaaacatgctcacacaaagtcatatcgcattatatttttttggtaaatattcaacacatgtattttttacaagaacccaaattttacagacaaatgcagcattgtagacatgtagaattctttgaagcatgtgaacttaacaacactaatgtcattaaatcaactggaccctatgagtaacaatttcgatattgcaaacaccaaattatggaacttatttgctgaaaaaattatgatcaatgtgaagtttaaattattataccataaatatatcaaagattttttttgaggaaggtaaaaattgcatggaatgggctgcccaacgtgatagctcacttttatgctaggtagcattaccaaagatgggaatgttctgatgaacaccaaacccactcaaataatatttatatttgggttgtttagttgtaaaagtgaagacccaagattaaagtaccaattgtcgatgccatacactagaagtgaagaatgttgttagcgttaggagtagatgtgtcaatggggaccgatactcgttatcgatgggccgcacgtaagcttgcatgcctgcagtgcagcgtgacccggtcgtgcccctctctagagataatgagcattgcatgtctaagttataaaaaattaccacatattttttttgtcacacttgtttgaagtgcagtttatctatctttatacatatatttaaactttactctacgaataatataatctatagtactacaataatatcagtgttttagagaatcatataaatgaacagttagacatggtctaaaggacaattgagtattttgacaacaggactctacagttttatctttttagtgtgcatgtgttctcctttttttttgcaaatagcttcacctatataatacttcatccattttattagtacatccatttagggtttagggttaatggtttttatagactaatttttttagtacatctattttattctattttagcctctaaattaagaaaactaaaactctattttagtttttttatttaataatttagatataaaatagaataaaataaagtgactaaaaattaaacaaataccctttaagaaattaaaaaaactaaggaaacatttttcttgtttcgagtagataatgccagcctgttaaacgccgtcgacgagtctaacggacaccaaccagcgaaccagcagcgtcgcgtcgggccaagcgaagcagacggcacggcatctctgtcgctgcctctggacccctctcgagagttccgctccaccgttggacttgctccgctgtcggcatccagaaattgcgtggcggagcggcagacgtgagccggcacggcaggcggcctcctcctcctctcacggcaccggcagctacgggggattcctttcccaccgctccttcgctttcccttcctcgcccgccgtaataaatagacaccccctccacaccctctttccccaacctcgtgttgttcggagcgcacacacacacaaccagatctcccccaaatccacccgtcggcacctccgcttcaaggtacgccgctcgtcctcccccccccccctctctaccttctctagatcggcgttccggtccatgcatggttagggcccggtagttctacttctgttcatgtttgtgttagatccgtgtttgtgttagatccgtgctgctagcgttcgtacacggatgcgacctgtacgtcagacacgttctgattgctaacttgccagtgtttctctttggggaatcctgggatggctctagccgttccgcagacgggatcgatttcatgattttttttgtttcgttgcatagggtttggtttgcccttttcctttatttcaatatatgccgtgcacttgtttgtcgggtcatcttttcatgcttttttttgtcttggttgtgatgatgtggtctggttgggcggtcgttctagatcggagtagaattctgtttcaaactacctggtggatttattaattttggatctgtatgtgtgtgccatacatattcatagttacgaattgaagatgatggatggaaatatcgatctaggataggtatacatgttgatgcgggttttactgatgcatatacagagatgctttttgttcgcttggttgtgatgatgtggtgtggttgggcggtcgttcattcgttctagatcggagtagaatactgtttcaaactacctggtgtatttattaattttggaactgtatgtgtgtgtcatacatcttcatagttacgagtttaagatggatggaaatatcgatctaggataggtatacatgttgatgtgggttttactgatgcatatacatgatggcatatgcagcatctattcatatgctctaaccttgagtacctatctattataataaacaagtatgttttataattattttgatcttgatatacttggatgatggcatatgcagcagctatatgtggatttttttagccctgccttcatacgctatttatttgcttggtactgtttcttttgtcgatgctcaccctgttgtttggtgttacttctgcaggtcgactctagaggatccaccatggttgaacaagatggattgcacgcaggttctccggccgcttgggtggagaggctattcggctatgactgggcacaacagacaatcggctgctctgatgccgccgtgttccggctgtcagcgcaggggcgcccggttctttttgtcaagaccgacctgtccggtgccctgaatgaactgcaggacgaggcagcgcggctatcgtggctggccacgacgggcgttccttgcgcagctgtgctcgacgttgtcactgaagcgggaagggactggctgctattgggcgaagtgccggggcaggatctcctgtcatctcaccttgctcctgccgagaaagtatccatcatggctgatgcaatgcggcggctgcatacgcttgatccggctacctgcccattcgaccaccaagcgaaacatcgcatcgagcgagcacgtactcggatggaagccggtcttgtcgatcaggatgatctggacgaagagcatcaggggctcgcgccagccgaactgttcgccaggctcaaggcgcgcatgcccgacggcgatgatctcgtcgtgacccatggcgatgcctgcttgccgaatatcatggtggaaaatggccgcttttctggattcatcgactgtggccggctgggtgtggcggaccgctatcaggacatagcgttggctacccgtgatattgctgaagagcttggcggcgaatgggctgaccgcttcctcgtgctttacggtatcgccgctcccgattcgcagcgcatcgccttctatcgccttcttgacgagttcttctgaggatccaccatggttaacctagacttgtccatcttctggattggccaacttaattaatgtatgaaataaaaggatgcacacatagtgacatgctaatcactataatgtgggcatcaaagttgtgtgttatgtgtaattactagttatctgaataaaagagaaagagatcatccatatttcttatcctaaatgaatgtcacgtgtctttataattctttgatgaaccagatgcatttcattaaccaaatccatatacatataaatattaatcatatataattaatatcaattgggttagcaaaacaaatctagtctaggtgtgttttgcgaatgcgaccttcttatgtgcttctagtctccaaatgtggttgatagttattttgctctaagatcaacagtaatgaagtataaatcatcgttgtggtgtgctactcggttaattgagcattaacacacacaaacatgacgaggatggtataatctccaaaaatgtgtactttgttaggtgggaccctatagccttgattaatgtgctatgttaggcatgcctggaaacgtgtgacgcatatgttttgtgaacctgttgatattatatgtgcttttatattaccatattttattaaaatactaatatttattactagtaagatataacattctatctagcttaaaaactaaccataaatattccataataactagatttaccaaactaatatactaaatatacataataaatacaaaattaacaagacaataatcaatatttatgagcttaatatatttagacattatggttggtcgacgataatcatgctaacttttcgtaattgcttgattgaaatatgcttagaataatgcctctttgttctacatggcaaatagggaccattatggtgtaacaccctgggaaccacaaacaccccgaaatgctactaaactacacaactaaccttcatatataaaatttcgacagcatctcctttgaaaatttgcatagacgtggaagcaacagagtataaacagatatcatgataagaaaacatactagacattaataatctgctagaaatgggaagaatcctaacttgacgactgcgtaactgactagagtcacacttagctgaccctagtcacttactgcccttaaggccaattgttcaagattcattcaacaattgaaacatctcccatgattaaatcagtataaggttgctatggtcttgcttgacaaagtttttttttgagggaatttcaactaaatttttgagtgaaactatcaaatactgattttaaaaaatttttataaaaggaagcgcagagataaaaggccatctatgctacaaaagtacccaaaaatgtaatcctaaagtatgaattgcattttttttttgtttggacgaaaggaaaggagtattaccacaagaatgatatcatcttcatatttagatcttttttgggtaaagcttgagattctctaaatatagagaaatcagaagaaaaaaaaaccgtgttttggtggttttgatttctagcctccacaataactttgacggcgtcgacaagtctaacggacaccaagcagcgaaccaccagcgccgagccaagcgaagcagacggccgagacgttgacaccttcggcgcggcatctctcgagagttccgctccggcgctccacctccaccgctggcggtttcttattccgttccgttccgcctcctgctctgctcctctccacaccacacggcacgaaaccgttacggcaccggcagcacccagcacgggagaggggattcctttcccaccgttccttccctttccgccccgccgctataaatagccagccccatccccagcttttttccccaatctcatctcctctctcctgttgttcggagcacacgcacaatccgatcgatccccaaatccccttcgtctctcctcgcgagcctcgtggatcccagcttcaaggtacggcgatcgatcatcccccctccttctctctaccttcttttctctagactacatcggatggcgatccatggttagggcctgctagtttcccttcctgttttgtcgatggctgcgaggcacaatagatctgatggcgttatgacggctaacttgtcatgttgttgcgatttatagtccctttaggagatcagtttaatttctcggatggttcgagatcggtggtccatggttagtaccctaagatccgcgctgttagggttcgtagatggaggcgacctgttctgattgttaacttgtcagtacctgggaaatcctgggatggttctagctcgtccgcagatgagatcgatttcatgatcctctgtatcttgtttcgttgcctaggttccgtctaatctatccgtggtatgatgtagatgttttgatcgtgctaactacgtcttgtaaagttaattgtcaggtcataatttttagcatgcctttttttttgtttggttttgtctaattgggctgtcgttctagatcagagtagaagactgttccaaactacctgctggatttattgaacttggatctgtatgtgtgtcacatatcttcataaattcatgattaagatggattgaaatatcttttatctttttggtatggatagttctatatgttggtgtggctttgttagatgtatacatgcttagatacatgaagcaacgtgctgctactgtttagtaattgctgttcatttgtctaataaacagataaggatatgtatttatgttgctgttggttttgctggtactttgttggatacaaatgcttcaatacagaaaacagcatgctgctacgatttaccatttatctaatcttatcatatgtctaatctaataaacaaacatgcttttaaattatcttcatatgcttggatgatggcatacacagcggctatgtgtggttttttaaatacccagcatcatgggcatgcatgacactgctttaatatgctttttatttgcttgagactgtttcttttgtttatactgaccctttagttcggtgactcttctgcaggtcgactttaacttagcctaggatccatggcccagtccaagcacggcctgaccaaggagatgaccatgaagtaccgcatggagggctgcgtggacggccacaagttcgtgatcaccggcgagggcatcggctaccccttcaagggcaagcaggccatcaacctgtgcgtggtggagggcggccccttgcccttcgccgaggacatcttgtccgccgccttcatgtacggcaaccgcgtgttcaccgagtacccccaggacatcgtcgactacttcaagaactcctgccccgccggctacacctgggaccgctccttcctgttcgaggacggcgccgtgtgcatctgcaacgccgacatcaccgtgagcgtggaggagaactgcatgtaccacgagtccaagttctacggcgtgaacttccccgccgacggccccgtgatgaagaagatgaccgacaactgggagccctcctgcgagaagatcatccccgtgcccaagcagggcatcttgaagggcgacgtgagcatgtacctgctgctgaaggacggtggccgcttgcgctgccagttcgacaccgtgtacaaggccaagtccgtgccccgcaagatgcccgactggcacttcatccagcacaagctgacccgcgaggaccgcagcgacgccaagaaccagaagtggcacctgaccgagcacgccatcgcctccggctccgccttgccctccggactcagatctcgatagggtaccaatggccagttaacagatccagctgctgctgttctagggttcacaagtctgcctatttgtcttccccaatggagctatggttgtctggtctggtccttggtcgtgtcccgtttcattgtgtactatttacctgtaatgtgtatccttaagtctggtttgatggtgtctgaaacgttttgctgtggtagagcagcatggaagaactataatgaataagtgatccctaatcattgtgtccaaattttgcttctgctatacccttttgtgctgtttcttatgttttgcttaaaaatttgatctgacaaacaaatttgtctaaattatgctcttgttctgactgtgtactgtacacatttgtattgctaccggtttggcacatagttttctctttgattgcagatcaaacccttctgattgcagattgcttggctatggctgatgtgctcactgttcttctttagcttgtatattgctgatggtggcttggctacggctgaaaaagttgctgctgcgccgacttggcaactgttgctccagtaatgctttgtcctctcttcctagccgccgacttggcacttggcagctgttgctcctgtaatgcgttgttatctcttatctcttgagatgtactatgattttgaggctgtttgacttgtgccagattgccagtgctgatgctatattatctcaggtttttatgctagtatatgttttactgtgtgctgcctgtgtcgagttacgtaatctattgaaccgctatgcgtgttgatgccctgttgttgcttgccagattgatgcccctgttgcttgcagcttgcaagctgtagtgaaatcctaaaattcgaaaccaaatctattctgaacttttgaagatctgtgatgtccggaagaaaagattaaaacagataaacgggactctccagaatctataaaataaatgatcgacaaacgctttgctttggtaggcttcctagttagttagcggaccgaagcttcggttgtttctgtggccgaattcaatcactagagtcgacctgcatgattccgatgacttcgtaggttcctagctcaagccgctcgtgtccaagcgtcacttacgattagctaatgattacggcatctaggaccgactagctagctagctaagagctcggtaccgagctcgaattcattccgattaatcgtggcctcttgctcttcaggatgaagagctatgtttaaacgtgcaagcgctactagacaattcagtacattaaaaacgtccgcaatgtgttattaagttgtctaagcgtcaatttgtttacaccacaatatatcctgcca

SEQ ID NO: 92 - DNA, 5488 bp, synthetic construct
  misc_feature 1..5488: note = PHP8418-0004
  source 1..5488: mol_type = other DNA
ggaagttcctattccgaagttcctattctctagaaagtataggaacttcagatccaccgggatccccgatcatgcaaaaactcattaactcagtgcaaaactatgcctggggcagcaaaacggcgttgactgaactttatggtatggaaaatccgtccagccagccgatggccgagctgtggatgggcgcacatccgaaaagcagttcacgagtgcagaatgccgccggagatatcgtttcactgcgtgatgtgattgagagtgataaatcgactctgctcggagaggccgttgccaaacgctttggcgaactgcctttcctgttcaaagtattatgcgcagcacagccactctccattcaggttcatccaaacaaacacaattctgaaatcggttttgccaaagaaaatgccgcaggtatcccgatggatgccgccgagcgtaactataaagatcctaaccacaagccggagctggtttttgcgctgacgcctttccttgcgatgaacgcgtttcgtgaattttccgagattgtctccctactccagccggtcgcaggtgcacatccggcgattgctcactttttacaacagcctgatgccgaacgtttaagcgaactgttcgccagcctgttgaatatgcagggtgaagaaaaatcccgcgcgctggcgattttaaaatcggccctcgatagccagcagggtgaaccgtggcaaacgattcgtttaatttctgaattttacccggaagacagcggtctgttctccccgctattgctgaatgtggtgaaattgaaccctggcgaagcgatgttcctgttcgctgaaacaccgcacgcttacctgcaaggcgtggcgctggaagtgatggcaaactccgataacgtgctgcgtgcgggtctgacgcctaaatacattgatattccggaactggttgccaatgtgaaattcgaagccaaaccggctaaccagttgttgacccagccggtgaaacaaggtgcagaactggacttcccgattccagtggatgattttgccttctcgctgcatgaccttagtgataaagaaaccaccattagccagcagagtgccgccattttgttctgcgtcgaaggcgatgcaacgttgtggaaaggttctcagcagttacagcttaaaccgggtgaatcagcgtttattgccgccaacgaatcaccggtgactgtcaaaggccacggccgtttagcgcgtgtttacaacaagctgtaagagcttactgaaaaaattaacatctcttgctaagctgggggtggaacctagacttgtccatcttctggattggccaacttaattaatgtatgaaataaaaggatgcacacatagtgacatgctaatcactataatgtgggcatcaaagttgtgtgttatgtgtaattactagttatctgaataaaagagaaagagatcatccatatttcttatcctaaatgaatgtcacgtgtctttataattctttgatgaaccagatgcatttcattaaccaaatccatatacatataaatattaatcatatataattaatatcaattgggttagcaaaacaaatctagtctaggtgtgttttgcgaatgcgaccttcttatgtgcttctagtctccaaatgtggttgatagttattttgctctaagatcaacagtaatgaagtataaatcatcgttgtggtgtgctactcggttaattgagcattaacacacacaaacatgacgaggatggtataatctccaaaaatgtgtactttgttaggtgggaccctatagccttgattaatgtgctatgttaggcatgcctggaaacgtgtgacgcatatgttttgtgaacctgttgatattatatgtgcttttatattaccatattttattaaaatactaatatttattactagtaagatataacattctatctagcttaaaaactaaccataaatattccataataactagatttaccaaactaatatactaaatatacataataaatacaaaattaacaagacaataatcaatatttatgagcttaatatatttagacattatggttggtcgacgataatcatgctaacttttcgtaattgcttgattgaaatatgcttagaataatgcctctttgttctacatggcaaatagggaccattatggtgtaacaccctgggaaccacaaacaccccgaaatgctactaaactacacaactaaccttcatatataaaatttcgacagcatctcctttgaaaatttgcatagacgtggaagcaacagagtataaacagatatcatgataagaaaacatactagacattaataatctgctagaaatgggaagaatccctgcagtgcagcgtgacccggtcgtgcccctctctagagataatgagcattgcatgtctaagttataaaaaattaccacatattttttttgtcacacttgtttgaagtgcagtttatctatctttatacatatatttaaactttactctacgaataatataatctatagtactacaataatatcagtgttttagagaatcatataaatgaacagttagacatggtctaaaggacaattgagtattttgacaacaggactctacagttttatctttttagtgtgcatgtgttctcctttttttttgcaaatagcttcacctatataatacttcatccattttattagtacatccatttagggtttagggttaatggtttttatagactaatttttttagtacatctattttattctattttagcctctaaattaagaaaactaaaactctattttagtttttttatttaataatttagatataaaatagaataaaataaagtgactaaaaattaaacaaataccctttaagaaattaaaaaaactaaggaaacatttttcttgtttcgagtagataatgccagcctgttaaacgccgtcgacgagtctaacggacaccaaccagcgaaccagcagcgtcgcgtcgggccaagcgaagcagacggcacggcatctctgtcgctgcctctggacccctctcgagagttccgctccaccgttggacttgctccgctgtcggcatccagaaattgcgtggcggagcggcagacgtgagccggcacggcaggcggcctcctcctcctctcacggcaccggcagctacgggggattcctttcccaccgctccttcgctttcccttcctcgcccgccgtaataaatagacaccccctccacaccctctttccccaacctcgtgttgttcggagcgcacacacacacaaccagatctcccccaaatccacccgtcggcacctccgcttcaaggtacgccgctcgtcctcccccccccccctctctaccttctctagatcggcgttccggtccatgcatggttagggcccggtagttctacttctgttcatgtttgtgttagatccgtgtttgtgttagatccgtgctgctagcgttcgtacacggatgcgacctgtacgtcagacacgttctgattgctaacttgccagtgtttctctttggggaatcctgggatggctctagccgttccgcagacgggatcgatttcatgattttttttgtttcgttgcatagggtttggtttgcccttttcctttatttcaatatatgccgtgcacttgtttgtcgggtcatcttttcatgcttttttttgtcttggttgtgatgatgtggtctggttgggcggtcgttctagatcggagtagaattctgtttcaaactacctggtggatttattaattttggatctgtatgtgtgtgccatacatattcatagttacgaattgaagatgatggatggaaatatcgatctaggataggtatacatgttgatgcgggttttactgatgcatatacagagatgctttttgttcgcttggttgtgatgatgtggtgtggttgggcggtcgttcattcgttctagatcggagtagaatactgtttcaaactacctggtgtatttattaattttggaactgtatgtgtgtgtcatacatcttcatagttacgagtttaagatggatggaaatatcgatctaggataggtatacatgttgatgtgggttttactgatgcatatacatgatggcatatgcagcatctattcatatgctctaaccttgagtacctatctattataataaacaagtatgttttataattattttgatcttgatatacttggatgatggcatatgcagcagctatatgtggatttttttagccctgccttcatacgctatttatttgcttggtactgtttcttttgtcgatgctcaccctgttgtttggtgttacttctgcaggtcgactttaacttagcctaggatccaccggtcgccaccatggcctcctccgagaacgtcatcaccgagttcatgcgcttcaaggtgcgcatggagggcaccgtgaacggccacgagttcgagatcgagggcgagggcgagggccgcccctacgagggccacaacaccgtgaagctgaaggtgacgaagggcggccccctgcccttcgcctgggacatcctgtccccccagttccagtacggctccaaggtgtacgtgaagcaccccgccgacatccccgactacaagaagctgtccttccccgagggcttcaagtgggagcgcgtgatgaacttcgaggacggcggcgtggcgaccgtgacccaggactcctccctgcaggacggctgcttcatctacaaggtgaagttcatcggcgtgaacttcccctccgacggccccgtgatgcagaagaagaccatgggctgggaggcctccaccgagcgcctgtacccccgcgacggcgtgctgaagggcgagacccacaaggccctgaagctgaaggacggcggccactacctggtggagttcaagtccatctacatggccaagaagcccgtgcagctgcccggctactactacgtggacgccaagctggacatcacctcccacaacgaggactacaccatcgtggagcagtacgagcgcaccgagggccgccaccacctgttcctgtagcggcccatggatattcgaacgcgtaggtaccacatggttaacctagacttgtccatcttctggattggccaacttaattaatgtatgaaataaaaggatgcacacatagtgacatgctaatcactataatgtgggcatcaaagttgtgtgttatgtgtaattactagttatctgaataaaagagaaagagatcatccatatttcttatcctaaatgaatgtcacgtgtctttataattctttgatgaaccagatgcatttcattaaccaaatccatatacatataaatattaatcatatataattaatatcaattgggttagcaaaacaaatctagtctaggtgtgttttgcgaatacgaagttcctattccgaagttcctattcttcaaaaagtataggaacttctgtacacca

SEQ ID NO: 93 - DNA, 18124 bp, synthetic construct
  misc_feature 1..18124: note = PHP54733
  source 1..18124: mol_type = other DNA
gtttacccgccaatatatcctgtcaaacactgatagtttaaactgaaggcgggaaacgacaatctgatcatgagcggagaattaagggagtcacgttatgacccccgccgatgacgcgggacaagccgttttacgtttggaactgacagaaccgcaacgttgaaggagccactcagcaagctggtacgattgtaatacgactcactatagggcgaattgagcgctgtttaaacgctcttcaactggaagagcggttactaccggctggatggcggggccttgatcgtgcaccgccggcgtccggactaactaactagtcgagctagttaccctatgaggtgacatgaagcgctcacggttactatgacggttagcttcacgactgttggtggcagtagcgtacgacttagctatagttccggacttacccttaagataacttcgtatagcatacattatacgaagttatgggcccaccggttacgtaacgcgtctatagtattttaaaattgcattaacaaacatgtcctaattggtactcctgagatactataccctcctgttttaaaatagttggcattatcgaattatcattttactttttaatgttttctcttcttttaatatattttatgaattttaatgtattttaaaatgttatgcagttcgctctggacttttctgctgcgcctacacttgggtgtactgggcctaaattcagcctgaccgaccgcctgcattgaataatggatgagcaccggtaaaatccgcgtacccaactttcgagaagaaccgagacgtggcgggccgggccaccgacgcacggcaccagcgactgcacacgtcccgccggcgtacgtgtacgtgctgttccctcactggccgcccaatccactcatgcatgcccacgtacacccctgccgtggcgcgcccagatcctaatcctttcgccgttctgcacttctgctgcctataaatggcggcatcgaccgtcacctgcttcaccaccggcgagccacatcgagaacacgatcgagcacacaagcacgaagactcgtttaggagaaaccacaaaccaccaagccgtgcaagcaccaggcttgggcacccgctccgggcttagaaggccagcttcaagtttgtacaaaaaagcaggcttcgaaggagatagaaccgatccaccatgtccaacctgctcacggttcaccagaaccttccggctcttccagtggacgcgacgtccgatgaagtcaggaagaacctcatggacatgttccgcgacaggcaagcgttcagcgagcacacctggaagatgctgctctccgtctgccgctcctgggctgcatggtgcaagctgaacaacaggaagtggttccccgctgagcccgaggacgtgagggattaccttctgtacctgcaagcgcgaggtttgtttctgcttctacctttgatatatatataataattatcattaattagtagtaatataatatttcaaatatttttttcaaaataaaagaatgtagtatatagcaattgcttttctgtagtttataagtgtgtatattttaatttataacttttctaatatatgaccaaaacatggtgatgcctaggtctggcagtgaagaccatccagcaacaccttggacaactgaacatgcttcacaggcgctccggcctcccgcgccccagcgactcgaacgccgtgagcctcgtcatgcgccgcatcaggaaggaaaacgtcgatgccggcgaaagggcaaagcaggccctcgcgttcgagaggaccgatttcgaccaggtccgcagcctgatggagaacagcgacaggtgccaggacattaggaacctggcgttcctcggaattgcatacaacacgctcctcaggatcgcggaaattgcccgcattcgcgtgaaggacattagccgcaccgacggcggcaggatgcttatccacattggcaggaccaagacgctcgtttccaccgcaggcgtcgaaaaggccctcagcctcggagtgaccaagctcgtcgaacgctggatctccgtgtccggcgtcgcggacgacccaaacaactacctcttctgccgcgtccgcaagaacggggtggctgcccctagcgccaccagccaactcagcacgagggccttggaaggtattttcgaggccacccaccgcctgatctacggcgcgaaggatgacagcggtcaacgctacctcgcatggtccgggcactccgcccgcgttggagctgctagggacatggcccgcgccggtgtttccatccccgaaatcatgcaggcgggtggatggacgaacgtgaacattgtcatgaactacattcgcaaccttgacagcgagacgggcgcaatggttcgcctcctggaagatggtgactgagctagacccagctttcttgtacaaagtggccgttaacggatgcagacttgtccatcttctggattggccaacttaattaatgtatgaaataaaaggatgcacacatagtgacatgctaatcactataatgtgggcatcaaagttgtgtgttatgtgtaattactagttatctgaataaaagagaaagagatcatccatatttcttatcctaaatgaatgtcacgtgtctttataattctttgatgaaccagatgcatttcattaaccaaatccatatacatataaatattaatcatatataattaatatcaattgggttagcaaaacaaatctagtctaggtgtgttttgcgaattgcggcaaggttgcgcccgccccagcttggtcagccgctccgggcttagaaggccgatctcgcgggcacccagctttcttctacaaagtggccgtttacggatcggctagaatgtcccgcaccggcttaccgatttgcacctcgctaccctgggttcgaccgaagctgaccgatgcttgcgcccgctcgcgaggccggccacactgatagtttaaactgaaggcgggaaacgacaatctgatcatgagcggagaattaagggagtcacgttatgacccccgccgatgacgcgggacaagccgttttacgtttggaactgacagaaccgcaacgattgaaggagccactcagccgcgggtttctggagtttaatgagctaagcacatacgtcagaaaccattattgcgcgttcaaaagtcgcctaaggtcactatcagctagcaaatatttcttgtcaaaaatgctccactgacgttccataaattcccctcggtatccaattagagtctcatattcactctcccggcggatctcgactctagaggatcgctcaggaaggccgctgagatagagccatggcggccaatgcgggcggcggtggagcgggaggaggcagcggcagcggcagcgtggctgcgccggcggtgtgccgccccagcggctcgcggtggacgccgacgccggagcagatcaggatgctgaaggagctctactacggctgcggcatccggtcgcccagctcggagcagatccagcgcatcaccgccatgctgcggcagcacggcaagatcgagggcaagaacgtcttctactggttccagaaccacaaggcccgcgagcgccagaagcgccgcctcaccagcctcgacgtcaacgtgcccgccgccggcgcggccgacgccaccaccagccaactcggcgtcctctcgctgtcgtcgccgccgccttcaggcgcggcgcctccctcgcccaccctcggcttctacgccgccggcaatggcggcggatcggctgtgctgctggacacgagttccgactggggcagcagcggcgctgctatggccaccgagacatgcttcctgcaggactacatgggcgtgacggacacgggcagctcgtcgcagtggccacgcttctcgtcgtcggacacgataatggcggcggccgcggcgcgggcggcgacgacgcgggcgcccgagacgctccctctcttcccgacctgcggcgacgacggcggcagcggtagcagcagctacttgccgttctggggtgccgcgtccacaactgccggcgccacttcttccgttgcgatccaacagcaacaccagctgcaggagcagtacagcttttacagcaacagcaacagcacccagctggccggcaccggcaaccaagacgtatcggcaacagcagcagcagccgccgccctggagctgagcctcagctcatggtgctccccttaccctgctgcagggagtatgtgagagcaacgcgagctgccactgctcttcactgatgtctctggaatggaaggaggaggaagtgagcatagcgttggtgcgttgctgtcaagggcgaattgtaccacatggttaacctagacttgtccatcttctggattggccaacttaattaatgtatgaaataaaaggatgcacacatagtgacatgctaatcactataatgtgggcatcaaagttgtgtgttatgtgtaattactagttatctgaataaaagagaaagagatcatccatatttcttatcctaaatgaatgtcacgtgtctttataattctttgatgaaccagatgcatttcattaaccaaatccatatacatataaatattaatcatatataattaatatcaattgggttagcaaaacaaatctagtctaggtgtgttttgcgggtaccatttaaattgcgcccgccacggccgtggaggtcgtattccggtcagcttgcatccctgcagtgcagcgtgacccggtcgtgcccctctctagagataatgagcattgcatgtctaagttataaaaaattaccacatattttttttgtcacacttgtttgaagtgcagtttatctatctttatacatatatttaaactttactctacgaataatataatctatagtactacaataatatcagtgttttagagaatcatataaatgaacagttagacatggtctaaaggacaattgagtattttgacaacaggactctacagttttatctttttagtgtgcatgtgttctcctttttttttgcaaatagcttcacctatataatacttcatccattttattagtacatccatttagggtttagggttaatggtttttatagactaatttttttagtacatctattttattctattttagcctctaaattaagaaaactaaaactctattttagtttttttatttaataatttagatataaaatagaataaaataaagtgactaaaaattaaacaaataccctttaagaaattaaaaaaactaaggaaacatttttcttgtttcgagtagataatgccagcctgttaaacgccgtcgacgagtctaacggacaccaaccagcgaaccagcagcgtcgcgtcgggccaagcgaagcagacggcacggcatctctgtcgctgcctctggacccctctcgagagttccgctccaccgttggacttgctccgctgtcggcatccagaaattgcgtggcggagcggcagacgtgagccggcacggcaggcggcctcctcctcctctcacggcaccggcagctacgggggattcctttcccaccgctccttcgctttcccttcctcgcccgccgtaataaatagacaccccctccacaccctctttccccaacctcgtgttgttcggagcgcacacacacacaaccagatctcccccaaatccacccgtcggcacctccgcttcaaggtacgccgctcgtcctcccccccccccctctctaccttctctagatcggcgttccggtccatgcatggttagggcccggtagttctacttctgttcatgtttgtgttagatccgtgtttgtgttagatccgtgctgctagcgttcgtacacggatgcgacctgtacgtcagacacgttctgattgctaacttgccagtgtttctctttggggaatcctgggatggctctagccgttccgcagacgggatcgatttcatgattttttttgtttcgttgcatagggtttggtttgcccttttcctttatttcaatatatgccgtgcacttgtttgtcgggtcatcttttcatgcttttttttgtcttggttgtgatgatgtggtctggttgggcggtcgttctagatcggagtagaattctgtttcaaactacctggtggatttattaattttggatctgtatgtgtgtgccatacatattcatagttacgaattgaagatgatggatggaaatatcgatctaggataggtatacatgttgatgcgggttttactgatgcatatacagagatgctttttgttcgcttggttgtgatgatgtggtgtggttgggcggtcgttcattcgttctagatcggagtagaatactgtttcaaactacctggtgtatttattaattttggaactgtatgtgtgtgtcatacatcttcatagttacgagtttaagatggatggaaatatcgatctaggataggtatacatgttgatgtgggttttactgatgcatatacatgatggcatatgcagcatctattcatatgctctaaccttgagtacctatctattataataaacaagtatgttttataattattttgatcttgatatacttggatgatggcatatgcagcagctatatgtggatttttttagccctgccttcatacgctatttatttgcttggtactgtttcttttgtcgatgctcaccctgttgtttggtgttacttctgcaggtcgactctagaggatccatggccactgtgaacaactggctcgctttctccctctccccgcaggagctgccgccctcccagacgacggactccacactcatctcggccgccaccgccgaccatgtctccggcgatgtctgcttcaacatcccccaagattggagcatgaggggatcagagctttcggcgctcgtcgcggagccgaagctggaggacttcctcggcggcatctccttctccgagcagcatcacaaggccaactgcaacatgatacccagcactagcagcacagtttgctacgcgagctcaggtgctagcaccggctaccatcaccagctgtaccaccagcccaccagctcagcgctccacttcgcggactccgtaatggtggcttcctcggccggtgtccacgacggcggtgccatgctcagcgcggccgccgctaacggtgtcgctggcgctgccagtgccaacggcggcggcatcgggctgtccatgattaagaactggctgcggagccaaccggcgcccatgcagccgagggtggcggcggctgagggcgcgcaggggctctctttgtccatgaacatggcggggacgacccaaggcgctgctggcatgccacttctcgctggagagcgcgcacgggcgcccgagagtgtatcgacgtcagcacagggtggagccgtcgtcgtcacggcgccgaaggaggatagcggtggcagcggtgttgccggcgctctagtagccgtgagcacggacacgggtggcagcggcggcgcgtcggctgacaacacggcaaggaagacggtggacacgttcgggcagcgcacgtcgatttaccgtggcgtgacaaggcatagatggactgggagatatgaggcacatctttgggataacagttgcagaagggaagggcaaactcgtaagggtcgtcaagtctatttaggtggctatgataaagaggagaaagctgctagggcttatgatcttgctgctctgaagtactggggtgccacaacaacaacaaattttccagtgagtaactacgaaaaggagctcgaggacatgaagcacatgacaaggcaggagtttgtagcgtctctgagaaggaagagcagtggtttctccagaggtgcatccatttacaggggagtgactaggcatcaccaacatggaagatggcaagcacggattggacgagttgcagggaacaaggatctttacttgggcaccttcagcacccaggaggaggcagcggaggcgtacgacatcgcggcgatcaagttccgcggcctcaacgccgtcaccaacttcgacatgagccgctacgacgtgaagagcatcctggacagcagcgccctccccatcggcagcgccgccaagcgcctcaaggaggccgaggccgcagcgtccgcgcagcaccaccacgccggcgtggtgagctacgacgtcggccgcatcgcctcgcagctcggcgacggcggagccctggcggcggcgtacggcgcgcactaccacggcgccgcctggccgaccatcgcgttccagccgggcgccgccagcacaggcctgtaccacccgtacgcgcagcagccaatgcgcggcggcgggtggtgcaagcaggagcaggaccacgcggtgatcgcggccgcgcacagcctgcaggacctccaccacctgaacctgggcgcggccggcgcgcacgactttttctcggcagggcagcaggccgccgccgctgcgatgcacggcctgggtagcatcgacagtgcgtcgctcgagcacagcaccggctccaactccgtcgtctacaacggcggggtcggcgacagcaacggcgccagcgccgtcggcggcagtggcggtggctacatgatgccgatgagcgctgccggagcaaccactacatcggcaatggtgagccacgagcaggtgcatgcacgggcctacgacgaagccaagcaggctgctcagatggggtacgagagctacctggtgaacgcggagaacaatggtggcggaaggatgtctgcatgggggactgtcgtgtctgcagccgcggcggcagcagcaagcagcaacgacaacatggccgccgacgtcgggcatggcggcgcgcagctcttcagtgtctggaacgacacttaagcgtacgtgccggcctggctctccgaaagggcgtattccagcacactggcggccgttactagacccaacctagacttgtccatcttctggattggccaacttaattaatgtatgaaataaaaggatgcacacatagtgacatgctaatcactataatgtgggcatcaaagttgtgtgttatgtgtaattactagttatctgaataaaagagaaagagatcatccatatttcttatcctaaatgaatgtcacgtgtctttataattctttgatgaaccagatgcatttcattaaccaaatccatatacatataaatattaatcatatataattaatatcaattgggttagcaaaacaaatctagtctaggtgtgttttgcgaatgcggcctccggatacgtaataacttcgtatagcatacattatacgaagttatacctggagctcgtttaaacgctcttcaactggaagagcggttaccagagctggtcacctttgtccaccaagatggaactggcgcgcctcattaattaagtcagcggccgctctagttgaagacacgttcatgtcttcatcgtaagaagacactcagtagtcttcggccagaatggccatctggattcagcaggcctagaaggccatttaaatcctgaggatctggtcttcctaaggacccgggatatcgctatcaactttgtatagaaaagttgggccgaattcgagctcggtacggccagaatggcccggaccgaagcttgcatgcctgcagtgcagcgtgacccggtcgtgcccctctctagagataatgagcattgcatgtctaagttataaaaaattaccacatattttttttgtcacacttgtttgaagtgcagtttatctatctttatacatatatttaaactttactctacgaataatataatctatagtactacaataatatcagtgttttagagaatcatataaatgaacagttagacatggtctaaaggacaattgagtattttgacaacaggactctacagttttatctttttagtgtgcatgtgttctcctttttttttgcaaatagcttcacctatataatacttcatccattttattagtacatccatttagggtttagggttaatggtttttatagactaatttttttagtacatctattttattctattttagcctctaaattaagaaaactaaaactctattttagtttttttatttaataatttagatataaaatagaataaaataaagtgactaaaaattaaacaaataccctttaagaaattaaaaaaactaaggaaacatttttcttgtttcgagtagataatgccagcctgttaaacgccgtcgacgagtctaacggacaccaaccagcgaaccagcagcgtcgcgtcgggccaagcgaagcagacggcacggcatctctgtcgctgcctctggacccctctcgagagttccgctccaccgttggacttgctccgctgtcggcatccagaaattgcgtggcggagcggcagacgtgagccggcacggcaggcggcctcctcctcctctcacggcaccggcagctacgggggattcctttcccaccgctccttcgctttcccttcctcgcccgccgtaataaatagacaccccctccacaccctctttccccaacctcgtgttgttcggagcgcacacacacacaaccagatctcccccaaatccacccgtcggcacctccgcttcaaggtacgccgctcgtcctcccccccccccctctctaccttctctagatcggcgttccggtccatgcatggttagggcccggtagttctacttctgttcatgtttgtgttagatccgtgtttgtgttagatccgtgctgctagcgttcgtacacggatgcgacctgtacgtcagacacgttctgattgctaacttgccagtgtttctctttggggaatcctgggatggctctagccgttccgcagacgggatcgatttcatgattttttttgtttcgttgcatagggtttggtttgcccttttcctttatttcaatatatgccgtgcacttgtttgtcgggtcatcttttcatgcttttttttgtcttggttgtgatgatgtggtctggttgggcggtcgttctagatcggagtagaattctgtttcaaactacctggtggatttattaattttggatctgtatgtgtgtgccatacatattcatagttacgaattgaagatgatggatggaaatatcgatctaggataggtatacatgttgatgcgggttttactgatgcatatacagagatgctttttgttcgcttggttgtgatgatgtggtgtggttgggcggtcgttcattcgttctagatcggagtagaatactgtttcaaactacctggtgtatttattaattttggaactgtatgtgtgtgtcatacatcttcatagttacgagtttaagatggatggaaatatcgatctaggataggtatacatgttgatgtgggttttactgatgcatatacatgatggcatatgcagcatctattcatatgctctaaccttgagtacctatctattataataaacaagtatgttttataattattttgatcttgatatacttggatgatggcatatgcagcagctatatgtggatttttttagccctgccttcatacgctatttatttgcttggtactgtttcttttgtcgatgctcaccctgttgtttggtgttacttctgcaggtcgactctagaggatccatggcccagtccaagcacggcctgaccaaggagatgaccatgaagtaccgcatggagggctgcgtggacggccacaagttcgtgatcaccggcgagggcatcggctaccccttcaagggcaagcaggccatcaacctgtgcgtggtggagggcggccccttgcccttcgccgaggacatcttgtccgccgccttcatgtacggcaaccgcgtgttcaccgagtacccccaggacatcgtcgactacttcaagaactcctgccccgccggctacacctgggaccgctccttcctgttcgaggacggcgccgtgtgcatctgcaacgccgacatcaccgtgagcgtggaggagaactgcatgtaccacgagtccaagttctacggcgtgaacttccccgccgacggccccgtgatgaagaagatgaccgacaactgggagccctcctgcgagaagatcatccccgtgcccaagcagggcatcttgaagggcgacgtgagcatgtacctgctgctgaaggacggtggccgcttgcgctgccagttcgacaccgtgtacaaggccaagtccgtgccccgcaagatgcccgactggcacttcatccagcacaagctgacccgcgaggaccgcagcgacgccaagaaccagaagtggcacctgaccgagcacgccatcgcctccggctccgccttgccctccggactcagatctcgatagagtcaacctagacttgtccatcttctggattggccaacttaattaatgtatgaaataaaaggatgcacacatagtgacatgctaatcactataatgtgggcatcaaagttgtgtgttatgtgtaattactagttatctgaataaaagagaaagagatcatccatatttcttatcctaaatgaatgtcacgtgtctttataattctttgatgaaccagatgcatttcattaaccaaatccatatacatataaatattaatcatatataattaatatcaattgggttagcaaaacaaatctagtctaggtgtgttttgcgaattgcggcaagcttgtttttctcagacagttttctaaaaaaagggcgtttctggggaagttcgagatggttcgtaaggtgttactggctcctgtgaaccaatacatgatactgccatgataagggttataattagtcaagcagagtaagaagaaacaacagtagcagtgactccgattcctgaagatgagtcatatttgtcttgtgctcctgctgtatgaaatggatcgcatgtgtatattcgtcgccgcgccgcactggtgtaacctgttgcctcagagtttgcttttagctggttctgttttaaaaataagtactgttttttggttggctgcaagccattctgaacttcagtttaccaattgtttttatgttgtggttgaatattttaattttttatttaatgtttggttctttttttatatatatttgcaaaaatgatacaagtggtcaagttttcatatagtatgggctctatttcctagagctctacctctaggaacgaattttgtggaggttttcttttggctagttaggcaaagtccccatatcttgcaggctaaatcaagaagaagctctgtcaaacagttttttttactgaaaagtgattaaagagtagtttctcctagatcacttcagagtttatcctagagaatcatgggaatcaaattcagttagaggatcatttcttacaaagaatcaactttcgtagagaatctaaagcagaaagagctttgacaaacttacccttagagcaattccaacattctcgcgtgagtttcttcgcgccgttgttttgcggtgacttcatctggacgtcccgcgacatagagacgcttgtattgatcatgagagcttgtgtggtcatacacaatataattgttaaagatgaaagagatgtggaccttaatgagcgattcgactttgatggtgaaaatgtgcaaccttctcatggtatttctactcgcacactagctgaatttattgaagctcataaaaagatccgagacaaagaaatacattttcaattgaaagaagacctaatcaagcacttatggaagcttggtcacccggtccgggcctagaaggccagcttcaagtttgtacaaaaaagcaggctccggccagaatggcccggaccgggttaccgaattcgagctcggtaccctgggatccgatatcgatgggccctggccgaagcttggtcacccggtccgggcctagaaggccgatctcccgggcacccagctttcttgtacaaagtggccgttaacggatcggccagaatggcccggaccgggttaccctgcccttaaggccaattgttcaagattcattcaacaattgaaacatctcccatgattaaatcagtataaggttgctatggtcttgcttgacaaagtttttttttgagggaatttcaactaaatttttgagtgaaactatcaaatactgattttaaaaaatttttataaaaggaagcgcagagataaaaggccatctatgctacaaaagtacccaaaaatgtaatcctaaagtatgaattgcattttttttttgtttggacgaaaggaaaggagtattaccacaagaatgatatcatcttcatatttagatcttttttgggtaaagcttgagattctctaaatatagagaaatcagaagaaaaaaaaaccgtgttttggtggttttgatttctagcctccacaataactttgacggcgtcgacaagtctaacggacaccaagcagcgaaccaccagcgccgagccaagcgaagcagacggccgagacgttgacaccttcggcgcggcatctctcgagagttccgctccggcgctccacctccaccgctggcggtttcttattccgttccgttccgcctcctgctctgctcctctccacaccacacggcacgaaaccgttacggcaccggcagcacccagcacgggagaggggattcctttcccaccgttccttccctttccgccccgccgctataaatagccagccccatccccagcttttttccccaatctcatctcctctctcctgttgttcggagcacacgcacaatccgatcgatccccaaatccccttcgtctctcctcgcgagcctcgtggatcccagcttcaaggtacggcgatcgatcatcccccctccttctctctaccttcttttctctagactacatcggatggcgatccatggttagggcctgctagtttcccttcctgttttgtcgatggctgcgaggcacaatagatctgatggcgttatgacggctaacttgtcatgttgttgcgatttatagtccctttaggagatcagtttaatttctcggatggttcgagatcggtggtccatggttagtaccctaagatccgcgctgttagggttcgtagatggaggcgacctgttctgattgttaacttgtcagtacctgggaaatcctgggatggttctagctcgtccgcagatgagatcgatttcatgatcctctgtatcttgtttcgttgcctaggttccgtctaatctatccgtggtatgatgtagatgttttgatcgtgctaactacgtcttgtaaagttaattgtcaggtcataatttttagcatgcctttttttttgtttggttttgtctaattgggctgtcgttctagatcagagtagaagactgttccaaactacctgctggatttattgaacttggatctgtatgtgtgtcacatatcttcataaattcatgattaagatggattgaaatatcttttatctttttggtatggatagttctatatgttggtgtggctttgttagatgtatacatgcttagatacatgaagcaacgtgctgctactgtttagtaattgctgttcatttgtctaataaacagataaggatatgtatttatgttgctgttggttttgctggtactttgttggatacaaatgcttcaatacagaaaacagcatgctgctacgatttaccatttatctaatcttatcatatgtctaatctaataaacaaacatgcttttaaattatcttcatatgcttggatgatggcatacacagcggctatgtgtggttttttaaatacccagcatcatgggcatgcatgacactgctttaatatgctttttatttgcttgagactgtttcttttgtttatactgaccctttagttcggtgactcttctgcaggtcgactttaacttagcctaggatccatgcaaaaactcattaactcagtgcaaaactatgcctggggcagcaaaacggcgttgactgaactttatggtatggaaaatccgtccagccagccgatggccgagctgtggatgggcgcacatccgaaaagcagttcacgagtgcagaatgccgccggagatatcgtttcactgcgtgatgtgattgagagtgataaatcgactctgctcggagaggccgttgccaaacgctttggcgaactgcctttcctgttcaaagtattatgcgcagcacagccactctccattcaggttcatccaaacaaacacaattctgaaatcggttttgccaaagaaaatgccgcaggtatcccgatggatgccgccgagcgtaactataaagatcctaaccacaagccggagctggtttttgcgctgacgcctttccttgcgatgaacgcgtttcgtgaattttccgagattgtctccctactccagccggtcgcaggtgcacatccggcgattgctcactttttacaacagcctgatgccgaacgtttaagcgaactgttcgccagcctgttgaatatgcagggtgaagaaaaatcccgcgcgctggcgattttaaaatcggccctcgatagccagcagggtgaaccgtggcaaacgattcgtttaatttctgaattttacccggaagacagcggtctgttctccccgctattgctgaatgtggtgaaattgaaccctggcgaagcgatgttcctgttcgctgaaacaccgcacgcttacctgcaaggcgtggcgctggaagtgatggcaaactccgataacgtgctgcgtgcgggtctgacgcctaaatacattgatattccggaactggttgccaatgtgaaattcgaagccaaaccggctaaccagttgttgacccagccggtgaaacaaggtgcagaactggacttcccgattccagtggatgattttgccttctcgctgcatgaccttagtgataaagaaaccaccattagccagcagagtgccgccattttgttctgcgtcgaaggcgatgcaacgttgtggaaaggttctcagcagttacagcttaaaccgggtgaatcagcgtttattgccgccaacgaatcaccggtgactgtcaaaggccacggccgtttagcgcgcgtttacaacaagctgtaaatcactagcgaacgcgtaggtacccgggccgtgggtcgtttaagctgccgctgtacctgtgtcgtctggtgccttctggtgtacctgggaggttgtcgtctatcaagtatctgtggttggtgtcatgagtcagtgagtcccaatactgttcgtgtcctgtgtgcattatacccaaaactgttatgggcaaatcatgaataagcttgatgttcgaacttaaaagtctctgctcaatatggtattatggttgtttttgttcgtctcctaatatttgcctgggatcaaattttattggctggtgttcatttgacctccatgttcttgctaggctccattttttactctacagccataatatgtttgattgtttggtttgttctttgttgtacacctggttctgtcgagcttagttttcgacactggcttacagcttaacatgttgctattttattgggttctgattgctattttattgggttctgattgctagtttttgctgaatccaaaaaccatgttatttatttaagcgatccaggttattattatgatggtggctaagtttttttttttccaagggtaaattttctggattctccagtgtttctgtggccgaattgggcaactttattatacaaagttgatagatatcggaccgattaaactttaattcggtccggtggcgccgctagcgtatacgaagttcctattccgaagttcctattctccagaaagtataggaacttctgtacacctgagctgattccgatgacttcgtaggttcctagctcaagccgctcgtgtccaagcgtcacttacgattagctaatgattacggcatctaggaccgactagctaactaactagtacgtagaattaattcattccgattaatcgtggcctcttgctcttcaggatgaagagctatgtttaaacgtgcaagcgctactagacaattcagtacattaaaaacgtccgcaatgtgttattaagttgtctaagcgtcaatttgtttacaccacaatatatcctgccac

SEQ ID NO: 94 - DNA, 2654 bp, Zea mays
  source 1..2654: mol_type = unassigned DNA
ataattcaccggactgtccggtgtacaccggacagtgtccggtgctccaagaggacgcgactctggaacttggcagcctcgggaatccgtagcggctgctccactataatacaccggactgtccagtgcaactgcggggcaacggctacttcgcgccaacggtcgcctgcaacagcaattaatgcgtgccagagcgcgcaggcgtcaggcacgcccatgctggcgcaccggacactctacagtacatgtccggtgcgccaccggacttccaggcgggcccagaagtcagagctccaacggtcgaatcccaacggctttggtgacgtggctggcgcaccggacatgtccggtgtacaccattcaacagtcagccccaccaaacggctagtttggtggttggggccaccattcatagcatccaagttttccacttctcaaccacttacaagagctaggcattcaattctagacacaccaaagagatcaaatcctctccaattccacacaaggctttagtgattagcgagagagatttgccgtgttcttttgagctcttgcgcttggattgcttattttctttctcacttgttcttgtgatcaaaactccattgtaatcaaagcaagaggcaccaattgtgtggtggcccttgcggggaagttttgttcccggttttgatttgagaagagaagctcactcggtcggaggaaccgtttgagagagggtaagggttgaaagagacccggcctttgtggcctcctcaacggggagtaagtttgcgagaaccgaacctcggtaaaacaaatccacgtgtcacactcttcatttgcttgcgatttgttttgctccctctctctcggactcattattatttctaacggtaacccggcttgtagttgtgattaattgtgtaaatttcagtttcgccctattcacccccccctctaggcgactatcagttggttccttagtgtatgttatggtttgatcacatcctgatttgtcatgtgccatgagtttggttagcagatacatggctaatcctgatagaatgcattggaaagttgttaagtggattttcaagtacttatatggtacgtctaatgcttgtttgtagtttggcaagtcaaagagggacttgttggatatgttgattcagattatggagcagttttgtataagagaagatcattaatagattatgtattcacggttggtggatgtgtaattagctggagggtttgcctaattccgacagttgttttgtctactacagaggttgagtatattgcagcttgtgatgctagcaaataggtcgtttggttgaaaggtctatatgctgagttttatggagatacatattgcattacattgttctgtgacagttagagtgctatttgccttacaaaggattagatgtttcatgagaggataaagcacattgatattatcattatatatgggaaatagttgcaaaaggtaatttgagggtatgcaagattagtacacacttcaatccagcgatgactaaatctgttactgggtgctaagtttgagctttgctcgaacttagttggtataattgcttagccctagcggctatgttggcacgacattttgttccttctattatttagaaagttgcttacaaattttggctacaagatggaatttgtctcgaggtaagattgttgagtttgtgatccaaattctggataaggggtcgagttggtgagcgaagtggaggcccgtcgccagaggtttgagccgaccctaattagggtttctgttgcgccatcatcataaccatcttgtaagccgtcgtctaagtacgacgttctgtaaagactccaaattacagtgaaggtttcgtctgactggtatctgtggtttttcccttcgcagtgaaggattttctatgtaaatctatatgtcgtgatctgtaattgtggttgattacttcatttttatgcccgtcgactctgctaacaaatataaatttatgtttttactaagacttaaacatagttaagtattgctaacagaatataggaaaacgatgcttcattttgaaaaaataggaaaaataacacaaactgtataaggaagaaaaaaaatatatagttggatattgaagtaatagcgtagaccccattgccctaaacgaaaagcccaaactaaatatagattcattcggctccaatccaactcaatccagctcagaccaaccgcaactcaacccagcttttatataataatagaatcatcagtattatagctaaaaataaactaacagttacaaaactagtctatcaaacaagccgttactatatccactctttaactaggttagacccgtggatgcaccacaggccagacagttggcctaaatccggcacagctattgggccgatctggcccggacacgcttttagtcctgctagaccgtactcgtgccgggtcacagacctactgccgggcgaatccatttagatatgtgtacctgttaccccaactctagtcgtcggaaccccaaccgagttccccagtactccgcagtccgcacggccgcatccgtcaagatccgcgaagagcaacgaggcgaggcgaggggagggaaaacaagtgagtgagagagagagagagaggagggaaa

SEQ ID NO: 95 - DNA, 3808 bp, Zea mays
  source 1..3808: mol_type = unassigned DNA
ggttaaagttactggtcatgtagaaaataagggctggactatccggcatgtggactacaaggacacctcggagaaggaagaggtcaggatccgtgggttcaagttcaacaagtctgagcagctagaggtgaactacaccgagccaggaaagcatagcttgagtgcgtgaaaagaaaacattcttgacctgactagcttcgtaccaaaatggaaatagctcacatctgggtcgcctcccagattctgggagggaggccaatgccagcgtagctgaaaccgttcttctccttcccccacgtacaacaaggagcaaagtgcttcaccaagcactcaacattctttatgtatatcttgtacagaactcctcttcagtgcaatcagagttcattgtttgtttgggatctgatgtttatgttacaattttttattttagaaaacttggcactgaatcaagtaataagtgtggtagtgtgtagaagtatagtaacgggctataagcctacttatgtggcattttttgtctgtgtggatgagagacattaaaaagtggaggtgggctctcatgcaagagtcagcttctatatgagctcttagataaaaggatgaaatagaaagatacactataatgatctaagagtcaactttgtagcctgctttagtatatgtgttcttattgttggctctacataatatggcaatgatttagagttcactgtaggagtggtataccggataacacatcttttttcgatagcatgtaaacaatggaataccctagttatatcataggaaatggagagcaataccctatgttgacatgagtctttgcaatccttttagggctggtttgttgacaaagaaattggagaggattgagggaagaaaattccttgcaaaggattttctctccccctcaggctcgtttgcttacttgtgaatggttcctctgctggattggaatgtttattttgtattaacattgattagctggaatagtttggaatgtttatttgtattaacattgattagctggaatagtttttgttctcaatccgatataaacgaatgggacctcaattctctctgattcctttattaccaaaccagccattagtgcctgtgtcttttaaaaagaacacctttgcaacttgggcaatggctgtggaaaggaattgtggtgactggtgatgatgagtaagcgctgacgcgataacgagatgccgtgacggataggcattatctccatataagggctagtttggcatccccatttttccatgagatttccaattttctaaaggaaaatgaactaattttccttgggaaaatgaggttttcaaactagccctaaaaagatcgggcaaagtttttttttccctgctcgatttggaacctgcatcgaaagtcttccagaatgaattaaagcctcgtgtttgacgctttttttaataactataggatgttcggcgtctctttatcggatgatgtagctagggttgttaataagatctagattttaggctataaaatgtaggatcgaatcggattagcgtcaaactatattcatatccattttgaactaaaatgaattaagagccctgtcctaatttattgtgaagaaacacctagatcgttattcattgccatccctagatggagctactgtttcttagatccaaaatgtacatccatggtgatatagctagtgtttctcagatccaaaatgtccaactttacaaaaaaaagtcttcatgaaaataaggccccgtttggtttcagggactaaagattagtccatccattttagtttcatttagtccctaaattaccaaacggtgaaactaaaacaaagactaaaatatttgtctctatcctccaatgtatgactaaaaataattaaaccatataaattctaccttttgtccctcctttgttttagttacactaacggcggaaaaatgataagagacattttagttcttttatgatttatttaatgtattttaaatacttttagtcggatagagactaattaaattttagtcctgactaaagcaaaccaaacgggccctgactcatgcacacggtttcctctttatccaagcttccaaaaaatacccacttccactttagattctccgagtcacagatccaacaatattgctccaaaaagaagtactcctaaatccttccagaaaaggtgagagtacatattaaacccgataataggccaataaccactgttatatctatagcctattcctgaacatcagaattagtgttataaacatgaaatgtgaaggagttattacagtgagagctaccgtcagtggtgtggtcgggtttgctagtgtatgaaaacagattagatgtgttaaaataaagtagagtgaaaattaatttaaatacaattctagttgattaagaacatctccaaacgaacgactagtaacagatttggtttatcattacatgtataattgcgtgcggattttagcacacatggaatgagaggcaaacacgggcccaggaacggcccacgggagagagaaaccctacccttcccttcgcggtggtggcatccgagacccgtccacaaccaccacagacacggtgcaacccccccccccccccccccccccccccctcttaaaagccgcctctcgccgccgcccgcaaaccctcatttttctctctcctgcgccgcgacgtccctcgccttcgccgccgaatccgagactccgatctcgggttcaccgcagcgcacagagcagccccgactcccggcccgatccgcgctctcctctccgtcgcttcaggtgttcgcctcctccagatctcttgctgtctcgcttgttacttttttgtttgcttttcggcgtccgatctggtgcgacggcgggtctgggtccatctggcggtgctacccgtgcggatctgcgccgattcggtgggaatattagtgattttgacggttctggattgacgcacgggtttgcgcacggaaatactacctttcccccctttctctgacatgcggctttcagctcaatacatgatttttcttacgtaggatttgattgattttgtatgtagatataagcgttttccggtgctaatatgcaaaattgctagttttggtcatataaaactgtcctgggaagctccgtagcttgtgtaccgtgcttgagtattggattcaagctgtttgagctgtgggatgctgcatgcttgatggtaatgaattattctattgtggtaagtcaatttttttgtgaaagtgactatgagatggtcgcaagggtttgctacaggataaggttaaaagactgccctgccctatgtactagacgagccattcataccgtgcgaactgctaaaagctgttgctcgatttatcgagtacttgcaattatatcagcctgctgttaagaaagtgtaaagcatcaattgtcttggtatggttctgtttagattctttataaactgaagattgagttgagcatgcattttgtataaattgtagagcttgaataatcattttaagagtacaactgattccctattgattctgttgtgaattacttgtcttctagcatggtgtttgtcttaaacatttctttgctacacacttttctcgttgtaatctgtaggacagtttgttctaagcttaaactgtgccattgctcattatattgtatacatccttttgatctaggttcatgattaaacctttctttgtatttgtttgtcatattgtcaacatgtgctgtaacttctgtgtattaacatgtttcttttgctgcag

SEQ ID NO: 96 - DNA, 2649 bp, Zea mays
  source 1..2649: mol_type = unassigned DNA
aggaaaaagtgcaaagccaagtgctagtgccgcacagagggctgtcagtgccgctcataggggcgacagtgccgctcaagcaaaactatgcagaatctcacaaacttcacaagaagtttgcatagagggaaataagatgattcctcaagtatcaaccagaacaacacaaaaccccgagtgtagatcagattacccgaaagatttggggtttctagaacgaactcaaaatgagttcaactcggatcacgaccaaaaactgcaccaacagggtgtatgtagtgatccaaagagcgtatctcatcacccaacaatcgctaactgtactcacaattcaagaactcgatggttattccacaaatcaaaaagagaagggagggaacgagaatgaagacaaactcgaataaaaaatgcaacagacaaaattgagcacatgattcgaactactccatggatggatttgtccacccttcttttggatatagagttgaagatcacaagacatagatgtgaacaaaacacctgtggatctcagctaaactagagaatggaaactagagtttctaaacaagtgccaaatcaaaataaccaaagagatgattgtctactatggcccacccttctatttatagagggttatttacattgactaaactaccacgaggtacatagagcctatccactcttctggaggcaaaatggaccaactcccgagatattgatctgacggtcatacgctccaaaagaagttgcttcgcctcgacgcactctacacgatgatgacacatgccgccttcgattcctgctcgaaccgcaccgtcgagttttgaggcccatatcggtcagaacccgccatccgcaacgttgggtggttttgaggctcaaccaccaaaccgccttgagtaccgcaccgcatgcgcgtccgccacgtcctatacacgtgtcctgccagtccatgaccatgccggcgacacgatccaccctaatgtcctcacgacactgcgtgtctcaggtgtcagccaccacgactagtcaccccagtcccttggtcaagtcccaacgctcattcttcgtcgcacctggtccatcggcacaaacccgcatgaccttcacctttgtcgccgaccaccgtccctgtgctccgcacctacacaccataagccgacagacatggttgtacaacacatagctcgtactctggttagtcaaagaggcaaaagaagggctcaacaccactagccagacgtcaaaaccaaatcagatcactaaatcagcacgagtgctgaaatcaaagctagtttatccagaaagaggcaaacgacttaacacagctagcgaaagctccaaaaggctcaaatttctccccctagctgatttcccttgaaaagagcacaagaatctcaaagtctattccccaagaaaggagttccaaaaattcagaatccccaaaaatccagaaatttctcccccttgttaggagcccaagaaagtcaaaggctctcccctttattgacaaatgaactcatcaaacacatccaagggtagaaacaaaaattccccctcgacaagagatcccctgagaaaatgcagagatgcaaaagagagagtagaaaatgtaggagctttagaattataccagtcagagtgtaaagatgctctaagtgatgttgtgctatgtgtgcaacaataaatgcacgtgctagtagacgctcaaactgatccacctttcaaagattttttaaagagtgatcatagaccaaagagcagtttcaatttggaacccttgatgttttgtttcggcaagtgccatagtccttggagctcagtagttttttttctcttggagcagtggggggtgagggtgtccattaatttagtagagaagagatttggacgacatgttggttagatagaagcagaagaactttatataaaagtgacgtgagtgaaaaccatgacaacttgtactttataatagtagggagaggggtgggtactggccaacggctagcgggtgacgcggagtcttgtaggcggtggcggatgagcacgactattaatatagtagagaagagatttggacgatagaagtagaaggatttttatgtataattattgaaaaactgtgataactgatgttttataaagatatagacagatatagagatttacaaccaatattaaaagagtatatattttagggataaaaaattaaaaattaccggtgtatttttttaattgaagtcgaggagattgatgcaggaaattgaccttttacacggaccgcaaggctaaacttctgcatggttcggttgaaagcgcctacaaaggcgtccctaggcctcctagcccgtgccgcgcaacgtccggctcggacaccggaggctttctcacgcgtcccgatcgcctccgtccattaaggtccgtgttcgatcggatggctttcgatgacgagggttttgccccagacggtacaaatacggagcctcccaccccgcgccgccaccgcgctctttctctttcctcacgacgccgccgttgggagccctgcttcgggagagccccaacccttatcaaaccctaaatcaaaaactacccaaaaaaatccgcaaaatccagaaaaaaatcccaaaaatcaccacttgattggag

SEQ ID NO: 97 - DNA, 3186 bp, Zea mays
  source 1..3186: mol_type = unassigned DNA
atcaatcacaccaaatggtaccgactgttctaatcagggtcgttcccttccggactaacgaccagcgctcctcctcccaatacaccaccataccacagaccgtacgcggcggcgccgccctggcctgcgacggagggggcgccgacgacatgccaaactatgagctgatgccctaagccttgttcctaccggcgaaacgcgatgaggaggccgatgcaaactcagatgagaacttattaccggtgatgtgggcgtaggccaacctgtcctcgagtcggggcggaatctgtggcaggcgatgacggtgatcaattttgacgaaggtggtcgaggctccacaaaaaaatgctacgctcagcaccaccacgcagctacgaagctccagcaccgccctcccgagtgttttgacggtgcaggccgggcttcctcggcggcgcacgtccggaacgatgatgtcacactacttccttctctcggtaccaggggtatgattgatgagaggaacacgagggggacgagcttcgacacatgaatttatggccacaaaaggggggtcgacagggacgcccgcgaaattcgcacgccggtcgtcggtgaactgcgggtgtttgttacgcgagctgggggatgacaacatgggtccacttgtcggcgtgcggcttggttaagcgcggagttgagcaggtgaggccacacgacagaggcagtcggccagcacgcgcacgcggaatggccgacccatggggcccacatggcggtgtttagacgggcgggcgcggtgcgcgcaatgggccaatgaggcaaggaaggagagatgggccagaatctggttttgcgacccaaaacagagttttaccccttttctttttttctattcttttatcttttctatttcaaatttcaactatccaattcaaatttaaatccctatttggattttttttagatttcaactctcaagtataattctaatgtgaatattgattctagtacttttaatattattttccccccattttctcattttagaagcaacaatttactattacaatttctgttatcattttctatttttcatttacaaactgaggtcaaattcaggttttcaataaatgcatgataaccacatcatcaacaagagatgtgccattctttatttgtttattagttacttaactaatttaatactctttgttggttataaataggaagggtcctaatgaagtttcaaaggtttcaacaattctcctaacttcattataaatatatttatttatttatttatttattttatatatttttgtcacttctaccaattttgacctttagagtttataatacaaaacagtgttttgtaagtaaatacacgtttttgttgaacctaatagggtttttaccatcgagtatcagactatccacactcatataactctaaatttctaccatatgagaatatattgtacttgtcagcaaaaaactttacttataccacaattttccgtagtcatatctgctatatatctcaactctataccaaccgcaacatattatatcatttttgtctctttcctctcacctactcgcccaactcctcctggcttggtgacttctgtgcctgcacgtccaatgccatatggagaacatagaagagatggagtaagcctctccctaccacccataccttttagggtagatcgctacaacgtttcagttgctgcaaagaagacccaatatcatcaggtcgctcaatgcggatagcctcaatctatccacattcatcctactctaaaaagaatactccatcttagtcattaatattttaaaatacaatagagtcctacatctacaactattctatatctcaactcgatataactactacattttgatgaatatatatcgaacacatccggttaattgtgggcttgtggcgttgtgttcatgtcgccgccccacaaccacaagctcggcgggtcggcctcattgctgcatagcgttcgaacttcgaaccgtacaaacagtatctgaccgtttcctgtcggttgctgtaaagtagcgtcacgtatagagtagctgcagcacatttcgtacatacctcgagtagcgtagcgcaccctagtgtgtcactgtggacagcctcagggtctgtttggttgggctgtggctgtgaaaaaagttgctgtgggctgtgagctgtggaaaaagctgctgtaggctgtaagctgttaaaaagctaaaaaccgtttggtagaaaccactaaaagtcgttaaaaatccttcgatatatgttttcatagttccatccgaaaagccactaaaagcaggtccagaggtgctttcagatttgcactacaagaaaatcggtttttagaaaaagctgcttcctggatccagccctttggttggcttttggcttttaggggggcaaaagccaaagtcaaaagttaaaccaaacacaccctcagtcacccattcacatctctaccctagtgcgcttcccttataaaacctagctcctcaagctccagacgcagtcgaccgccgcagaccgggagtagtcgacgcgccgtcactgaatcctcagatcacggctagccgtaatcacgccactctgctgactcccggcgaggtactctgacgcatgcgcgagcgcttctcttcttctcttttcgctgtgcttttagtctgttcgtttgatgcccagatctactaggtttgtgtgatgagccgagccgatttatgcactggatttttagtcaagtgttgtttccgcctccgctatctttagtgtctatgtctgaatttgggttcagtgattatcgagctataaattatagttgttgcgctgttctatactagatccagttaccgatctatgatattacggggttgagcgattcatgtgctggagtactagtccaagatttgcttccgtctcctcatctacctttagtatgtactctgtatataaacttaattgcagtttgcaactgattctcggccatatattacttccgttgcgttgttcattagatccatttccgatccctgatattacgtgggtggggggtacttcgactttgttttttccggattgtttgattactggtctattcccatacatatttgtttctcattgattttatataattttgatgtaagcagcagtgtaacattttccttcag

SEQ ID NO: 98 - DNA, 2792 bp, Zea mays
  source 1..2792: mol_type = unassigned DNA
tgcaaatacccgtattttcggatacggattcaggtatttttatattcggggcgaatatgtgtaatacccggatactgcagcttcggattcgggacggatacggagcggggattactcggtaaatacccgaatattcggggtcggatacgggtacccgtttttctttttctgcataatattgttttaaaatcctaacttttacatatgaattcggatgaagataaagtttgtatgaaaattgtagagctcgaagagatctatagatttatagtacatcaattttttttatcatttttatatcaaattaatataaaattttgtatgaaaattgtagagattgaaataatgtccaaatttatatcaaaataatatactttatcatttttatgtggggggcttaaggttttcttcatgtgggaacttaaggttatctttttatagactatttattagtattggtaacttatttgtaatttttggtcagcgctacaatattttatggatttaattgtattttgatgattttctacgacaaaataataataataatacgtaaatagcctaaaaaatcttgaaattttacggaggcacaacatatgtccatatataaccataaaatgtttggatcataagatctataagatgtccatgtttcttacattttattcacttatttgtatgagttacatgtgaaatcactgtaattattcaagtttcaacataatcagtaccttacgttaccattttcatatgatgacttgagttatctttgtataaaatgtttattagtttttgtaacttatttgcaatttttgagtgaaactataatattttatgaatttttaatattgtggtgttggttctacaatgtccttgtgattagtaactttgaactgcatgatgtcaattttatcggtttcctttcctacatttgatctatcatatatacatgattatgtattgcttaatttatgtgtttgttggatagttgtacaattaatataatcagtacgaactatctgacaactatccggtacctatccgagtagtatctgttatccgtttcttacccgcccgggttattacccggtcccgtcttgtatccattccgaatcttaactacccgtatccggcctcgtatccgagacacatgcattagagtagaatacatgatgactcggtatccggctgtatctgtcccgttttcatccctagttatcctaccaaatttgagaaaatgactcatgatgcattatctcattttagatggagtgatttctcaaacaaacacccccttagatagtcaaagtgactattcaagtttcctcttccgggttactctattgttcgtcaaaatgactattcaaaccaaacactctctaaatgtaacaagtgactggataggctatagccgagggtgttcgtctagtagagggtttgtttggaattcgttttttttgtatttccgtgttttcctgcgaaattaaattggttcatataaaattcctacatggcttctaagaagctattatattttgaatcggtcttagctccaaaggagcaaaccctatttctccacctagcattacctcgtcctagctcttgaaatgctcaagtagtcaagtgtttacatgtagtgcagtcaatgtcaaggtaacgcaataaactaaggccatgttcattccacctaggattatataattcagcttatagattatataatcaccaaataacctatttatggattattatagatatctaaattatataatccacataataatgcgtgttgtttattttcctcttaacttatttaagttggattatataatcttgagggtaaataaacatggcctaaatttactacaacatggatagtagttagagacatttgtttttaaaccatgaaaaaaccctataaacttctaaaaagttctgctaaaattctaaatacaaattaatatacaacttcaaaaaaatgttcaaaggtcatatctccagcacttctaaaaatcatttatttagaaaaataaaaaacatagaaaaattacaaatcattctaattgatgccgtaatgtgtttcaaaaactttctacaacaaaagcttaaacacaaccatcaaaaatgtatgagacattaatgtatttcacgctattgactattgcatatatttgtcgtgtaaagttttatagcccatttatacatcaattataatgattttaatttttctagatttcttttgtacaattttctatttttctatagctaaataattttaacaaaatttctagtgatatttctattttttttatttttgtacacctagatttgtagaaagttagagacattgtttatagtttaaaaattgaaaaaatatttactgtatttttactaacgggtgaagtcgcatccaaaaccacttcagtccatggcaagaggtattttactaacggacggacatggcccagacatccggaagaggcccaagggcccataacgtccgtacccgcatccgacggttccaagcctaacacgcgtcatccatcgggagctcgctctagggttttgcttcgagaccgttcccacttcccatcgctcatataacaccgggcgccgccgcttccgtcctcttcctctcgctccgttgctcgcctcgggtcaaaccctaagcaggtacgcttccttgtgcgacggccatctcctcttgcggacggctcgatttctcaatctgttgtctatttcactgtatctgacctttctttgttttatttttgttgttgtttcttccacag

SEQ ID NO: 99 - DNA, 2488 bp, Zea mays
  source 1..2488: mol_type = unassigned DNA
agatcacttcttgttgtatcttacaccaatttacaaaatttcttgatgtgttttatggcaacctcatgcgctgagagatacattcgttattatgaaacagatggacgatttacgctaaaattcgtactcatttacgttgttttggttcacgatttacgcttaaatccgtccgagccagaacccgtgcacgaccggtggcgcacgattttcgcgccgtaaatttgggctccattcgccattacgacacaaatatacaatttatggtaaaatttgtactaatttacaatgtttcggttcacgttttacgctgaaatccattcgagccagaacccgcgctcaatcggccacacgcgattttcacgccgtaattcgagcctcatttgttgttacgaaacagatatacgatttacgctaaattgtgtactcatttacgttgttttagctcacgttttacgctaaaatctatttgagccaaaacccgctcacggtcggacgcacgcgattattacgccgtaatttcgggacccatttgtggttacgaaacagatatacgatttacgctaaatttcgtactcatttacgctgttttggttcatgttttacgctaaaatctatccgagtcagaacccgatcacgatgggacgcgcgagatttttacgctgtaattgttgggccgcattcgccatttttacgctagtacgggacgtggctatacctggctggggcttcctggtccctatatatatatatagggaagaggtaatggaagccctgggcttcccctactaatggaagccccagccaggacgcggtcgatccagcacccgcgtgcttgcgtcagccatgccaggacgataagcgtaaggcaatatacgaatgcatatatatatatggataaagatgcgtaaaccatgcataaaggaatcttttgacgcccgaatcacgtggaacgaatatgacactgtggacagcgtttacgactgcataatgacatgtacttgacgacataaatcatgcagtatgtggttctggttctggctcgggcagattccagcgtaaaccgtgagctaaaacagcgtaaatgagtacgaaatttagcgtaaattctatatctgttttgtaacagcaaacgagatctaaaattacggcgtgaaaatcgcgtgcagccgatcgtgtgtgggtcctggctcgggctgattccagcgtaaaacatgagctaaaacagcgtaaatgagtacgaaatttagcgtaaatcctatatcttttttgtaacggcaaacggagcccaaaattacggcgtgaaaatcgcgtgcagacgatcgtgcgcgggttctggctcgggcggattccagcgtaaaacgtgagctaaaacagtgtaaatgaatacgaaatttagcgtaaatcctatatctgttttgtaacagcaaacagggcccaaaattacggcgtgaaaatcgcgtgcagccgatcgtgctagggttctggctcgggtggatttaatcataaaacgtgaaccgaaatagcgtaaatgaatacgaaatttacgtaaattatagacctgtttcgtaacagcgaatggggcccgaaaattacggcgtgaaaattgcgcacgttcgatcgtgcacggattctggctcggtcaaatttcaacgtaaaacgtgaacaaaaacagcgtaaatgagtacaaattttagcgtacatcatcaatttatttcgtaacgacgaatagggcctaaattacggcgaggcgtgggtcgaactcctccaggcagcgggtgatgcgggtgggcacgttcttcgacgacatgatgacgacgaggatgtccctaagcgccgctgactccttgacgcgcttgagcagctcgtacccagtcatcccaggcaccaccgccttcctgctgttgttggcctttggcgcaggggacggcgccacagacgctggagcggcagcggcggtggccatcgcagagacgaatgagacaaacgccgttgccatcgggcctagggtgcgctgccgccgtccggccgcttcgagaacgccgtcgccgcttgcgtgcccgccttgggagcgtcgctgtcgctcgttcctggtggagcgccgtcgtcggtcgcctgcctcggggcggcaccgctgctggctcccaggatcaccggcactcgcacgcccaagggaaccgccgctgccgctaaaacctaatctctggttgcgtgggggtgtttttataatggcggtgtgggactggataactgcgagcgcgtggtgggatcgtggccctatgcacgtaatatgcaggacgaaatctacgctatgggccatagatttgtataaattgttacaccacatcagcatactcgtattataatttggtcgtaaacagttagagctggatcgatctgggttccttcccggcggcacgatcgcccgccccaacggccttcgatccacctactagaagcttccggtctacgtacgtaaatatataatacg

SEQ ID NO: 100 - DNA, 2712 bp, Zea mays
  source 1..2712: mol_type = unassigned DNA
attttcggcaatgttattaagaatattatgaagtatttaaataaatttttgtataattttttatgtacattattttctccctacaacaaaaaaggtgaaaaacatctgaatccgtattcggatagacatccaaattttatatgaattatttaaaaagatatagaatgaatttaatgtttatttttgtgaagattaatagtctcaatgctaaaaacaagaatataaatttacatagcaaattctatatgttagctgttcacaatcgaagaaagaagaccaaaaaatgacatccgaataaatatccggatccatccctacccactactactaagttaaggtggaccctccgggatgtcaatagtgaaagtcgcctaaaggggggtgaatagggcgaatctgaaatttacaaacttaatcacaactacaagccgggttagcgttagaaatataatcgagtccaagagagagggtgcaaaataaatcgcaagcgaataaatagtgtgacacgtggatttgttttactgaggttcggttcttgcaaacctactccccgttgaggtggtcacaaagaccgggtctctttcaaccctttccctctctcaaacggtcacttagaccgagtgggcttcttcttctcaaacaaatggaacacgaagttcccgcaaggaccaccacacgattggtgtctcttgcctcaattacaagtgagtttgatctcaagaaagaatgagaaagaaaagaagcgatccaagcgcaagagctcaaatgaacacaacaaatcactctctctaatcactaaagctttgtgtggagttgggagaagatttgatctctttggtgtgccttgtattgaatgctagctcttgtaatgtagttggaaggtgggaaacttggatgacttgaatgtgggggtggttggggtatttatagccccaaccaccaaactagccgtttggtggaggctgctgtcgcatgacgcaccggacagtccggtgcgccaccggatagtgtccggtgcgccagccacgtcaccaggccgttgggttccgaccgttggagctctgacttgtgggcccgcctgacatgtccggtgaattatagcggagcggattcccgaagctagcgggttcagagtcgctctcctctggagcaccggacagtccgttgaattatagcgaagcgtctctgagaatcccgaaggtgatgagttcagcttggagttccctggtgcaccggacagtccggtgcgccagaccagggcacacttcggttatcccttgctctctttgttgaacccttttcttggtctttttattggcttatgtgaacctttggcacctgtagaacttatagactagagcaaactagttagtccaattatttgtgttgggcaattcaaccaccaaaaccaattaggaaataggtgtaagcctaattccctttcaaatagggactccaatactcgctaaccgatgctaaatcccttattagggttaggatatcagacaaaaagtctccccattggtataaatatgagacaaaatattcacccattaggtaagcagaaatgggtttggaaagaaatcatccaaaaccaattaaccatgagtaatattcacctagtgaaattaaatgtgtgtcctaatagataataagcacaacaactaactcaatctctttcaactaacttaatctctttcaacccttttaagcacccatccacctagcctaggtggtcagccactagccgtcccatccactagtccatatgttttttttttgtgttttgctgttttgtatggttaaacatatttttttattaaatgtcagatttattggtagtgtattattgttaggtgccgtgtgactgttaatgtcatatgaaatataatttaatagtgttttccttgtcatggatgaggacccattgagaccctatatcagaataaggatgtgtatgagatgaatcttatatcataatagatataagtatgaaaatagggatgtgtataacttcatgagaccgtgtccaacaaggacctgtatgtggttctgtacgccaaatttacaggacgccgagctcctttgttggtccagcaacggacggtaaagcctccggtaaaataccggacgctgcctgcgcatgctacatttagcgtttcactgtgcgtccgctacgcagccggccagcaggggcatagtgctgatacgacaaggatggcccacatgcagctcgtgggaccaggagctcacaggaggaggcaacgacattggaacatgggtcgggcccacagttgtcaaaaaatatagaatataggatatagaggaggaaatttagagaacgctgctggagatggtagagatatagaggatgtaatattttagagtgtactgtaaaggacgaaaaatatttttttagaggatgaaatttaaaggacgttgctgaagatagcctgaggatgagtactagatgtctggagtctgaacctggtggagaattccccacagaaggagaaggaaaataaactagggtttagccggggccacacggcaggctccacggcgtggttatgtccgcctttattctccccccactcgtctgcttcgcctccacctatccgccgcctcccaatcatcctgcccccaaactcccaccccgcagcatccccacgccaccacacctcgtcgcgtcgcgtcgtcaccggcgtgaag

SEQ ID NO: 101 - DNA, 2509 bp, Zea mays
  source 1..2509: mol_type = unassigned DNA
gctcgcatcgccatcccctcccctcccctgtctccaagccaggaatcccatccccaccccaatgtcgcagttctgctcgcgttggccggatctgtgaatgaagaacccacggttccacgacctcctcttcgtggaagcctaaaaggcatcacccccataagcgagagggaaaagacacattcctatatattctcttagtttgtccgctgttgtctagaaacatcatgtaatgaggctgggaaacgatcccacggagtgctcccgtgtccgtcgcctcggttcggcagaggccagcaaccgcggcacctggtccacagcagcagccaccacgactcgctagggctaggccgacctagatgatatgcagtgagctgatgggagggatgggcgagcaagaattggtacagtaaccgggagacgatcttgatttattccttatgtcatgaattcctttttatttacacccacactttctaactttcgtacaatgattcgtatatttaaaacaaggctaacttatgttctcatgctttacgaaccctggcatatgtcgcaaaaaatccttacctaaagaactaactctgcagcctcttcaagctctagatttcaattcttatggcctaagaagtgtttttttatttcataatataagctttcacaacaatctaattcttggagtcagattctataaatacccaacatttactaacctacatttttttttcaattggtgccatgaccatcacataatgttgatgagctattccctccaagttgctgattgcatgtggattaccatgcatggctatttgctatttggttgtctcgacctttcttaggatctattggatgtaatacatattatcattatttagctaatatttgctaactactacctagcagagtggatagtaggttgtggtgtttatatccataactaatgggttaattaataattggagagtaatgttcctgttagcccccattgtttgggtagatagtaagataatggggatttagaaacaatctaaagtttattacaatctgttatctagacctatttatatccatagagctaaagtttagcagattgctacatcctcattattagtttggagccaaacatgtcctgattgtataatttaaatgtttataggagtaaccaatttgttttagctttgctattttacgagtgtcaagatgcttaactatttcatacttgctttgtaggaatgttcgatgccgacaacatcttgctctaccagaaggtaccagctccaaatcaagaaccaaaatttaggaaaaatacgaactgcaaccttatccgtcatctttagtaattcatgtgtttatcttatttgcaccaagaactatgctggaggctataaaactatgaatgttatttgtgacatgtaaataatactagcttgtacatgcatctaaatgcatataagaaacacaatgcaccttttgtttgcattccatgtaaattataaattaaatccaaacattgaaaaattacaaaacacacacacacaacactatgcgcgcatgggcgcgcgcaagacactagtacataataataacgatattgttcgcttcggattaaattaaaccaagcgagtatgcgtgcatgtgtacgtcggatgctttgtttgttcatttgtggcccgtgaagtaatatttgggcccaatagcccattcatccatgtcctaaccctagggcgcgttccttataaaacctatctccattctgttctcactctcagacaccagacgcagtcggctgccgcagactggtagtagccggcgcgccgtcaccgtatcctcagatcagaggcgagcagaaaccacaccactctactgacgcccgacgaggtacacttccgcgcgcgcgcttctcttccttcttttttcgctcgacgaggtactctgcttcacgcgcgggcgcgcttctcttccttctcttttcgctctgccttgagcctgttcgtttgatgcccagatctactaggtttgtcgatcgtcgttatgtgtgatgagctgagccgattcatgcactgtatttttaattaagtgtttttttcctccgccgctacctttattgtctatgtatgaacttgcagcttacaactggttattgagccataaattgtaactgagtttccgagatctataatattacgtggctgaggcgcttcatctctgttttgtttgtatgacagtaggagtactaatccaagtttagcttccgcttcttcatctacctttagtatgtatttcgtatataaatacgattgcagtttgcaactgattctcggccatagatgattaccgttgcgttgttcatcgggtctagtttcggatctctgatgttgtgtgggtggggtacttcgacttgggttttcctgccctttgtttgattactggtttattgacatatatttatctattgactttttatctgctatgtttgatgtaagcagcagtgtaacattttccttcagcc

SEQ ID NO: 102 - DNA, 2825 bp, Zea mays
  source 1..2825: mol_type = unassigned DNA
cggacagtccggtgttacaccggacagtccggtgaattatagcggagtggctccccaaatttccgaagctggcaagttcagagtggatcctccctggtgtaccggacactgtccggtggtgcaccggacactatccggtggctcaccggacagtccgatgcgtcagaccaggacagccttcggttgtcttttgctctttttatttgaaccctttctttgactttgcattggtttgtgttgaacctttggcacctgtagaactcataatctagagcaaactagttagtccaattgtttgtgttggtcaattcaaccaccaaaattcatataggaaaaagtttgaccctatttccctttcaagagtgcgcgacgcgccctgcgcggctgcgcggcctgcgcccttgtcgcccttcctcccacgagctccagcgcgtgcgccgcctacgcggcctgtgccctgcgcccctgccgcccttcctcccacgagctccagcgcgtgcaccgccgccaccttacgcccgtgcccagcgacccagctgctggtcctacctaccgccgccgtgagggcagggttatccggcacggagactatatgccacaagtgcggccgcaagagcacaactctaataatattaagtttgttttggtcaaaaattgtttgtcttctcttttgttggtttgctggtcatatttgattgtatttttccaattttaggcttttgtgtatttcggactcgattctgtattctgagttcaattatgtattctaggctcgattttgttttttgagcccaaaattgtatttcgggccaaatttgtatttcgggcctttactattttcgggccgcccgtttaaagcccgacacatttagctgaatacgggccggaccgggccaaggggtcagcccgtgggtcggtacggcacgacccgaatttaatattgggccgagccggcccgaaattaaacgtgtcgagccttttcgggcttgagtcgggccgggccgggcggcccgaatgtacacctatagccatgtctagcgagccgacccgaggcacgacccatttaatagtgtttaggccaacccgtcataagtgtcgtgtggtgcttgggccgtacctcggcccgtagtgctggcccggcccgacacattattttttattttaaaaaaatcatatatacatatgtacaatttatatttaatattataaatatctgaacatgatgttgtactggttagatagctttgttcagtgtcttctacccttcttttagggtgtggattcaaactccacctcctacaggcccgacacgtttaattttgggtctggcctggcccaatattaaatttgggtcatgccgtgccgacccacgagttgacccctcggcccacggtccggcccatattcagctaaacgtgccgggctttaaacgggcggcccaaaaatagtaaaggcccgaaatacaaatttgggcccaaaaacaaaatcgagcctataatacataattgagcccagaatacagaatcgagcccgaaatacacaaaagcctaaaattggaaacatacaatcaaatataatcagcaaaccaacaaaagagaagacaaacaatttttgaccaaaacaaacttaatattattagagctgtgctcttgtggctgcgcttgtggcatatagtctccgtgccggataaccctgccctcacgacggcggcaggtatgaccagcagctgggttgctaggcacgagcgtaaggtggcggcggcgcatacgctggagctcgtgggaggaagggtggcacgggcgcagggcgcatgccacgcaggcggcgcacgcgctggaacctggagctcgtgggaggaagggcggcaggggcgcagggcgtaggccgcgcagccacgcagggcgcgtcgcacactctcgctgtctcgcgctggagcctagaactgggggcctaggaggctgggacggcggtcggacgggacacgggagtaagagcgactcggcattttaggttttttgagcaacagggcaagacaaagctaaatggaaatgggcctcgccttcgccttaggctcgtggacaacttatgcgctgccgctgcctgagctgagcctgactgcctgaggaccaccgactcgccaagtggtgcgctgccgctcggttcgggcctttacgtgccggttaacgggccatttcaggcctgcttaaacgggccgggctcgtgcccgcccgtgagcctcggcctcggcccaagcatggcccgatacatcagaccaggccgatccgacccaaaataattttatgtcgtatcgtgtttggatcgtgtttttttttcgtgcttcgtgtcagcctattaaacccggaccaaatgtacacctacagtgccgacttccttctcccgttctccgctcctccgatcgacgatggccatcgctcaagctcagctgggccgacacaatcacacaagggtcggtccacccacattcgtacgcgtgcttgttgtctctgtcagccatcaactctccagtgagctgcgagcctacaaggctgtgggcagtgccagcctcaacctcgacctcccccagtcccccaccgaccaccggcctcctttcccgcaggcacgggtgcacggcacgcggtttccactcgcttcgtccgcgttcggatcgccctcaggtcaaccaccactcctcccctctgctcctctcagcatctcgcgcttcagatctcgcccaccgatctggaactggaattccctcccgatctgtatgtatctcacgcacgcttgctcgcgttcttggctttgctcccacctctctctagcag

SEQ ID NO: 103 - DNA, 2680 bp, Zea mays
  source 1..2680: mol_type = unassigned DNA
atgatatataaccacgatgcaatgcaataccaatacaatcaactactgagacctgtaatattgtttttgttagacagaaaaatcgtagtttcaataatgtttccaaacattttatcgatgggctctagcctgtttgtttcggtggctactttgctatagtttgtttaactttttctatctaatattagttctttaatagtaaagaaatcttaggcaagttgtaacacaattagtcgagaatcaagcatgcctctaatcctctagtgttatttttttgacaaattgtatacccgctatttttgataaaattatatatccactaacaaattgcttatttccttgcctcctaggatggtaatggatcaccatccaaatatttcttcacgataagttaggaaccttaattaattttagttcaaaaatgaatatgaataagatcctaatctgattcgattcttaaattttatagtgtaaaatgtagagcccattacaacacctactcctagcaaaatatgcacatcttgtcataaattttgctctactctttgtattgttgtatgtaatgaataatctttatatatatatatatatatatatatatatatatatatatatatatatatatatatatgtgtgtgtgtgggggggtgtgggggtgtgtgtattgatgtctcttggacaacaagattacacaaaacacaattagaataaaaaaatatcctcgtgtatataaacttgtccgtataccatattagaacacataaattttaggcaacattttttccatcaacattcttcaatcatcaaccaaaatttacggatacacaagataagagggggtatgtaaggttgtacgtaatgggctacatgataacatcaaagattatgcaagcaaatctcaatccaccaggcgatcataaacatcatagttcacatgcttcagttttaaagccatcgtagttcccgtgcaaagacaaaaacattagaattattcaatacaagttgcacaagatagttcaataaaatttaaaccacaatagtattatccaacaaagctagttcataccattatagtttctagtaaacaagaatagagaacatatattaagcaaacagaccacataggataaggctaaggatgtatttttgtctattgttttctgtgacatcgatctcgtttgcacgagtaaaactaaaacatgagaaaattccgataaaaaataggaatctagaaatacgaacggaaaacactaaaccatttttattcctgtttctaaaatatatcatctcgtttctgtttttctctgtaaatatgaaaacgatcagatcatagttaaaacggaatacagtaccggacgaaacaatatttctctctcgtttcccccttatagcatctccaaaagctccccagaagtctcccctaaatctatttttttggaaaaacacaaaaacatgtctccaacagttcctctaaagcgcccccaactttttcatagcccttaaaactccctcatttgtagctacaaatgaggggttttttgggctccccagaaacaaactgctgctttaagatgtttggttgaggagccaagtagaatggagtcgtttcatccctgattctaggaacggagccgttctgttctgtgtttggtaatctggaacggagcggctctgttttttgtttggttgcagagtgaacggaacggagcgtgactgtgagagcgggatgagaacggagcggctccgttcggttgattttttggagcggaatggttccggatttgaggagaatattccataattggagtcattccgttctagttcctttataaccaaacagcaacaaaactgggatagaatggttccgttctacttggctcttcaaccaaacactaactaagggacctgttggagaaatgattaaaatttaccctcacttattatttagatattccttaaaactaattttgagaagtcgttttatggagagctcttggagatgctcttagttcgtagatctgattgtgtgtatgtatgtaagcatatgcgtctgtactacgatccacggtaaaaaagtcacaaacatataataatagcgtcattcaataaattgataacgtaaagtataaatgaacttttaactctgtttgagtaaacaactcgtgcagagactgcaatgaaatctattattttttctaaaataattatacaagttgaggaaatgctatttgttccactaagcgacgatgtattttgttttttaaaaaaatcgacgaggtactgctcggttattattttcacatgcaccgcgcgttgtttttgggccggcccatttgtattgcgaatttgcggagacgaatatgaccgaatggagtttagaaagcccagctcacttaggattgtctattttctcaagaaaagagagaatgggcccaaaggcctaaacaccaaaacccgatccgcttatgggatgtcatggacatggagtctgggaccgtccggcagatgagacgacagccgtcggatcagaaaccctagcccgggaggctctccctattaatacccaccctgcaccccgcgggaggagtctttcctagggtttcgtcgcttccagccgccgccgcgtccgcctcgccaagcgcagcagccgccgcagcacatcgctctctcgatctcagcc

SEQ ID NO: 104 - DNA, 2586 bp, Zea mays
  source 1..2586: mol_type = unassigned DNA
ctaaccctaatgggtcggcaacccaacagtggtgccccccacacaatataacatccacccgtagacgcaacaggggcaccacacatgatgagactatagtagaggccaaaggtaggagccgacaagttgaaatccctccatagtcgcagcatcgtgagggtgcgaatgttgcggcaggagaagagaccagtatggattccgagaaggctatagcccctagatgccgagttagccgaagtcgaggtggccgtggtcgggagacacgcattaggagcctgttctttggaagggttcgacgttcgagcatcaatgatcggcagggcgacacaacaaaagagcaccggcaggccgacctttctgcttcttcgttcgtccggacgttaaggagacccgccagggaggtcgacggcagctcatgcgtctgcatcgatcatggtgtccgcgcccgcggcagaatagaaggggaacgacggatccgaccagggaggccactggagcgatggatccggccgagaagacgcgatccggccaaagggacgacagatcgagccgagaaggtcacaacaacgtggatccgggcgggaaggccgcgacagcgacggatccaacgaagacgatgaaggggagggtgacggggcggttccagctggacatgggcctactccggacctagcaagggttgtcgacgctagcgacggaaaatgctcatgaggttggcgcaactgggtggcggcggccagccctggacgcggcggctgcgtggatccgggcggcgctgtagagccttaggagggaggggtgagcagcgcagggccctactcggccatggacgaggagtcaacaacatagaaggagagagagagccactgtcgtgggcgcctgctgcggtggtggcgaggccacccacaccacaggttgtcgcggcaaggtcgcccacgcccgctgcagcggcagtagggcaaagaagcgtgccccgcgacgaatctgggcccacgagcagcgccgtggttggatctaggcaggcgagcagaggttgccggcagggaggggtcgtcgcgccaccaggttggaggtgaggggtggccgcactgttgggagggggtggcgcgcccatcgacacgagcggctgtagctgcgatcgtgaccgagagggggggtggggtgggcgcgcggctgagggcagccgcagccgcaagcaggcgagcccgcccaccgccaccactccacttgagagcgagcaagcctaaggagggcggtcgtcggggcaacgccgagccgcgggcgcacgcacatcgaggagagcgcgacacgggctcacgagcgcgtggacgcggacgcgcgcagggtaggcagccgacggcgcgggcgtgcaccgcgaggcacgagcgcgcgtgtggacggcgggtggcaccgcaagggtctccggcgcggattcagcgggtgggagagtaggggcacagggcttggcggccagggaaggcttggcctacggaggggaagggaagctgccccctgcccccaggagggagggttgagtctcccgggggtagcagctaggaagacagtggctggctatgggggtgggtggcgcctgttgtgggttggggaaaccctaatcctaaatctagtatgataccatgtagaatgtagaagtataaagtgtttgatatattgatatgagaggtttgctacgacaaacaatctattagggtctccaagttgcagttgatcagtgtgaggcttgctacgacattcctccttttttttatcagctgaagcagtacacaggaacagtgtttcttctcctactcaaccagcggcagcagctgcggctacagcctacgagcgtttttgttgggcaccggtgccgctggttgctaaggtatatagagctagaatggcatgacagggctatgttgctgctcctttcagattcaccatgtatttttgggctgtcatctatgcaaatgtgttagtttgagtgtagcgaatcttacaacaaaactttcttgactccacccttttacctctaaatgttgcttgacttgaaggtggactgtagcctgtagggtagtcctgtactagtcacgagctctaccgttcagccctcatttttgctgccagggtgaacaataaattccaagacgaaaaaaaacatcatctagcagagtgtaaagagtaaagacgaatccaaggtaccagcatagatactattggaattccaaattttggagaacaaaactcgtcagagtggccaaacaatacagcggatgctgctccagtacaaaaaaaaaaaacaggcccatcaattcatgaactcatcactcaccgaacatctctaccattctagcccaccaacaccgacgggaggcccatttgtcccagcagcacgctcgaaccgatcctggccatccatcccagcgacaagacgctatcggcccgtccaccggctagggtttccccagagttaaaaggcccggaggaggcgcccctataaacccttcccttctgtcgctgctcccacctctagcccgacaggtgaagccgccgccgctgcagtgtccatagccaccgcaggagactgag

SEQ ID NO: 105 - DNA, 2552 bp, Zea mays
  source 1..2552: mol_type = unassigned DNA
tcaaaacaagagacaccaagttgtggtgatccttgtagtggacttagtgtcccatttgattgaagagaaaggctcactcggtctaggtgaccgtttgagagagggaaagggttgaaagagacccggtctttgtgaccacctcaacggggagtaggttcgcgggagccgatcctcggtaaaacaaatcaccgtgtcattctctcttattcgcttgtgatttgttttcgccctctctttcggactcgtatttaattctaacgctaactcggcttgtagtgtgtgattaagtttgtaaatttcagttttgcctattcaccccctttaggcgactttcagtagtgtagtggtagctacgagcacatttgcttaagtggcctcgggtttgaatcccctaagggccatttatgttttttaacccagccttagctaggtgtgcgatgtatatgggaatgggctttgcggggatgggagaatgaaaaaggcaacaaggaatgagaatgatagaacagagagtagtggcagaacatgagaatggactgtgcggggaggggaatgagaatggtagaacggggaaggagggaatgggaatgacagaacacggaatggcagcaatatatataataggtgagtgcccgtgcgttgcaacgggaacatataatatcatgataacttatatacaaaatgtgtcatacataaattttgttattttaattcagttgtttcactactacattgcaaccatcagtatcatgcagacttcgatatatgccacgatttgcatggtcttatcattgaagagcacgtgccacacctgccggtagaagtttcctcgttagtcatcaaacatgcaccaccatacacgcttgcttaaataaaaaggcaagtgtgtgtgttgcgaagagaattaaagacatgccggcacaaaagctaccccgacgataaagagtggtcattgttgtcggtcctcctctgcgtcaccttcagcgccgagatgacaccacaatccttgatatagtagtcgtcgaacgcgcgcgacatggcgagtaccgatgactcttggctgggctgccaaacgaagtgcaccctgtgctcattagtgaggtagtacacctagccgttgcaccaccggatgtgctactcctctacatacatcttgtttgaggacactcacacaatgtcagcaacgaccctcgtcccagcgcacaagaattcatggccggtgagtagcgacttacgtggcaggtcgggcttcaggtggatgatgagctggacggcgtgatggcgccgtcgtcggatgcggtgcccagaacaacacgagagtcgccggcgttggcgacgaccatgaggtccccctgtttgacgatggaaagcacggtgcaaccgctctggaccgtgttcaagcggcggctgcgctggaggttgccgtacatagcgacgcatacggccacgtaggactgcttcgagaggtcgaactgacagtcgccaagcttcttctcatcgtcgatgagcgacgccaacgcgagcgcctcctgctagtggtgtttgttcggggtttccaagtaagaaacatggattcatttttgacgttggtttataaaaatgactcaaagtcagatccatgaaaaaatattacggagaaaaatgtcacacatgcaaaaaaaagaatttaagttgaaaacattattcaaacaaaaggaattgcatgcaaagctcttcttaaaatactactccctccatccaaaaatataagtcaagaatctcggtgatacttatctattgctacacatgtgcaatggtagcaggtgggcttcgtgagagatgtagtagatgtttttattataatagatgtagatataaacacacatgtagtgtagtggtagccaagtggtctcgagttcgaatccccttagggccatttatgttttttaatttaattttagctaggcgtggaatgtatatggaaatgagaatgagttttgcggggacgggagaatgagaaatgcaacaaggaatgagaatgacagaacaaaaaatagtggcagaatataagaatggactgtacggagaggagaatgagaatggtagaacgcgaaaggagggaataagaatgacagaacacgaaatgatagactatccttagtgtcttaataagtagtacatatgttggactaaaggccccaagagtaacagagcgttaggtatgtatcttcttacatagcatttctttatttaattgacctagtgagtactagtgagtattgcactaactctaatcggttaattcaggattatccgaatccgaatccaattttccggtacccaaatttttagatacttattttggatacaattcatcatatatctactttcaaaactcaaattttgcaaaattgagttacctgacctaatttttttttaacccgaatgtccacacctcgttcggtaggtcccactttagggcgccagtctataaaaaacggcggtctgccctaaagccctctctcccaaagccatcttccttccgcggactagttttttctgaagattcggcg

SEQ ID NO: 106 - DNA, 3137 bp, Zea mays
  source 1..3137: mol_type = unassigned DNA
tccaagggatgacaacgaagactcttcgttgaaaaagaaaacggtcaatcaaaactattcttttgattattctcgcatcccttataattcgaatgcccatttactatctaactccacttggaaaacccccacactttgatggagaagactattcattttggagtcataaaatgtgtagtcacttattttctctccatcctagtatttgggaaattgttgaaaatagaatgcattttgaaagggaaatggaattaaccatttcttataatcggttttgatggttgatgtcgaacacaaatcgcgtggactaactagtttgcctagatatcatttatctcaggtccataaggttcaacacaaaccaaaaaaaaatcagttagggactcaaccaaaaattggagcaagacatagagtgtgatgatttttggcgcaccagacactgtctggtgcaccaggccaggcgcccttcgaacaggccactctcgagaatttagaggcgcgcttcgctataattcgccagactatccggtgtgccaccagactgtccggtgagccagcggagcaacggctccctgtgcgccaacggtcgactgcaaaacgctacagtgcagaacagtgccgtgacagaagtcagacagcagaagtcagaggtcaccggactgtccggtgtgacatcggactgtctggtgtagcaaaagacaaacacctccaacggtcaactgctccgaaccctaacggacgcgctgacgtggtgcacactagacagtgaacaatgactgtccggtggcgcacccggactgtccggtgcgcccatcgtcagcagcctttgccaacggctaggaagtggttgggggctataaatacccccatccacctcattcattggcatccaagttttcataagttcacattcaatacaagagatataacattcactccaagacataattccaatgaccaaaacctctccaagtcctaaattcaactcaaccatttagtgacttgagagagggtttttgtgttcacttgaactcttgttgcttggattgccttcttcctttctcattcatttctcaagtgctttgtaaagctaagtaagagacaccaagtgtgtggtggtccttgcggggtcttagtgacccgtgtgattaagggaaggctcactcggtctaagtgaccgtttgatagagagggaaagggttgaaatatacccggcctttgtgacctcctcaacggggactaggttctttggaaccaaccctcgataaaaacaaatcatcgtgtctgctcgctttgattctcgtttgatttgtttgccctctttcctctctctaacgtttccttgctagtattaaattgagttcgctcccatacgtcatctgcatcctttgagcaactcttagcaagagaaacaacctttcagacttgaattaaattctaacgctaaccccgacctttagtgtgtgtttaagtttataaattttaggcttcgcctatccaccccctctaggtgacttttatatttcgatagcactgataatcctgtattcataaatgagcaaatacataaaaatgcccaagccattactgttttgctagcatctctatgcagggatgaatacaacaaagtaagcgacttggacaacgctaagcaaatatgggatacccccaagatctctcacaaggggaatgatgccaccatgatcaccaagatggaactggtggaaggcgagctggggaggttcgccatgataaggggagaggagccaactcaaacttacaataggctcaagacccttgtcaacaagattcgaagctacgagagtataagatggacggatcatgatgtcgtccgactcatgctaaggtcatttaccgttatggatcctcatcttgtaagtcttattcgtgagaaccccgagtacaccaagatgacgtccaaggaaattctcgaaaaattcgtgagcgggggcatgatggtgaaggaagcgaggtatgtggacgatgctctaaacagatcgcttcctctccacgagccacaacccgttgctctcaaagcaactagcagcaaggaagcgctacacaacaagtggaggctgccgggctcaacaaggatgaaatgacgcttataatcaagcgcttcaagaccgccttaaagggacgcaaggagtacctcaacaagaacaagtcaaggggaaagcgctcctgctttaagagcggtaagtctagtcattttaatagcataatgtcttgataatgacaatgaccagcaggtgcccatatgtgattcttaatagtttaattagtatatagtatagatatagattatttcatgacatacattaaaccgtgatattataaattgtagttttgagaagaaaaaaaatccaaaacatgccctaatgtgctggccactcgtaatccgactgacaaggctcgaacaggcgatgtgcggaattttgggccggtgcttcgccccgtgcagcccaaataaaagcccaggaagcgcttgcggacctagggtttacgaggacgcccccagtataaaataggcgaggggctgcatcccacagccgccactgcaaccccggaacagagcgaggcgacgccgaggcacctcatctccggtaagtgagatcccttctcttgtggcattcgacgatgttttgttgggtccagtatcttgctgtcggctgtattttttgtggtaaagttagggcggttcaagctgatgctgattagcgttcaaatcccagtgctcagtacttcactagtcgatgcgtttgaatgattcgactggtgatttgcggggcgtactccgcatgattcgtcgttggttaggtagctgtggcattctcgcattttatttttcacttgttctgtgttaaaggttaattgcagccttgttcttagctcagttacatctggtagcgaaatggtgcgtagggctatccatcttagaaaaaccgacccaaatgttcagctttagataagagttgttgcatattgcttcctcatgcaacaagcaaccgtaactattccccagatggtcaggtgatcagttttctccctgtttaatgttgcaagggaatctcacatttgccagttgatattttcgactatttaggcgaagggaa

SEQ ID NO: 107 - DNA, 1682 bp, Oryza sativa
  source 1..1682: mol_type = unassigned DNA
atccctcagccgcctttcactatcttttttgcccgagtcattgtcatgtgaaccttggcatgtataatcggtgaattgcgtcgattttcctcttataggtgggccaatgaatccgtgtgatcgcgtctgattggctagagatatgtttcttccttgttggatgtattttcatacataatcatatgcatacaaatatttcattacactttatagaaatggtcagtaataaaccctatcactatgtctggtgtttcattttatttgcttttaaacgaaaattgacttcctgattcaatatttaaggatcgtcaacggtgtgcagttactaaattctggtttgtaggaactatagtaaactattcaagtcttcacttattgtgcactcacctctcgccacatcaccacagatgttattcacgtcttaaatttgaactacacatcatattgacacaatattttttttaaataagcgattaaaacctagcctctatgtcaacaatggtgtacataaccagcgaagtttagggagtaaaaaacatcgccttacacaaagttcgctttaaaaaataaagagtaaattttactttggaccacccttcaaccaatgtttcactttagaacgagtaattttattattgtcactttggaccaccctcaaatcttttttccatctacatccaatttatcatgtcaaagaaatggtctacatacagctaaggagatttatcgacgaatagtagctagcatactcgaggtcattcatatgcttgagaagagagtcgggatagtccaaaataaaacaaaggtaagattacctggtcaaaagtgaaaacatcagttaaaaggtggtataaagtaaaatatcggtaataaaaggtggcccaaagtgaaatttactcttttctactattataaaaattgaggatgtttttgtcggtactttgatacgtcatttttgtatgaattggtttttaagtttattcgcttttggaaatgcatatctgtatttgagtcgggttttaagttcgtttgcttttgtaaatacagagggatttgtataagaaatatctttaaaaaaacccatatgctaatttgacataatttttgagaaaaatatatattcaggcgaattctcacaatgaacaataataagattaaaatagctttcccccgttgcagcgcatgggtattttttctagtaaaaataaaagataaacttagactcaaaacatttacaaaaacaacccctaaagttcctaaagcccaaagtgctatccacgatccatagcaagcccagcccaacccaacccaacccaacccaccccagtccagccaactggacaatagtctccacacccccccactatcaccgtgagttgtccgcacgcaccgcacgtctcgcagccaaaaaaaaaaaaagaaagaaaaaaaagaaaaagaaaaaacagcaggtgggtccgggtcgtgggggccggaaacgcgaggaggatcgcgagccagcgacgaggccggccctccctccgcttccaaagaaacgccccccatcgccactatatacatacccccccctctcctcccatccccccaaccctaccaccaccaccaccaccacctccacctcctcccccctcgctgccggacgacgagctcctcccccctccccctccgccgccgccgcgccg

SEQ ID NO: 108 - DNA, 2369 bp, Zea mays
  source 1..2369: mol_type = unassigned DNA
ggcatccggcagccagcgcggtccttcccaaccactcgttcccaacccatcccccttcctcgcccgccgtcataaatagccagccccatccccagcttctttccccaacctcatcttctctccttttgctcggaacgcacacaccgcccggtctccgatctccgatccccgatcccctcgtcgatccaaggtacggcgaccatcctcccccccccccccccccctctctctctgccttctctagatcggcgatccgatccatggttacttggttagggcctgctaactatgttcatgtttgcgttagatccgtgcatggacgcgatctgtacacaccagacgcgttctgattgctagctaactcgccagtacctgggaatcctgggatggctgtagccggccccgcacgcagacgggaccgatttcatgattctctatttttttctttgtttcgttgcctagggtttcgttcgatcgatccgcgttattctttatttccatatattctggtacgatgttgatacggttcgaccgtgctgcttacgttctgtgcgcttgtttgccgggtcatttttaccttgccttttttgtatggtttggttgtggcgatgtggtctggtcgggctgtcgttctagatcggagtagagtgctgtttcaaactgtctagcggatctattagatttggatctgcatgtgtgacatatatcttcgtagttaagatgatgcatctgtatgtgtgacatgcggatctattagatttggatctgtatgtgtgacatatatcttcgtagttgagatgatgcatctgtatgtgtgacatatatcttcgtagttaagattatgcatggaaatatcaatcctttagataaggacgggtatacttgttgctgtgggttttactggtacttcgatagatgcatatacatgatctaacatgcttagatacatgaagtaacatgctgctacggtttaataattcttgagttgatttttactggtacttagatagatgtatatacatgcttagatacatgaagtaacatgctcctacagttcctttaatcattattgagtacctatatattctaataaatcagtatgttttaaattattttgattttactggtacttagatagatgtatatatacatgctcaaacatgcttagatacatgaagtaacatgctgctacggtttagtcattattgagtgcctatatattctaataaatcagtatgttttaaattattttgattttactggtacttagatagatgtatatatacatgctcaaacatgcttagatacatgaagtaatatgctactacggtttaattgttcttgagtacctatatattctaataaatcagtatgttttaaattatttcgattttactggtacttagatagatgtatatatacatgcttagatacatgaagtaacatgctactacggtttaattgttcttgaatacctatatattctaataaatcagtatgttttaaattatttcgattttactggtacttagatagatgtatatatacatgctcgaacatgcttagatacatgaagtaacatgctacatatatattataataaatcagtatgtcttaaattattttgattttactggtacttagatagatgtatatacatgctcaaacatgcttagatacatgaagtaacatgctactacggtttaatcattattgagtacctatatattctaataaatcagtatgttttcaattgttttgattttactggtacttagatatatgtatatatacatgctcgaacatgcttagatacgtgaagtaacatgctactatggttaattgttcttgagtacctatatattctaataaatcagtatgttttaaattatttcgattttactggtacttagatagatgtatatatacatgctcgaacatgcttagatacatgaagtaacatgctactacggtttaatcgttcttgagtacctatatattctaataaatcagtatgtcttaaattatcttgattttactggtacttagatagatgtatatacatgcttagatacatgaagtaacatgctactatgatttaatcgttcttgagtacctatatattctaataaatcagtatgtttttaattattttgattttactggtacttagatagatgtatatatacatgctcgaacatgcttagatacatgaagtaacatgctactacggtttaatcattcttgagtacctatatattctaataaatcagtatgtttttaattattttgatattactggtacttaacatgtttagatacatcatatagcatgcacatgctgctactgtttaatcattcgtgaatac

SEQ ID NO: 109 - DNA, 978 bp, Zea mays
  source 1..978: mol_type = unassigned DNA
gtgcagcgtgacccggtcgtgcccctctctagagataatgagcattgcatgtctaagttataaaaaattaccacatattttttttgtcacacttgtttgaagtgcagtttatctatctttatacatatatttaaactttactctacgaataatataatctatagtactacaataatatcagtgttttagagaatcatataaatgaacagttagacatggtctaaaggacaattgagtattttgacaacaggactctacagttttatctttttagtgtgcatgtgttctcctttttttttgcaaatagcttcacctatataatacttcatccattttattagtacatccatttagggtttagggttaatggtttttatagactaatttttttagtacatctattttattctattttagcctctaaattaagaaaactaaaactctattttagtttttttatttaataatttagatataaaatagaataaaataaagtgactaaaaattaaacaaataccctttaagaaattaaaaaaactaaggaaacatttttcttgtttcgagtagataatgccagcctgttaaacgccgtcgacgagtctaacggacaccaaccagcgaaccagcagcgtcgcgtcgggccaagcgaagcagacggcacggcatctctgtcgctgcctctggacccctctcgagagttccgctccaccgttggacttgctccgctgtcggcatccagaaattgcgtggcggagcggcagacgtgagccggcacggcaggcggcctcctcctcctctcacggcaccggcagctacgggggattcctttcccaccgctccttcgctttcccttcctcgcccgccgtaataaatagacaccccctccacaccctctttccccaacctcgtgttgttcggagcgcacacacacacaaccagatctcccccaaatccacccgtcggcacctccgcttcaag

SEQ ID NO: 110 - DNA, 3118 bp, Zea mays
  source 1..3118: mol_type = unassigned DNA
acgatgttcttctttatctttgttttctttagaaaaaaatagggtaattttttttctcctctcttcattggctggtagctgttgccataaccatcacgatgacctggtcaattcttcttaccccaacacaaattcatcattcaaatgcgacgaaggatgaagtcacagtcactctcccgtcactaggagtgataacatagtctaaactttacactatataatttagggatcggatcgaataaggatcaaacactatttctatttattttttaaactaaaattaatttagcgttctaacaaattgtaaagaaatatttggatcacgatagatttgtgtttgtcaatttgccgtggttttggaaactgggagacaatagatttatgtttgacggggaggcaagcgcggactaacaccgaatggtggatcatgaggatccaaacaagtaactgagacactggaattatactggttcaggctttcgccctagtccaatgtagtgttgatcgtagtatttcttttgaggcgtgttagagcaggtgtgcttgtgtgtcgaaagaaagttgccttacccctttttatagctcaagggtgggttttacagtgggaacttgtattctactgggagtaggctcggcttgctgcctgcggatggtgagtcctcctaacgtcgttcgtagggtcgtgcaatgtcgtgcccctagtatggcgttccatcttgtccatttggtatacgagtccctatagcttgctcggtgccaacgttgtggtacctggcgggtcccgcgaagtgggcttacagcgaggttgagggttgtgttcggtactgcttcatctttcgtcataccccacacgccactatcaagcatgcgtaggtatacgcctagtatagggtattgtctcgtcctttccagtgtatgggccactgtagagactccggtgatgaggtctccacgactggaattgactgaccccacgagtcagtgagggtatgtccgtcgacgcacgcgggggtgttccatcgtgtctgccaaaaaccttttgctactgtatgtacggtccaaacgtggtttggtgatgttgcgtcttttcacgaccgtcgtgggccgacagcgtcgtcctaggttcctttcttgcggatccgttcggcaaggacttggtcattcgtcctgtctcgtagacttgctcggcagggacttggtcggtcaccccgtctcgcagacttgctcgtccgggacttggtcgttcgcccctcctcgcatacttgctcgacggggacttggttgctggtcccgtctcgcaaacttgctcgatgaggacttggacatttgctccgccgagtagacttgctcggcggggacttggtcgttcgccccgcatcatagacttgctcgacacagactcagttggtaaatgggccagagaggggtttgtgggggtatcccgttcttgggtacttgacacaattatttgtagtttttacctgttaaaacttcaaatatgatgttcatattcatatctttattggtatcactcttcgtgtatacatttatttatcctatgtacatgcaatgtaaatgatacatagtgcatattgaccttatttttaacatgtacttctttcaaagcaaaccacccgcgaagtgtcacaatgcatacatccttcggtgtcgagggacctcatcatgaggcccctgcccccctaagtctagcttccaatgtcatttaaggaagaagatgagtttcgaggcctttagggcctctgaggttctaccgaacaatctaggttatctttgtctcttagatcccctgcatcagacccctcttggacctcgaccttggagcccttcaaggttctgaagccctcttgagatctatggctcttaatgtgggaacccaagcttctctcttgactaagtacaagaatgctccacattgaggcatacaactagttgtaacccccgggcaagaagtaccatgggagtatggtcccatagccacaactgtctctacttaagacgaccatgtgatactaatgttccgaataaagcttttgcacatcacattaatgtgatggatgatattgtggtcaagcaggcatatggtagccaccacaaaggatatgaagcatacccaaatccactatgaggagtgtgtcgcgtacctatgccacacctaaatgtgctaatttacctgtaagcattataaaatataagcaattacaccgtatctgatggcatggactcgagtacataactatgatatgatatatttctcactgccgcaagatatgcatattacaatgacatgttcaagcgccattgtggtccgcgtagagtcctcgtctctaacaagatgaagtaatcgagcatgttcactacgaaccaacatgtgatcctcctcttcttcgagctataaaatattcatccagcttaaatttcaaaatatgtgtgtcagagttaaaaaaatattcgattcaaatctaaatatcagttctgtattcatatcctagaatattcgaatctatatttgaattcagattacaaggtagtgaattgtgacatgtattcgttcctatccgatccgtcgtttttgagcactaggtgcggtcactgtgacgcgtggacttggcttcgcccactgccatcgtggacccacgtcatcagcaagtgtccatatccaccacccgacccgacgaccgcttgccgtccgatccgtgtgctcccgagggcaaggatggcatttcgccacgcgagatatttttcggtggcctgcacaggccggcagtgcagcggccaaaacgaggtcaggtcagtcacgctgggccccgcctcacgctcccgtcctgctccgggtcccaacaaagccgtccccgggaggtgctcgtgtgctcgtagcgcggtggcgaccccgatgccccgcatattccactgggcgtccgcgccgtcggatgggatcaggacggccgcggcggccccgcgctcggctataaagacgctgcgggggacgcattccctctccgtgctttcttagaggtgggttggcttctcctccccctccggttcgggttcgggttcgtgaggttctccggggttcgggttcgtgggtgagcggatcgag

SEQ ID NO: 111 - DNA, 2792 bp, Zea mays; identical to SEQ ID NO: 98
  source 1..2792: mol_type = unassigned DNA

SEQ ID NO: 112 - DNA, 2725 bp, Zea mays
  source 1..2725: mol_type = unassigned DNA
tccggcgtgccaccggactgtccggtgcaccagcgaagcaacggctatccagcgcaacggtcgactgcaacggacgcctgcaacgctacactgcgcgaacagtgcgcgcagaagtcagagcagtcgccagaggcgcaccggactgtccggtgccactagaagacaaagcctccaacgatcagaagctcccgaaccctaacggttggatgacgtggttggcgcaccggattgtccggtgcgcccatcgacagcagccatccccaacggctatgtggtggttgagggctataaatacccccaaccaccaccactccaagcatccaagtttctagcacttcacattcaatacaagatttattgcattcactcctagacacaaatcaaaagaatcaaagcctctccaagtgccaaaaatcattccactcacctagtgacttgagagagagttttgttcgtgttctttgcgctcccgtttcttggatcgctttctttcttcctcattattgttctcaagtgacttgtaatcaaagcaagagacaccaagagtgtggtggtccttgcggggtctaagtgacccgattgattaaggagaaagctcatccggtataggtgaccgtttgagagagggaaagggttaaaagagacccggtctttgtgaccacctcaacggggactaggttctttataaccgaacatcggtaaaacaaatcaccgtgttcatccgctttatttcttggttgatttgttttcccctctcttttggactcgatatttgttctaacgctaaccccggcttgtagtgtgtgcttaagtttataattttcagattccgtctatccacccccctctaggcgactttcacatggccacgcccacgtccacaaactgaacgaatagatccctgtgaaccctgtgatgctcactttccacaaccatgccctatccccaatggtggtagtccatctgcaggaacacctagcatatgaaaataaaacataacaatcacaaataatattcacaaaaatatatctctaaatagacttgctaccaaaatatatttcgtcacgaatgttagtagattttattttttccgaagtagcagaattcatcagtttgcatataaatgcatcaaggtttgagcactgacgagcattgtattgtgccccctggatctactaacaccaagacgcactaccgcagcagcgcaggagcagacgagggagccagcccagcaggcatgggcgtgcttcggagcacgcaaagccttgaggcggaggtggacgagctgcgcgccgcgctcctggcgggcgggtggcaccgctcggctggccacgcggacgccaagcgcgctccccagggcgatgccagaggggccgcagcgcgcgccgtgtgcgtcactcgcggcatctccttcgtcgggttcgccgtcgtcgaccgcctcctccggcacgggtacaccgtccgcctcgcgttggagacgcaaggtaccaacgtcccgtccgtcctcccccacactaacctacccggctacttctctcgctcgctctgaagctctcgcgcccctcggcccggcctgggacaattggtttgggacaagggtatccggccgcgcggacagaggcaataagtaccaacggaatgtacctgtaggtgcgccagtgctggactcgagagagacagagctgcatccaacgtcggtgcctcccgcggtgcctcgcgccaggctaccagtacttccgcgcccaacaccacgccccaagctggttgatgcacgcccaacgccggtagttctatgcccccgtgatacaccgccgccgcgtccaacgccatgccccaagccgtcacccacgtcaaggctgcagacgtctccttcctcctccatgccgacatggtctacgctcaaatcgaagatgagctcaagccgcaacaacaaatttcggtgctcccaagcttcataaaggctatcttcggcgtcgttgggatccatggtggcacagaatcgagttgatgttgtagctggcggctagggtttgaagtggagaagaggtccggctggtggcatcctatcgtctattgagggttgggtccggtggcatcatacttgatgacaattgaaagtaattttaatcaacttgtcatgagtagtgagtcttttataaaaaataagctgaaataagcaccctttgatgagcttataggattatcataatctcaaatgctaaattatataattttattagataagttgcttgtttgtttccccactagcttatttacattggattatataatctacataaattataatctcaaacaaaaagtccttaatcagagatcagcgaggtctcacgagtgagaaggcgagagcttgtccaaacgagcattttcgggcgtgtgaacacccatttcagcaaagccgtcgttgtccagttcagcgaagcgcattctgcggctttggcgtgacccattctgctagctcagcactgagaatacgcgtccgctgcagcgttggcgtacaggccggactacattagccaacgcgtatcggcagtggcaaaccctcttcgcttctaactccgctgggccaccagctttgaccgccgcctcccttcccctccgctactgctcctccccaccccactcccccgcaggagcggcggcggcggcggcgaggtcgtaccccacatcggcgagcggcggcggcaccgccggaggcaaaggcaag

SEQ ID NO: 113 - DNA, 3773 bp, Zea mays
  source 1..3773: mol_type = unassigned DNA
caatctccaaccctaattatattactgcctcatagataaggcatcaacacagttataggatggcagatcatgggtctaataatgtaaaccttcgtttagatgttcctaaacaaacacatcgcaagtcaaagttccagtggcatttaaaaccatcagatcagacatgtgccgcaaaaccaacagaaaaaatcgaaaatagataaattttcctcacacaaactcgcaccgcacgactatcatatcaatgtcctgatatatagaacacggagaaaatcgggtacgacacctttgtggccgagacgatgctgcccccggaaaaccgccgcctcgtctcgatccttctcttgcgtcttgaatcggtcacggcactgcctctgggcctttttttccagtccgcctgtgcataaatggaagttgggcggggccaggtgcccaggtgtggctgtgtgggtgattggggaaggttctagacttccaacacagcgacgtgtgagggggagcgggggaaggggatgaggtgcagggaggagcggagcgcgccgcgacagctccccacggtgtcgccgcccaaaagggagaggggcgtcgtatcagggggaaggggatgaggcggtggttctggaagcgtcgcggaggccggttccgtccactaacgtggagcttcgagcggagagctttgcgagcgagaagagacatcaaccggtgattgacgatcggatggttcgaattttttttgacgacgtggatggctttatcgttgccgtttctgttcggcttcaatatataggaaatctcatcctctgtccctaccgaatttttcatgggtgctcctcctcccaatgatgatccaagcatagacacacctccttctcccactcaagttcctaccaccaacactcctgcatcattcaattatccatactctcctccgtacccgtatggatatccatacggttttcctctgtatagattgtatgatgctttttccccatacaaggatgtccatgggtatccgaaacctgaatacctgattagaagacgggtatgggatggttcctttaccaattaatgggaaagaacgtctactcgtttggtagacgggtataggtggatactaccccatacccgtctacccgtaaaaaatatgctcgcaacataccaatattatcatctaataaagcccatcttaactagaaggaaccccttgttcgaatattatttgtttaattatcaagttatgtagtcatgtggtttgttatatttgaagttcaacttatttttatatgtttgtttgtcattctgagtgattggcatattacaatttaagatttttctagcggtacgggctacccgatggataaaattacctacgcggggtatgtgtacgagtaagattgtatattgtgagtgtatatgggcaactcgacgaacatatttttttggtggatacaagtatggaatgctattacctgtcaggtttatattcattgccatctctatccccatatggtgattgtcctcctacattcgtgacaattccccaaggagcaacaggcgacattgatgtcacttcgaacaaatctgcttactttaatgcttcataattttaacaacaaagaggatggaggaagacaacagataaaatatcgataaatacacatatttaaaaaaaatccacactattttaggctcacaatagtttttaaagtccatatttcttagatccatgaatggctactacactcaattaactctattgatggcaacaataaaaagagatcaaaattatgggtaaatagccaacacatataactccaccgcataagcgcgtcaccacaatacccaaaacaactaaagaaccgatggtcgatgagcgatcataagatcaacctctttaacaacatctacaaccgtttgtgcacagcctgattgagtgacccaatgaggctatgctgctttaagcggttaaggaaaatttccacaacaagcatagaaaaaacaagttggagcacacgtgacacgttatgccattagctcaagtggtgcgtaaaacacgatgataatgactcgagtgatgagagaaaaagatatgttcttaacttggacgacaatcaaagctcaatgacatatgaaagtatggacacactatgctctattgtcaccatagggcaagagttcagtagaaggcaaattgttcgacaacaagctatgttggtcttttgattctgacgagtcaatgatagcttttcaatgatactattaactttctaaaattaggaagcaacaaaaaatctacaaaaaacatactttttaacttttggtaaaagctaaacttttttgagttttttcccgaaagcacgcctagtcagccaccagctggcacgcgagtctcccaacaataggagggaccacctgtcatgctgtgggaccacgaagaaaaccctccagagacgacgatagacctccgtccatagacgcggtctaccgtggtccggacgctcccggccgcgaattcaggtcgtggcgggccctgccgacccaactactggtccagaggcctccacgcgagccgtgggccgtggtctaggagccgggtccgcctatctacttgacggtcacggaaacccggacccggtaggaaggagctataaagacaagccaaacgagggcatcccttcttcagccgcacgcttcttgttgccaaagaattccctcccctagccgccgccgccgccgctcgtctccctgagaggtgccgggaccgaggaactggccgagtactaggtagagaatcggtttttcttgtctcagcccggggtctgctgcgtctggtggtggtgaaggggagaaattcgtgagatctgttccggatcaggcgtgcgagctcgggaatcaggggtttcacacatagcttcgtcgatttgtaagttttttctagccgattcctctctttttgtacgttttttgttattagattcgagatttgttggatgtgttggtttatgttgctgcctttctagatttctcggtgtgaatgtatgagggttggatccttaggcatgaaaacatagctacatggagttagctcgttttcttaagtcacgtggtggtcggcgttatacctgttgcttgatgcgttatccgtgctatcgctgttcagatttagataggtggatcggtcatttgttcgttgtacgtattttgttacttcaaaattgatgctaaccctgttaattgaaaattgatggcagtggatacgctccacctttgtttagatttggaaacatggttaggaaatatgtgttcatattaggaaacgtggataggaaatatggctcattaccctggtactcggaaaagtaaggaaaaactattaacctttttgtttaggttttgattcgtggacaagatctataaattcactgaaaagacgcatacgatttcttgtacaggtgatatcatgccatgtggaaagtaaatgaaatcatacaaggctgatttttgcttttgttcccatcagatctgtgatttagttttgttttcccaaacaggttatgtttggtcatgtactcatgtgaatgatatagatctgttgctctaattagttagaaacatttattttgggcatatatctttaatggcataactgtggtacgttgtgatggtttattttagctgtcgtgcctggatcatcaacatcttgttttatcttttatgagaagaatttttgttcgatttgatggatgtgttcaatattttggtcttccatgcag

SEQ ID NO: 114 - DNA, 2784 bp, Zea mays
  source 1..2784: mol_type = unassigned DNA
aagtatcaggctctgataccaattgaaagtcacctagaggggggtgaataggcaaatctgatttttataaactttaagcacaactacaagccggggttagtgttagaaataaagtcgagtccaaaagagagggtgaaaacaaatcacgagcaaataaagcgaatgacacggtgatttgttttaccgaggttcggttcttgcaaacctactccccgttgaggtggtcacaaagaccggatctctttaaaccctttccctctctcaaacggtcacttagactgagtgagcttctcttcttaatcaattgggacacttagtccccacaaggaccaccacacaattggtgtctcttgctttgattacaaatggcttgggaataagaaatggggaagaagaaaagtgatccaagcgcaagagctcaaaagaacacggcaaaactctctcttctagtcactaattgctttgagtggaattgggacttggagagattttgattcaatctatttgtgtcttgtattgaatgcactagctcttgtattgaatgtgttggctgaaaacttggataccttgaagtgtggtggttggggggtatttatagccccaaccaacaaagtggtcgttggggaaggctgctgtcgaagggcgcaccggacagtccggtgcgccactggacactatccggtgcgccagccacgtcacccaaccgttagggttctaccgtcggagctctgacaagtgaggccatcggacagtccggtggtgcatcggacaatcactgttcactgtccggtgcgccttttggcgcctgctctcacttctgcgcgtgcagtccgcactgttcactgttactgtacacttttgcagacgaccattggcgctgttagccgttgctccgctggcacaccggacagtccgacgctacatccgacagtctggtgaattatagcggagtggcattcccagaaacccgaaggtggcgacggtgcgccagaccagggcagccttcagttggttttgctcctttttatttaaaccctttcttggactttttattggtttgtgttgaacctttggcacctgtagaacttataatctagagcaaactagttagtccaattatttgtgttgggcaattcaaccaccaaaattatttaggaaaaggtttgagcctatttccctttcagccgccacccttgccgtcgtcgtcgccattgttgccatcgtcctcgttgcatgctcacgatgaggttgtacctgatggatcgcgcagagcatgctcacgatgaggttgaggtatggcgtgttctgtacgacttcatcctctgtcaatgctcttgcgtcaccttccatcatgcgtgggcatgcaccaggtatggcgtgttgtcatgtactttctggtacattggttgttactatggaggctttgttgctgtggtctcccttggtactgcatacatggcctaaacacggttgggtgatgttgtgtcttgtcgcggaagtcgtggatcgatggtgtctgtctgggttccctccttgcgggttcgcgtggcggggactcgatcgtccgtcctgcctcgtaggcttgcctgacgaggacttggtcgttcgtcctgcctcgcaggcttgctcggcgaggacttggtcgttcctcccacctcgcggacttgctcggcaaatgggtcgtggagagtatgggcctcactatgggcaccccatttcctggtacccgacatagtgactaaaagtgactaaaatgagctttttaccccaccacctgccctcccccacgtgagctatgcgctgaacgagcaaagaagtaaataggggtaatgcagtaaatatacgtagtagttaatgctctttagtcagatttagtcactgacaccaaacgagatactttagtgactactaaagtttagtcaggtgactaaagaaaccaaacataacccttagtgtgaaccgatttaggcacactagcatatatcccgtgttaacgctacgatcttgaagagggaggagtcaacgacggcggtggcgcaagtggataagttgacgacagcgacgatgacaatgtgagtgaggagaagggggcagtggggacgcagaggatggaagagggggagggggtggataggggcagcagggtgggaggagggagagcgcgagtgagggagagagggcgccgggacgcatgggaagaggaagagatgaatcaaataatattatatattaaatttgagtaagtaagagagatttatctaacgatccgaattgttggttttgatgatctgttaagtttaggtgtaatttgtttgatggatttagtgatgattatatgtgtgggggtgatttagtttggttggttttacaaaagtttaaattttttttagattatatagtggtatagatagtcaaacagtagcggcaatgacatcacggtaaatgcgcgttggcatccaaatgcagctggacacaggtcacacagcctaacggatatatcatatatgtgaatcctaactgtacactgtctgaagtggacgaacggctctggcttcggcgtgttacgtgtatagtaggccccttttgaacgaacggcgcgggccggggccaccaccagcatctgcggcagggagaatcgcgttggttcgacgcaaacgctacccggcgcccccttgcccttggggccggctattttaccgcacccgttctcccctctctaccgcagatcagatcacactcgtagagagaaggaaaaatatccccaaaccctagctcccgatctcg

SEQ ID NO: 115 - DNA, 1149 bp, Zea mays
  source 1..1149: mol_type = unassigned DNA
atgctgagctcggcatcctcggccgcgggagcggccatggggatgggcggcggcgggtacgcgcaccagcccccgccacagcgcacggtcttcaccgccgcgcagtgggcggagctggagcagcaggcgctcatctacaagtacctcatggccggcgtccccgtcccgcccgacctcctcctccccgtccgccccggccccgccgccgccttctccttcgccggccccgccgccgcgtcgcccttctaccaccaacaccacccgtccctgagctactacgcctactacggcaagaaactggacccggagccgtggcggtgccgccgcaccgacggcaagaagtggcggtgctccaaggaggcgcaccccgactccaagtactgcgagcgccacatgcaccgtggccgcaaccgttcaagaaagcctgtggaatccaagaccgcctcgtcgtcgtcgcccgcgcacccgtcgccgccccagctgtccaccgtcaccaccaccgcgcctctcgagccccttgcagcggcggggggcaaggtccacggcctgtccctcggcggcggcgctgctggctcgtcgcacctcggcgtcgatgcttcgaatgctcactatcgttatggtagcaacaggtaccctctcggagctaaaccggacggcggcgagttgagcttcttctcaggagcgtcatcggggaacaactcgaggggcggcttcaccatcgactctccatcagataacaactcgtggcactccgccctggcgtccagcgtgcccccgttcacgctgtcgacgaagagcggggactccggcctcctgcccggcgcctacgcctcctactcccagtcccactcccacatggagccgccgcgggagctcgggcaggtcaccatcgcctcgctggcgcaggagcaggagcgccagcagccgttcagtggtgggatgctcgggaacgtgaagcaggagaaccagaaccagccgctgcggcccttcttcgacgagtggcccgggacgcgggcggactcgtggccgccggagatggacggcgcgccgcgggccggcaggacctccttctcctcctccaccacccagctctccatctccatcccgatgcccagatgtgagctgcatctcagaaaccagaactcttga

SEQ ID NO: 116 - protein, 382 aa, Zea mays
MLSSASSAAGAAMGMGGGGYAHQPPPQRTVFTAAQWAELEQQALIYKYLMAGVPVPPDLLLPVRPGPAAAFSFAGPAAASPFYHQHHPSLSYYAYYGKKLDPEPWRCRRTDGKKWRCSKEAHPDSKYCERHMHRGRNRSRKPVESKTASSSSPAHPSPPQLSTVTTTAPLEPLAAAGGKVHGLSLGGGAAGSSHLGVDASNAHYRYGSNRYPLGAKPDGGELSFFSGASSGNNSRGGFTIDSPSDNNSWHSALASSVPPFTLSTKSGDSGLLPGAYASYSQSHSHMEPPRELGQVTIASLAQEQERQQPFSGGMLGNVKQENQNQPLRPFFDEWPGTRADSWPPEMDGAPRAGRTSFSSSTTQLSISIPMPRCELHLRNQNS

SEQ ID NO: 117 - DNA, 1260 bp, Zea mays
  source 1..1260: mol_type = unassigned DNA
atggcgatgccgtatgcctctctttccccggcaggcgccgccgaccaccgctcctccacagccacggcgtccctcgtccccttctgccgctccactccgctctccgcgggcggcgggctgggcgaggaggacgcccaggcgagcgcgaggtggccggccgcgaggccggtggtgccgttcacgccggcgcagtaccaggagctggagcagcaggcgctcatatacaagtacctggtggcgggcgtgcccgttccgccggatctcgtggttccaatccgccgcggcctcgactccctcgcaacccgcttctacggccaacccacactcgggtacggaccgtacctggggaggaaactggatccggagcccggccggtgccggcgaacggacggcaagaagtggcggtgctccaaggaggccgccccggactccaagtactgcgagcgccacatgcaccgcggccgcaaccgttcaagaaagcctgtggaaacgcagctcgcgccccagtcccaaccgcccgccgccgcagccgtctccgccgctccgcccctggcagccgccgccgccgccaccaccaacggcagcggcttccagaaccactctctctacccggccatcgccggcagcactggtggtggaggaggagttggcgggtccggcaatatctcctccccgttctcctcgtcgatggggggatcgtctcagctgcacatggacagtgctgccagctactcctacgcagctcttggtggtggaactgcaaaggatctcaggtacaacgcttacggaataagatctctggcggacgagcacaaccagctgatcgcagaagccatcgactcgtcgatagagagccagtggcgcctccccagctcgtcgttcccgctctcgagctacccacatctcggggcgctgggcgacctgggcggccagaacagcacggtgagctcgctgccgaagatggagaagcagcagccgccctcgtccttcctagggaacgacaccggggccggcatggccatgggctccgcctccgcgaagcaggagggccagacgctgcggcacttcttcgacgagtggcccaaggcgcgggactcctggccgggcctctccgacgagaccgccagcctcgcctcgttccccccggcgacccagctgtcgatgtccatacccatggcgtcctccgacttctccgtggccagctcccagtcgcccaacggtgagtcgcgtacgttcctgctggccacggaccgaaggtga

SEQ ID NO: 118 - protein, 419 aa, Zea mays
MAMPYASLSPAGAADHRSSTATASLVPFCRSTPLSAGGGLGEEDAQASARWPAARPVVPFTPAQYQELEQQALIYKYLVAGVPVPPDLVVPIRRGLDSLATRFYGQPTLGYGPYLGRKLDPEPGRCRRTDGKKWRCSKEAAPDSKYCERHMHRGRNRSRKPVETQLAPQSQPPAAAAVSAAPPLAAAAAATTNGSGFQNHSLYPAIAGSTGGGGGVGGSGNISSPFSSSMGGSSQLHMDSAASYSYAALGGGTAKDLRYNAYGIRSLADEHNQLIAEAIDSSIESQWRLPSSSFPLSSYPHLGALGDLGGQNSTVSSLPKMEKQQPPSSFLGNDTGAGMAMGSASAKQEGQTLRHFFDEWPKARDSWPGLSDETASLASFPPATQLSMSIPMASSDFSVASSQSPNGESRTFLLATDRR

SEQ ID NO: 119 - DNA, 684 bp, Zea mays
  source 1..684: mol_type = unassigned DNA
atgcagcagcaacacctgatgcagatgaaccagaacatgatggggggctacacctctcctgccgccgtgaccaccgatctcatccagcagtacctggacgagaacaagcagctgatcctggccatcctcgacaaccagaacaatggcaaggcggaggagtgcgaacggcaccaagctaagctccagcacaacctcatgtacctggccgccatcgctgacagccagccgccacagaccgcgccactatcacagtacccgtccaacctgatgatgcagccgggccctcggtacatgccaccgcagtccgggcagatgatgaacccgcagtcgctgatggcggcgcggtcctccatgatgtacgcgcacccgtccctgtcgccactccagcagcagcaggcggcgcacggacagctgggtatggctccagggggcggcggtggcggcacgaccagcgggttcagcatcctccacggcgaggccagcatgggcggtggtggtgctggcgcaggcgccggcaacaacatgatgaacgccggcatgttctcgggctttggccgcagcggcagtggcgccaaggaagggtcgacctctctgtcggttgacgtccggggtggaaccagctccggcgcgcagagcggggacggcgagtacctcaaagtcggcaccgaggaagaaggcagttag

SEQ ID NO: 120 - protein, 227 aa, Zea mays
MQQQHLMQMNQNMMGGYTSPAAVTTDLIQQYLDENKQLILAILDNQNNGKAEECERHQAKLQHNLMYLAAIADSQPPQTAPLSQYPSNLMMQPGPRYMPPQSGQMMNPQSLMAARSSMMYAHPSLSPLQQQQAAHGQLGMAPGGGGGGTTSGFSILHGEASMGGGGAGAGAGNNMMNAGMFSGFGRSGSGAKEGSTSLSVDVRGGTSSGAQSGDGEYLKVGTEEEGS

SEQ ID NO: 121 - DNA, 1983 bp, synthetic construct
  misc_feature 1..1983: note = GRF4~GIF1
  source 1..1983: mol_type = other DNA
atggcgatgccgtatgcctctctttccccggcaggcgccgccgaccaccgctcctccacagccacggcgtccctcgtccccttctgccgctccactccgctctccgcgggcggcgggctgggcgaggaggacgcccaggcgagcgcgaggtggccggccgcgaggccggtggtgccgttcacgccggcgcagtaccaggagctggagcagcaggcgctcatatacaagtacctggtggcgggcgtgcccgttccgccggatctcgtggttccaatccgccgcggcctcgactccctcgcaacccgcttctacggccaacccacactcgggtacggaccgtacctggggaggaaactggatccggagcccggccggtgccggcgaacggacggcaagaagtggcggtgctccaaggaggccgccccggactccaagtactgcgagcgccacatgcaccgcggccgcaaccgttcaagaaagcctgtggaaacgcagctcgcgccccagtcccaaccgcccgccgccgcagccgtctccgccgctccgcccctggcagccgccgccgccgccaccaccaacggcagcggcttccagaaccactctctctacccggccatcgccggcagcactggtggtggaggaggagttggcgggtccggcaatatctcctccccgttctcctcgtcgatggggggatcgtctcagctgcacatggacagtgctgccagctactcctacgcagctcttggtggtggaactgcaaaggatctcaggtacaacgcttacggaataagatctctggcggacgagcacaaccagctgatcgcagaagccatcgactcgtcgatagagagccagtggcgcctccccagctcgtcgttcccgctctcgagctacccacatctcggggcgctgggcgacctgggcggccagaacagcacggtgagctcgctgccgaagatggagaagcagcagccgccctcgtccttcctagggaacgacaccggggccggcatggccatgggctccgcctccgcgaagcaggagggccagacgctgcggcacttcttcgacgagtggcccaaggcgcgggactcctggccgggcctctccgacgagaccgccagcctcgcctcgttccccccggcgacccagctgtcgatgtccatacccatggcgtcctccgacttctccgtggccagctcccagtcgcccaacggtgagtcgcgtacgttcctgctggccacggaccgaaggggtggaggcggcagcggtggcggaggctccggaggcggtggcatgcagcagcaacacctgatgcagatgaaccagaacatgatggggggctacacctctcctgccgccgtgaccaccgatctcatccagcagtacctggacgagaacaagcagctgatcctggccatcctcgacaaccagaacaatggcaaggcggaggagtgcgaacggcaccaagctaagctccagcacaacctcatgtacctggccgccatcgctgacagccagccgccacagaccgcgccactatcacagtacccgtccaacctgatgatgcagccgggccctcggtacatgccaccgcagtccgggcagatgatgaacccgcagtcgctgatggcggcgcggtcctccatgatgtacgcgcacccgtccctgtcgccactccagcagcagcaggcggcgcacggacagctgggtatggctccagggggcggcggtggcggcacgaccagcgggttcagcatcctccacggcgaggccagcatgggcggtggtggtgctggcgcaggcgccggcaacaacatgatgaacgccggcatgttctcgggctttggccgcagcggcagtggcgccaaggaagggtcgacctctctgtcggttgacgtccggggtggaaccagctccggcgcgcagagcggggacggcgagtacctcaaagtcggcaccgaggaagaaggcagttag

SEQ ID NO: 122 - protein, 660 aa, synthetic construct
  REGION 1..660: note = GRF4~GIF1 PRT
MAMPYASLSPAGAADHRSSTATASLVPFCRSTPLSAGGGLGEEDAQASARWPAARPVVPFTPAQYQELEQQALIYKYLVAGVPVPPDLVVPIRRGLDSLATRFYGQPTLGYGPYLGRKLDPEPGRCRRTDGKKWRCSKEAAPDSKYCERHMHRGRNRSRKPVETQLAPQSQPPAAAAVSAAPPLAAAAAATTNGSGFQNHSLYPAIAGSTGGGGGVGGSGNISSPFSSSMGGSSQLHMDSAASYSYAALGGGTAKDLRYNAYGIRSLADEHNQLIAEAIDSSIESQWRLPSSSFPLSSYPHLGALGDLGGQNSTVSSLPKMEKQQPPSSFLGNDTGAGMAMGSASAKQEGQTLRHFFDEWPKARDSWPGLSDETASLASFPPATQLSMSIPMASSDFSVASSQSPNGESRTFLLATDRRGGGGSGGGGSGGGGMQQQHLMQMNQNMMGGYTSPAAVTTDLIQQYLDENKQLILAILDNQNNGKAEECERHQAKLQHNLMYLAAIADSQPPQTAPLSQYPSNLMMQPGPRYMPPQSGQMMNPQSLMAARSSMMYAHPSLSPLQQQQAAHGQLGMAPGGGGGGTTSGFSILHGEASMGGGGAGAGAGNNMMNAGMFSGFGRSGSGAKEGSTSLSVDVRGGTSSGAQSGDGEYLKVGTEEEGS

SEQ ID NO: 123 - DNA, 124 bp, Zea mays
  source 1..124: mol_type = unassigned DNA
agatgagttttttgaaggtttgacagaagagagtgagcacacacggtggtttcttaccatgagtgtcatgctaggagctgtgcgtgctcaccctctatctgtcagtcactcatcaagcccatct

SEQ ID NO: 124 - DNA, 465 bp, Zea mays
  source 1..465: mol_type = unassigned DNA
atggccaggccgcagcaacggtaccgcggcgtgcggcagcgccactggggctcctgggtctccgagatccgccaccctctcctgaaggcgcggatatggctgggcaccttcgagacggcggaggacgcggcgcgcgcctacgacgaggcggcgcggatcatgtgcgggccccgcgcgcgcaccaacttccccgccgacgccaacggcccgccgccgtcgttcctctccgcggcgctcgtcgacaagctgcaccggttcaacctggcgtccgtgcaggccgcgcagcggcagagagaggcggcggcggcggcggcggcagcagcagcaacctccgcgcccgcgacgcctccgacgccgccggccacgcagtggggcggcggcggtaggtccctggaggagcagcacgtggagcagatgatcgaggaactgctggactccgacttctccatggagatttgctgctag

SEQ ID NO: 125 - DNA, 2529 bp, Zea mays
  source 1..2529: mol_type = unassigned DNA
atgggaacaatggttgcagcggtggcgttgcgagggggaagcagcgatagcggaggatttgataaggttcccgggatggactcgggaaaatacgtgcgctacaccccggagcaagttgaggtgctcgagcggctctacatagattgccccaagccaagctcctcacggcggcagcaactgctgcgcgagtgtcctatactctccaacattgagccaaagcagatcaaggtctggttccagaaccggaggtgccgcgataagcagcggaaggagtcttcgcggcttcaggctgtgaacagaaagttgacggcaatgaacaagcttctaatggaagagaatgagcggcttcagaagcaagtctctcagttggttcatgaaaacgcgcacatgcggcagcagctgcagaatacttcattggccaatgacacaagctgtgaatcaaatgtcactacccctccaaaccctataagggacgcaagtaacccttctggactccttgcgattgcagaggagaccttcacagagttcctctcaaaggctactgggacagctattgattgggtccagatgcctgggatgaagcctggtccggattcagttggtatcgtggccatttcgcatggttgccgtggcgttgctgcccgcgcctgtggtttggtgaatctagaaccaacaaaaggcatagagatcttgaaagatcgtccctcttggttccgtgattgccgaagtcttgaagtgtttacaaggtttccagctggaaatgggggaacaattgaacttatttacatgcagatgtatgccccaacaactttagtccctgcacgtgatttttggacactacgatacacgacaacaatggaagatggcagccttgtggtctgtgagagatccttgagtggttctggtggtggtccaaatgcagcctctacacaacaatttgttagggctgagatgcttccaagtgggtatttagttcgcccatgcgaaggtggaggatcaattgtgcatatagtggaccatctagatctcgaagcatggagtgttcctgaagtgcttcgaccactgtatgagtcttctagagttgttgctcagaaaatgactactgtggcactgcgccaccttagacaaattgctcaagaaacaagtggagaagtagtgtacgccttgggaaggcaacctgcagtcctacggacctttagtcaaagactaagcagggggtttaatgatgccattagcggtttcaatgatgatggctggtctgtaatggggggagatggcattgaagacgttgttattgcttgcaactcaaccaagaaaattaggaataccagcaatgctgggattacatttggagccccaggaggcattatttgtgcgaaggcatccatgttactgcagagcgtcccaccggcagtactggtacgatttctgagggagcatagatctgaatgggctgattacaatattgatgcgtatttggcttcatcattgaagaccagtgcgtgctcacttcctgggttgcgacccatgagattttctgaggggcagatgatcatgccacttgctcacacagttgagaacgaggagattcttgaagttgtccgccttgaaggtcagcctcttactcatgatgaagctcttctttcaagggacatccaccttctccagctttgcactggaatagatgagaaatctgtgggttcctccttccagcttgtgtttgcaccaattgatgagcatttcccagatgatgctccattgatttcttctggctttcgtgtcataccacttgatgtgaaaacagatggtgtatcctctggtaggacgctagatttggcatctagtcttgatgtgggctctgctgcaccccaagcctcaggggaatctccagatgactgcagtttgagatctgtgctgacaatcgcctttcaattcccgtatgagatgcaccttcaggacagcgttgcagcaatggcccgtcaatatgttcgtagtgtcatttctgctgtgcaaagagtgtcgatggctatatctccctcccaatctggtctaaatgctgggcataggatgctttctggcttccctgaagctgccacacttgctagatgggtttgccagagttatcactaccatctaggtatggaattacttaatcaatcagatggagctggtgaagcattgttgaaaatgctctggcatcatccagatgctgttctgtgctgctcctttaaggagaaacctatgtttacgtttgcaaacaaggcagggctggacatgttagaaacatctcttgttgccctgcaagacctgacgctagacaagatcttcgacgagtcaggaaggaaagcactattctcagacatctcgaaactaatggaacagggctacgcgtacctgccgtcaggcgtgtgcatgtcaggaatgggccgccatgtttctttcgaccaagctgtagcgtggaaggtgctcggcgaggatagcaacatccactgcctggcgttctgcttcgtcaactggtccttcgtgtga

SEQ ID NO: 126 - DNA, 885 bp, Zea mays
  source 1..885: mol_type = unassigned DNA
atggaggacgtggccaacgcacacatctacgcccacgcccaccggagcaagcgtccccagtcggccgcgatcaaagacggggacggggacgtcgacctgtccatgaaaggcgcgcggtaccgcggcgtgcggcgccggccgtggggccggttcgcggcagagatccgcgaccccatgtccaaggagcggcggtggctcggcaccttcgacaccgccgagcaggccgcctgcgcctacgacatcgcggcgcgcgccatgcgcggcaacaaggcgcgcaccaacttcccgggccacgccacggcgggctactggccgtggggcgcgccgcagccggcggcggtggcgcacccgatcaaccctttcctcctgcacaacctcatcatgagctcctccaaccacggctgccgcctgctcaaccacgcaggccacggacacgtccactccgcagcccccagacctccggcgccggcggcggacgccacgtccacgaccatcgcagcgcccttccctgtcgccgcacaccccgccgtagcgatggacgaggacgtggacgactgggacggcgtcctgcggagcgagcccgcggacgccgggctgctgcaggacgcgctgcacgacttctaccctttcacgcgtccgcgcgccggcgggggcaggcgcggcctgtccgcggccggaaccgacgccagggcggcagctgcgttggtggcgccggtaaagccggatgctttcgtcgttcccagccctttcgccggcgtcgagggggacggtgaatacccgatgatgccgcagggcctgctcgaggacgtgatccactccccggcgttcgtggaggttgtggccgcgccgccgtccgtccccacgcgccgcggccgccggggctga

SEQ ID NO: 127 - DNA, 1251 bp, Zea mays
  source 1..1251: mol_type = unassigned DNA
atgctcggcgcacccggccacgacggcgacgacgccgcggagcgcgcgcaggagcaagccgccgccgccgcagcagcagcagccgacgatgctccctcctcgccaagaggtctcgtggtcgcgagcgccggtctcctccaccgcggcgacgtcgacggcgcccggcgcgcgacggctgaggtcctgtccaccatggaccagcggggcgacgcggccgaccgcctcgcgcaccacttcgcccgcgcgctcgctcgcctcgtggacgacaaggcggccgccgccgggggcggcgacgtcgccgcggcgcccgcgggaggggctccgccgcctgcgcccccggggccgacggcgtacctggcgtacaaccagatcgcgccgtttctgcggttcgcgcacctgacggccaaccaggcgatcctcgacgccgccgctagcaccagcggcggcgcgcggcggttgcacatcgtcgaccttgatgccgcgcacggcgtgcagtggccgccgctgctccaagccatcgctaaccgcgcggaccccgccgtcggtccgcttgaggtccggatcaccggcgctggacccgaccgcgacgtgctcctccgcacgggggaccgtctccgcgccttcgccagctcactgaacctccccttccgtttccacccgctccacctcccctactccgtgcagctcgccgccgacccgaacaccgggctggagctgcactcggacgagactctggccgtcaactgcgtgctcttcctgcacaggctcggcggcgagggcgaggtcgccacgttcctgaagtgggttaaatccatgaaccccgccgtggtgaccatcgccgagaaggaagccaatagcatcggcagcgacgactgttccgatgacctgccgcggcgggtgactgcggcgatgagctactactcggccgtgttcgacgccctggaggcgacggtgccgccgggcagcgctgaccgcctcttggtggagagcgaggtcctcggcagagagatcgacgcggcgctgacgccgggtcgcgtcggcgaacactcctgggggttcgatgcgtgggcctccgccgcgcgtaccgccgggctctcgcctcggccgctcagcgcgttcgcggtgtcgcaggcgcggctgctgctgcggctgcactacccgtcggaggggtacgtcgccgaggaggcacgcggcgcgtgcttcctcggctggcagacgcggccgctcatggcggtttcgtcttggcaatag

SEQ ID NO: 128 - DNA, 1269 bp, Zea mays
  source 1..1269: mol_type = unassigned DNA
atggtcttatggaggacaggaggagcatggtggtgctacctagcaagagctccccactataaagcgcccccacacaccataccacagctcagagcttcttctcatcatctggtagaaagaaagagtgagagtgaggttggcaagggtatagggttcttggtcgatcaaatacctttcccctcttggattctcatcttcctgcttcgttctcaccagatcgatctcaccacgtgcctgcgtagcaagccactctgtatgcaccatcaccaccaggaccaggccatgggcgacgcgctgtgggacctgctcggggaggagatggcagcggcgggcggggagcacgggctgcccccggggtttcggttccaccccaccgacgaggagctggtcaccttctacctcgccgccaaggtgttcaacggcgcctgctgcggcatcgacatcgccgaggtggacctcaaccggtgcgagccgtgggagctccccgacgcggcgcgcatgggggagcgcgagtggtacttcttcagcctccgcgaccgcaagtaccccacgggcctccgtaccaaccgcgccaccggcgccggatactggaaggccaccgggaaggaccgcgaggtgctcaacgccgccaccggcgcgctcctcggcatgaagaagacgctcgtcttctacaagggccgggcgccgcgcggcgagaagaccaagtgggtcctgcacgagtaccgcctcgacggcgacttcgccgccgctcgccgcccctgcaaggaggaatgggtcatctgcaggatactgcacaaggcaggcgaccagtatagcaagctgatgatggtgaagagcccctactacctgcccatggcgatggacccttccagcttctgcttccaggaggacccaaccgggcatcccctcccgaaccctagcggctgcacccccttccaccacggccacccccaccatagcatgcagccgccgcctccattgccgccgagcaaccatgctggcaaggccgtcttcaccggagcagcagcagcctgctgcatgcaacaagagccggcagacggcagcaacagcgccgtgctgcccatgccgccgttccctcccttcacccccatcgtcgccggcaagccggcggccccggcgccgccgccccaggttgtcaacgccggtccacaggagccaccgccacctacctggctggaggcctacctgcagcacactggtgggatcctttatgagatgggtccaactgcagcgcccaggggcgcgtga

SEQ ID NO: 129 - DNA, 1653 bp, Zea mays
  source 1..1653: mol_type = unassigned DNA
atggcgctagcacctagccatgcccatgcatcacttgccgtcgctccattcacagtactttgcaccttccttgcccttgttgccttattgtttctgcatcgatatcgtcgaagcaacgcaaggccgtcgaagaaaacacggcagctgccgccaggcccggccgggttgccgatcatcggcagcctgcactgcctggtgtcgaaaaagccggtgtttcggtgggttcacggccttctcaaggacatgaacaccaagatcctatgcctccgcttcggggccgtgcacgtcgtggtagtcgcctgcccggagatagcccgcgaggttctcaggacgaacgacgccgccctggcgtctcgcccggagacagacgcctgcgagctgttcagcctcgggtacaagggcgccatcctgtcgccctacggggagcagtggaggaagatgcggcgggtcctcacctccgagatcctgtccgcgtcgatggagcagcggcagcagcggcggcgagcgcaggaggccgactacctcgtcgcttccctgtacagccagtgctgcagcagcgccagcgcagccgcatcgtcggctgctagctccgccgtcgtcgacatacgccatgtagcccgccacttctcctgcaacatgatccggagcctcgtgttcggcaagcggcacttcggcgccggcgccggcccgggtcctgaggaggtggcgcacgtggacacgctcttcgcgctgctcaactacatatacatcttctccgtctcggattacgtccccgctgcgtggaggtggatggttgctggcctcgaccttggcggtgacagggaggctggcaggagcgtgatgaggactctgagcaggctgcatgatcccatcatacgggagaggatccgtgagtgggacggccttcgcgaacgcggcgagaagagagaggtcagggatttccttgacgcgctcgtctctctcgtggattcgcaggggcggcctttcttgtcgttcgacgagataaaagcgcagacagcggagatgatgtttgcaaccattgacaacccatcgaacgcggtggagtgggcgctggcggagatgatgaacaggccggaggtgatgaagaaagcaatggaggagctggacgcggtggtcggcaaggacaggctggtgcaggagtcggacatcccgggcctcaactacctgaaggcgtgcgtgcgggaggccttccggctgcacccgtaccacgctctgaacctgccgcacgtcgccatggaagacaccgtggtctccggctacctggtccccaagggcagccacgtgctgctgagccggctggcgcttgggcggaaccccgacgtctgggacgagcctctccagttccggccggagcgacatctggtgaacgacggcgacgtggttctcacggagccggaccttcggttcatctcgttcagcgcgggcaggagggggtgcccgggggtgtcactcggcagctccattacgatgatgctgttcgcaaggctcctccaagggttcgcgtggagcaagcctcctggcgtccgtgcgatcaggctcgaggaatccagcgcaagcctagcactggctgagccgctcctcttacaagctcagcctcgtttgccggtgcatctctatgcggcgtccggttaa

SEQ ID NO: 130 - DNA, 1587 bp, Zea mays
  source 1..1587: mol_type = unassigned DNA
atggagatggcaggcgccgcaggaacggaagcatggttgccgtacgtgaccacggtggcgtcctgcgccgtcggcgtcttcttcctgctctacttctacgcgccacactggcggatcagggacgtgccggggccgccggccttgcccgtcgtggggcacctcccgctgctcgcccgacacggacctgacgtcttcggcctcctcgccaagaaatatggcccgatcttcaggttccatttggggaggcagcctctggtgatcgtcgctgacccagagctctgcagggaggttggcgtcaggcagttcaagctcatccccaacaggagcttgccggcgccgatcgccggctcccctctccaccagaagggcctcttcttcactagggatgaacggtggtcggcgatgaggaatacaatcatctcgctgtaccagccatcgcacctcgccggcctcgtccccaccatgcagcactgcatcgagcgcgccgcggacgccataccggcgatggtagttcaggagaacgggctggtcgatttctccgacctctcgctcaagctggccacggacatcatcggtgaggcggcgttcggcgtggatttcggcctcacggcgagcggtcccggctgcgaggccgcggagttcatcagggagcacgtgcactccacaacctccctgaagatggacctgtccgcgccgctctccgtagtgctcggcctcgtcgcgcccgcgctgcagggcccggtacggcacctgctgagccgtgtcccggggaccgccgactggagggtcgcgcggaccaacgcgcggctgcgcgcgcgggtggacgagattgtggtgtcacgggcgcgcgggcgcggccagcacggcgaaaggaggaaggacttcctgtcagcggtgctggacgcccgggaccgcagtgcggcgctgcgggagctgctcacgccggaccacgtgagcgcgctcacctacgagcacctcctcgccgggtctgccaccacggcgttcacgctctcgtcggcagtgtacctagtcgccggccacccggaggttgaggccaagctgctggcggaggtcgacgctttcgggccgcgcggcgccgtgccgaccgccgacgacctgcagcaccggttcccctaccttgatcaggtcataaaggaggccatgagattctacacagtctcgccactgatcgccagagtgacgtctcgacaaacagagcttggaggccacactctcccaaagggcacgtggctgtggatggctccgggcgtcctgtcccgcgacgccgctaacttcgaggaccccggtgcattccggccggagcggttcgacccggccagcgaggagcagcgccggcggcacccgtgcgcgcacatccccttcggcatcggcccgcgggcgtgcgtggggcagcggttcgcgctgcaggaggtgaagctctctatgttgcacctgtaccggcgtttcctcttccggcggtcgccacggatggagtcgccgccggagctccagttcgggatcgtgctcaatttcaagaagggcgtcaaactcgtagcagttgagcggtgcgctgccatgccgttgtag

SEQ ID NO: 131 - DNA, 1719 bp, Zea mays
  source 1..1719: mol_type = unassigned DNA
atgtctcccactatggcttcgtcgttgtgcgtatttgcagcgatgtctggcgccagcggcaggccgtcggccggtggctcggcggtaccgggccgtctgtccagcagcacacaggggggcaagggaaagcgggccgtggtgcagccgctcgcggctagcgtggtgacggagacgccagcgccggccgtagctccggctcggcccgtcgtcgacgccccgccgcgccgccgtgggggccgcggcaccgtcgagcacgcggcgtggaagagcgtccggcaggagaggtgggagggggcgctggagctggagggagagctgccgctctggctggatggcacctacctgaggaacgggccgggcctgtggaacctgggcgactacggcttccggcacctgttcgacggctacgccacgctggtccgcgtgtcgttccgcgacgggcaggcggtgggcgcgcaccggcagatcgagtcggaggcgtacaaggcggcgcgcgcgcacggcaaggtgtgctaccgcgagttctcggaggtgcccaaggcggaggggttcctctcccacgtgggccagctcgccaccctcttctcgggctcctcgctcaccgacaactccaacacgggcgtcgtcaggctcggcgacggccgcgtcctctgcctgacagagaccatcaagggctccatcgtggtcgacccggacacgctcgacaccatcggcaagttcgagtacacggacaggctgggcggcctcatccactcggcgcaccccatcgtgacggacaccgagttctggacgctcatcccggacctcatccgcccgggctactcggtggtgaggatggacgccgggaccaacgagcggcggttcgtcggcagggtggactgtcggggcgggccggcgcccgggtgggtgcactcgttccccatcaccgaccactacgtggtggtgccggagatgccgctccggtactgcgccaggaacctcctccgcgcggagcccacgccgctgtacaagttcgagtggcacctcgagtccggcagctacatgcacgtcatgtgcaaggctagcggcagggtcgtggcgaccgtggaggtgccgccgttcgtcacgttccacttcatcaacgcgtacgaggagaaggacgacgagggccgcgtcaccgcgatcatcgccgactgctgcgagcacaacgccaacacctccatcctcgacaagctccggctccagaacctgcgctcttccaccggccaggacgtcctccccgacgccagggtgggccgcttcaggatcccgctggacgggagcccgttcggcgagctggagccggcgctggacccggaccagcacggccgcgggatggacatgtgcagcatcaacccggcccacgtcggcaagaagtaccggtacgcctacgcctgcggagcccaccggccgtgcaacttccccaacaccctcaccaagatcgacctggtggagaagacggccaagaactggtacgaggagggcgccgtgccgtcagagcccttcttcgtgccgcgccccggcgccgtggaggaggacgacggcgtcgcgatctcgatggtgagcgccaaggacggatcggcctacgcgttggtgctggacgccaagacgttccacgagatcgcgcgggccaagttcccgtacgcgatgccctacggcttgcactgctgctgggtgcctaggagtacctcagacgcgtag

SEQ ID NO: 132 - DNA, 1107 bp, synthetic construct
  misc_feature 1..1107: note = ZM-MIR-SPS1
  source 1..1107: mol_type = other DNA
atggagaggttgggcgtcggcgtcggcgtcggcgagctgccgccggggttccgcttccacccgacggacgaggagctgatcacctactacctcctctgcaaggccgtggacggcggcttctgcggcggccgcgccatcgcggagatcgacctgaacaagtgcgagccatgggagctcccggacaaggcgaagatgggggagaaggagtggtacttctactgcctccgcgaccgcaagtacccgacgggcctgcgcaccaaccgcgccacggcggccggctactggaaggccaccggcaaggaccgcgaggtccgcagcggccgcagcggcgcgctggtgggcatgaagaagacgctcgtcttctaccggggccgcgcccccaggggccagaagacgcgctgggtcatgcacgagtaccgcctcgacggcacctacgcctaccatttccttcccggctctacgagggacgagtgggtgatcgcgagggtgttccagaagccaggcgaggtcccatgcggccgcaagcaccgcctgggcggccccagcgccgccgccggcgagtcctgcttctcggactccaccacctcggcctccatcggcggcggcggcggaggaggagcgtccgcgtcgtctcgcccgctgctcaccgtcacggacacttcctcgccgtcgctgttcgtggccaacgcgaacgccgccgccagcaacaacaacggcaacccggtcaccgggcgagagctcgtgccctgcttctccactaccgccagtcccctggaagccgcggcgctcggcgtcgtcgggcacccgtacaacgcggccccgctgcgtctgggcttggacttcgaggcgccgtccccgggcttcgtcgtcccgaacctgcgttccctgcaagtgcaggacgacggcggcctgccgctgttcctctcggcagcagcaggcggcggcatgtcgtccgcgacgctgggaataatggggtcgctgggcgggtctctccactgcccgccccacgccggcatggatgtcgtcaaggtcgagggccgcgccgcgccgccgcagatggctgtcggccccggcctcctcgatggcgccttcgcctggggcttctag

SEQ ID NO: 133 - DNA, 125 bp, synthetic construct
  misc_feature 1..125: note = ZM-MIR-MAX1
  source 1..125: mol_type = other DNA
agatgagttttttgaaggttgcgcgcacatccccttcggcaacacggtggtttcttaccatgagtgtcatgctaggagctgtgcgtgctcaccctctatctgtcagtcactcatcaagcccatct

SEQ ID NO: 134 - DNA, 126 bp, synthetic construct
  misc_feature 1..126: note = ZM-MIR-MAX4
  source 1..126: mol_type = other DNA
agatgagttttttgaaggtttggagctggagggagagctgccacacggtggtttcttaccatgagtgtcatgctaggagctgtgcgtgctcaccctctatctgtcagtcactcatcaagcccatct

SEQ ID NO: 135 - DNA, 1107 bp, Zea mays; identical to SEQ ID NO: 132
  source 1..1107: mol_type = unassigned DNA

SEQ ID NO: 136 - DNA, 7314 bp, synthetic construct
  misc_feature 1..7314: note = Plasmid C
  source 1..7314: mol_type = other DNA
gtgcagcgtgacccggtcgtgcccctctctagagataatgagcattgcatgtctaagttataaaaaattaccacatattttttttgtcacacttgtttgaagtgcagtttatctatctttatacatatatttaaactttactctacgaataatataatctatagtactacaataatatcagtgttttagagaatcatataaatgaacagttagacatggtctaaaggacaattgagtattttgacaacaggactctacagttttatctttttagtgtgcatgtgttctcctttttttttgcaaatagcttcacctatataatacttcatccattttattagtacatccatttagggtttagggttaatggtttttatagactaatttttttagtacatctattttattctattttagcctctaaattaagaaaactaaaactctattttagtttttttatttaataatttagatataaaatagaataaaataaagtgactaaaaattaaacaaataccctttaagaaattaaaaaaactaaggaaacatttttcttgtttcgagtagataatgccagcctgttaaacgccgtcgacgagtctaacggacaccaaccagcgaaccagcagcgtcgcgtcgggccaagcgaagcagacggcacggcatctctgtcgctgcctctggacccctctcgagagttccgctccaccgttggacttgctccgctgtcggcatccagaaattgcgtggcggagcggcagacgtgagccggcacggcaggcggcctcctcctcctctcacggcaccggcagctacgggggattcctttcccaccgctccttcgctttcccttcctcgcccgccgtaataaatagacaccccctccacaccctctttccccaacctcgtgttgttcggagcgcacacacacacaaccagatctcccccaaatccacccgtcggcacctccgcttcaaggtacgccgctcgtcctcccccccccccctctctaccttctctagatcggcgttccggtccatgcatggttagggcccggtagttctacttctgttcatgtttgtgttagatccgtgtttgtgttagatccgtgctgctagcgttcgtacacggatgcgacctgtacgtcagacacgttctgattgctaacttgccagtgtttctctttggggaatcctgggatggctctagccgttccgcagacgggatcgatttcatgattttttttgtttcgttgcatagggtttggtttgcccttttcctttatttcaatatatgccgtgcacttgtttgtcgggtcatcttttcatgcttttttttgtcttggttgtgatgatgtggtctggttgggcggtcgttctagatcggagtagaattctgtttcaaactacctggtggatttattaattttggatctgtatgtgtgtgccatacatattcatagttacgaattgaagatgatggatggaaatatcgatctaggataggtatacatgttgatgcgggttttactgatgcatatacagagatgctttttgttcgcttggttgtgatgatgtggtgtggttgggcggtcgttcattcgttctagatcggagtagaatactgtttcaaactacctggtgtatttattaattttggaactgtatgtgtgtgtcatacatcttcatagttacgagtttaagatggatggaaatatcgatctaggataggtatacatgttgatgtgggttttactgatgcatatacatgatggcatatgcagcatctattcatatgctctaaccttgagtacctatctattataataaacaagtatgttttataattattttgatcttgatatacttggatgatggcatatgcagcagctatatgtggatttttttagccctgccttcatacgctatttatttgcttggtactgtttcttttgtcgatgctcaccctgttgtttggtgttacttctgcaggtcgactctagaggatccaccggtcgccaccatggcaccgaagaagaagcgcaaggtgatggacaagaagtacagcatcggcctcgacatcggcaccaactcggtgggctgggccgtcatcacggacgaatataaggtcccgtcgaagaagttcaaggtcctcggcaatacagaccgccacagcatcaagaaaaacttgatcggcgccctcctgttcgatagcggcgagaccgcggaggcgaccaggctcaagaggaccgccaggagacggtacactaggcgcaagaacaggatctgctacctgcaggagatcttcagcaacgagatggcgaaggtggacgactccttcttccaccgcctggaggaatcattcctggtggaggaggacaagaagcatgagcggcacccaatcttcggcaacatcgtcgacgaggtaagtttctgcttctacctttgatatatatataataattatcattaattagtagtaatataatatttcaaatatttttttcaaaataaaagaatgtagtatatagcaattgcttttctgtagtttataagtgtgtatattttaatttataacttttctaatatatgaccaaaacatggtgatgtgcaggtggcctaccacgagaagtacccgacaatctaccacctccggaagaaactggtggacagcacagacaaggcggacctccggctcatctaccttgccctcgcgcatatgatcaagttccgcggccacttcctcatcgagggcgacctgaacccggacaactccgacgtggacaagctgttcatccagctcgtgcagacgtacaatcaactgttcgaggagaaccccataaacgctagcggcgtggacgccaaggccatcctctcggccaggctctcgaaatcaagaaggctggagaaccttatcgcgcagttgccaggcgaaaagaagaacggcctcttcggcaaccttattgcgctcagcctcggcctgacgccgaacttcaaatcaaacttcgacctcgcggaggacgccaagctccagctctcaaaggacacctacgacgacgacctcgacaacctcctggcccagataggagaccagtacgcggacctcttcctcgccgccaagaacctctccgacgctatcctgctcagcgacatccttcgggtcaacaccgaaattaccaaggcaccgctgtccgccagcatgattaaacgctacgacgagcaccatcaggacctcacgctgctcaaggcactcgtccgccagcagctccccgagaagtacaaggagatcttcttcgaccaatcaaaaaacggctacgcgggatatatcgacggcggtgccagccaggaagagttctacaagttcatcaaaccaatcctggagaagatggacggcaccgaggagttgctggtcaagctcaacagggaggacctcctcaggaagcagaggaccttcgacaacggctccatcccgcatcagatccacctgggcgaactgcatgccatcctgcggcgccaggaggacttctacccgttcctgaaggataaccgggagaagatcgagaagatcttgacgttccgcatcccatactacgtgggcccgctggctcgcggcaactcccggttcgcctggatgacccggaagtcggaggagaccatcacaccctggaactttgaggaggtggtcgataagggcgctagcgctcagagcttcatcgagcgcatgaccaacttcgataaaaacctgcccaatgaaaaagtcctccccaagcactcgctgctctacgagtacttcaccgtgtacaacgagctcaccaaggtcaaatacgtcaccgagggcatgcggaagccggcgttcctgagcggcgagcagaagaaggcgatagtggacctcctcttcaagaccaacaggaaggtgaccgtgaagcaattaaaagaggactacttcaagaaaatagagtgcttcgactccgtggagatctcgggcgtggaggatcggttcaacgcctcactcggcacgtatcacgacctcctcaagatcattaaagacaaggacttcctcgacaacgaggagaacgaggacatcctcgaggacatcgtcctcaccctgaccctgttcgaggaccgcgaaatgatcgaggagaggctgaagacctacgcgcacctgttcgacgacaaggtcatgaaacagctcaagaggcgccgctacactggttggggaaggctgtcccgcaagctcattaatggcatcagggacaagcagagcggcaagaccatcctggacttcctcaagtccgacgggttcgccaaccgcaacttcatgcagctcattcacgacgactcgctcacgttcaaggaagacatccagaaggcacaggtgagcgggcagggtgactccctccacgaacacatcgccaacctggccggctcgccggccattaaaaagggcatcctgcagacggtcaaggtcgtcgacgagctcgtgaaggtgatgggccggcacaagcccgaaaatatcgtcatagagatggccagggagaaccagaccacccaaaaagggcagaagaactcgcgcgagcggatgaaacggatcgaggagggcattaaagagctcgggtcccagatcctgaaggagcaccccgtggaaaatacccagctccagaatgaaaagctctacctctactacctgcagaacggccgcgacatgtacgtggaccaggagctggacattaatcggctatcggactacgacgtcgaccacatcgtgccgcagtcgttcctcaaggacgatagcatcgacaacaaggtgctcacccggtcggataaaaatcggggcaagagcgacaacgtgcccagcgaggaggtcgtgaagaagatgaaaaactactggcgccagctcctcaacgcgaaactgatcacccagcgcaagttcgacaacctgacgaaggcggaacgcggtggcttgagcgaactcgataaggcgggcttcataaaaaggcagctggtcgagacgcgccagatcacgaagcatgtcgcccagatcctggacagccgcatgaatactaagtacgatgaaaacgacaagctgatccgggaggtgaaggtgatcacgctgaagtccaagctcgtgtcggacttccgcaaggacttccagttctacaaggtccgcgagatcaacaactaccaccacgcccacgacgcctacctgaatgcggtggtcgggaccgccctgatcaagaagtacccgaagctggagtcggagttcgtgtacggcgactacaaggtctacgacgtgcgcaaaatgatcgccaagtccgagcaggagatcggcaaggccacggcaaaatacttcttctactcgaacatcatgaacttcttcaagaccgagatcaccctcgcgaacggcgagatccgcaagcgcccgctcatcgaaaccaacggcgagacgggcgagatcgtctgggataagggccgggatttcgcgacggtccgcaaggtgctctccatgccgcaagtcaatatcgtgaaaaagacggaggtccagacgggcgggttcagcaaggagtccatcctcccgaagcgcaactccgacaagctcatcgcgaggaagaaggattgggacccgaaaaaatatggcggcttcgacagcccgaccgtcgcatacagcgtcctcgtcgtggcgaaggtggagaagggcaagtcaaagaagctcaagtccgtgaaggagctgctcgggatcacgattatggagcggtcctccttcgagaagaacccgatcgacttcctagaggccaagggatataaggaggtcaagaaggacctgattattaaactgccgaagtactcgctcttcgagctggaaaacggccgcaagaggatgctcgcctccgcaggcgagttgcagaagggcaacgagctcgccctcccgagcaaatacgtcaatttcctgtacctcgctagccactatgaaaagctcaagggcagcccggaggacaacgagcagaagcagctcttcgtggagcagcacaagcattacctggacgagatcatcgagcagatcagcgagttctcgaagcgggtgatcctcgccgacgcgaacctggacaaggtgctgtcggcatataacaagcaccgcgacaaaccaatacgcgagcaggccgaaaatatcatccacctcttcaccctcaccaacctcggcgctccggcagccttcaagtacttcgacaccacgattgaccggaagcggtacacgagcacgaaggaggtgctcgatgcgacgctgatccaccagagcatcacagggctctatgaaacacgcatcgacctgagccagctgggcggagacaagagaccacgggaccgccacgatggcgagctgggaggccgcaagcgggcaaggtaggtaccgtcatgggtcgtttaagctgccgatgtgcctgcgtcgtctggtgccctctctccatatggaggttgtcaaagtatctgctgttcgtgtcatgagtcgtgtcagtgttggtttaataatggaccggttgtgttgtgtgtgcgtactacccagaactatgacaaatcatgaataagtttgatgtttgaaattaaagcctgtgctcattatgttctgtctttcagttgtctcctaatatttgcctgcaggtactggctatctaccgtttcttacttaggaggtgtttgaatgcactaaaactaatagttagtggctaaaattagttaaaacatccaaacaccatagctaatagttgaactattagctatttttggaaaattagttaatagtgaggtagttatttgttagctagctaattcaactaacaatttttagccaactaacaattagtttcagtgcattcaaacacccccttaatgttaacgtggttctatctaccgtctcctaatatatggttgattgttcggtttgttgctatgctattgggttctgattgctgctagttcttgctgaatccagaagttctcgtagtatagctcagattcatattatttatttgagtgataagtgatccaggttattactatgttagctaggttttttttacaaggataaattatctgtgatcataattcttatgaaagctttatgtttcctggaggcagtggcatgcaatgcatgacagcaacttgatcacaccagctgaggtagatacggtaacaaggttcttaaatctgttcaccaaatcattggagaacacacatacacattcttgccagtcttggttagagaaatttcatgacaaaatgccaaagctgtcttgactcttcacttttggccatgagtcgtgac

SEQ ID NO: 137 - DNA, 5579 bp, synthetic construct
  misc_feature 1..5579: note = Plasmid B
  source 1..5579: mol_type = other DNA
ccggaatcggacctcgggacgtcgccaaagttagctaggtgtccttagcgtttcttaggttctaggcgttaggggtcaataggttagcctagaagtcccgcactaacagcctagcttaacagttccaagctaagccactagactagccctatccgactaacctagtctaagccgaacggggatctaatctaagctaggcacccattagactagttcactagcgcgaccgcactaaactaggctaaaggttaatagcaactagttagctaggggacgttagctgcccaagcttggttaccgcataatgaggatcgaggatgaggagcatgcacggatagatggcgtctagcatatcgataggacatgacaagtggtacgatccccgtcacatgtccatggaggcatctgatatggacacggcgtgtatctatcgcggctggaacagaaccagcgctcgcgcggcggtcggcgggagggacagaccttggctccgtgcgttcaggttgtgcttgtgccgcgcgccacgcacggtctccgccgcctgcagctgaaattttagatttacatcctatccctttattttttttatttgtcacaattcagttcaaaaatgaagaacggaggtagtgcatcctttgtgagactaatgaaaatcacatctggatcctgaaatcggcgtcgtaacctacaaggccacggactggattagatagtggtccatggtgcataatgaggatcgaggggtaccagtctaattacaaaactaattgcacaaccgctaagctgaatcgcgagatggatctattaaccttaattagtccatgatttgacaatgtggtgctacaataaccatttgctaatgatggattacttaggtttaatagattcgtctcgtgatttagcctatgggttctgctattaattttgtaattagctcatatttagttcttataattagtatccgaacatccaatgtgacatgctaaagtttaaccctggtatccaaatgaagtcttatgagagtttcatcactccggtggtatatgtacttaggctccgttttcttccaccgacttatttttagcacccgtcacattgaatgtttagatactaattagaagtattaaacgtagactatttacaaaatccattacataagacgaatctaaacggcgagacgaatctattaaacctaattagtccatgatttgacaatgtgttgctacagtaaacatttgctaatgatggattaattaggcttaatagattcgtctcgccgtttagcctccacttatgtaatgggttttctaaacaatctacgtttaatactcctaattagtatctaaatattcaatgtgacacgtgctaaaaataagtcagtggaaggaagagaacgtccccttagttttccatcttattaattgtacgatgaaactgtgcagccagatgattgacaatcgcaatacttcaactagtgggccatgcacatcagcgacgtgtaacgtcgtgagttgctgttcccgtagagaaatatcaactggtgggccacgcacatcagcgtcgtgtaacgtggacggaggagccccgtgacggcgtcgacatcgaacggccaccaaccacggaaccacccgtccccacctctcggaagctccgctccacggcgtcgacatctaacggctaccagcaggcgtacgggttggagtggactccttgcctctttgcgctggcggcttccggaaattgcgtggcggagacgaggcgggctcgtctcacacggcacggaagacgtcacgggttccttccccacctctcctcttccccaccgccataaatagccgaccccctcgcctttctccccaatctcatctcgtctcgtgttgttcggagcacaccacccgccccaaatcgttcttcccgcaagcctcggcgatccttcacccgcttcaaggtacggcgatcgtcttcctcctctagatcggcgtgatctgcaagtagttgatttggtagatggttaggatctgtgcactgaagaaatcatgttagatccgcgatgtttctgttcgtagatggctgggaggtggaatttttgtgtagatctgatatgttctcctgtttatcttgtcacgctcctgcgatttgtggggattttaggtcgttgatctgggaatcgtggggttgcttctaggctgttcgtagatgaggtcgttctcacggtttactggatcattgcctagtagatcagctcgggctttcgtctttgtatatggtgcccatacttgcatctatgatctggttccgtggtgttacctaggtttctgcgcctgattcgtccgatcgattttgttagcatgtggtaaacgtttggtcatggtctgatttagattagagtcgaataggatgatctcgatctagctcttgggattaatatgcatgtgtcaccaatctgttccgtggttaagatgatgaatctatgcttagttaatgggtgtagatatatatgctgctgttcctcaatgatgccgtagcttttacctgagcagcatggttcctcctgttacttaggtagatgcacatgcttatagatcaagatatgtactgctactgttggaattgtttagtatacctgatgatcatccatgctcttgttacttgttttggtatacttggatgatggcatgctgctgctttttgttgatttgagcccatccatatctgcatatgtcacatgattaagatgattacgctgtttctgtatgatgccatagcttttatgtgagcaacatgcatcctcctggttatatgcattaatagatggaagatatctattgctacaatttgatgattattttgtacatacgatgatcaagcatgctcttcatactttgttgatatacttggataatgaaatgctgctgcacgttcattctatagcactaatgatgtgatgaacacgcacgacctgtttgtggcatctgtttgaatgtgttgttgctgttcactagagactgttttattaacctactgctagatacttacccttctgtctgtttattcttttgcaggtcgaccgccggggatccatggttgaacaagatggattgcacgcaggttctccggccgcttgggtggagaggctattcggctatgactgggcacaacagacaatcggctgctctgatgccgccgtgttccggctgtcagcgcaggggcgcccggttctttttgtcaagaccgacctgtccggtgccctgaatgaactgcaggacgaggcagcgcggctatcgtggctggccacgacgggcgttccttgcgcagctgtgctcgacgttgtcactgaagcgggaagggactggctgctattgggcgaagtgccggggcaggatctcctgtcatctcaccttgctcctgccgagaaagtatccatcatggctgatgcaatgcggcggctgcatacgcttgatccggctacctgcccattcgaccaccaagcgaaacatcgcatcgagcgagcacgtactcggatggaagccggtcttgtcgatcaggatgatctggacgaagagcatcaggggctcgcgccagccgaactgttcgccaggctcaaggcgcgcatgcccgacggcgatgatctcgtcgtgacccatggcgatgcctgcttgccgaatatcatggtggaaaatggccgcttttctggattcatcgactgtggccggctgggtgtggcggaccgctatcaggacatagcgttggctacccgtgatattgctgaagagcttggcggcgaatgggctgaccgcttcctcgtgctttacggtatcgccgctcccgattcgcagcgcatcgccttctatcgccttcttgacgagttcttctgagcccatcggtcatggatgcttctactgtacctgggtcgtctggtctctgcctgtgtcacctttgaagtacctgtgtcgggattgtgtttggtctagaactgcagtttgtctttgatgttcttttgtctggtcttatgaactggttgtatctgtatgtttactgtaaactgttgttgcggtgcagcagtatggcatccgaatgaataaatgatgtttggacttaaatctgtactctgtttgttttcggttatgccagttctatattgcctgagatcagaatgtttagcttttgagttctgtttggcttgtggtcgactcctgtttcttacttgaggcgtaactctgttctggcaaactcaaatgtctaactgaatgttttaggacttaattgttggacagattaacgtgtttggtttgtttctagattgtgattcggaaggcttgttagttgtggaatcaaggagagcagctaggtctgtgcagaacgttattttggatttaagccttctcagattatgccattactctaaacctaatgatatcatatttcactcggggatgttggagtagtcttttctttctcctgcagacaaaatgattttgctttcgtgtgtgtacatgattttgtgcaactgttgcaacaactgaagtagacaagttttgacctcaccagaagaatgaaaaagattttggaatttgttacatcgacaaaccattgtaacttggcccatcagaatgcacagagaagcggctacaaattgacatgcgttgcaaactttgcaatagttgatgcacatgtttgccattgcctgccagtcttaggaaaagtgtgtggttcgagaaatctaagcatatgtgctctgctcacattgcgtggaacccacacagctttgtcacactcttgtccactccagaagtcattcctggcgctgtttacccctggtaaagagtaaccgaaaacttctcaaggctgtacccaaaactggaaggaaatttggaggcggccgcatgaggagcaatcattgttcaagacatgatgcaaagctagaaaactttgattgtggccgtccttgtgaagtttaggccggggggaacttcatgaaccctatcgaagcttaattagttcttttttgttgttagccatgtttgtattgtagttaaggtgaacaacatgacgccgcacccgcgatctcagggctcgtccccacacaggagggcacgtcgtcgtcttcgccgccgagcatcagagattcagagcacatacacgcacatctcaagcaaacggagtagtacgtcctactcctacgtacatacctagccgacgacctttatgtgcacaccaccactgctctgctgcccggcctctccgtcgtccgttcatcaccagcataatgaggatcgaggatgaggggcgcgccgacgtcccgaggtccgattccgggctaattaacacctagctcgccactcgactaattagggactaagcctagcgcttagccgttaaaacctagcacaccctaagcacccttagttaggttcccctcttaattaagccctagtgagcccctaagttaaggggacgctaagagccccctaacctagtattcggctagaggcgaactaggctaaacacctaagcgcacctctttaagctagatcgctagggggctaggctagagcttcgctagattagtctaagggcag

SEQ ID NO: 138 - DNA, 5743 bp, synthetic construct
  misc_feature 1..5743: note = Plasmid D
  source 1..5743: mol_type = other DNA
atcgagcagctggcttgtggggaccagacaaaaaaggaatggtgcagaattgttaggcgcacctaccaaaagcatctttgcctttattgcaaagataaagcagattcctctagtacaagtggggaacaaaataacgtggaaaagagctgtcctgacagcccactcactaatgcgtatgacgaacgcagtgacgaccacaaaactcgagcaacgagatcatgagccaatcaaagaggagtgatgtagacctaaagcaataatggagccatgacgtaagggcttacgcccatacgaaataattaaaggctgatgtgacctgtcggtctctcagaacctttactttttatgtttggcgtgtatttttaaatttccacggcaatgacgatgtgaccgtcgacccactaaaacattgctttgtcaaaagctaaaaaagatgatgcccgacagccacttgtgtgaagcatgagaagccggtccctccactaagaaaattagtgaagcatcttccagtggtccctccactcacagctcaatcagtgagcaacaggacgaaggaaatgacgtaagccatgacgtctaatcccagggccagcttgcatgcctgcagtgcagcgtgacccggtcgtgcccctctctagagataatgagcattgcatgtctaagttataaaaaattaccacatattttttttgtcacacttgtttgaagtgcagtttatctatctttatacatatatttaaactttactctacgaataatataatctatagtactacaataatatcagtgttttagagaatcatataaatgaacagttagacatggtctaaaggacaattgagtattttgacaacaggactctacagttttatctttttagtgtgcatgtgttctcctttttttttgcaaatagcttcacctatataatacttcatccattttattagtacatccatttagggtttagggttaatggtttttatagactaatttttttagtacatctattttattctattttagcctctaaattaagaaaactaaaactctattttagtttttttatttaataatttagatataaaatagaataaaataaagtgactaaaaattaaacaaataccctttaagaaattaaaaaaactaaggaaacatttttcttgtttcgagtagataatgccagcctgttaaacgccgtcgacgagtctaacggacaccaaccagcgaaccagcagcgtcgcgtcgggccaagcgaagcagacggcacggcatctctgtcgctgcctctggacccctctcgagagttccgctccaccgttggacttgctccgctgtcggcatccagaaattgcgtggcggagcggcagacgtgagccggcacggcaggcggcctcctcctcctctcacggcaccggcagctacgggggattcctttcccaccgctccttcgctttcccttcctcgcccgccgtaataaatagacaccccctccacaccctctttccccaacctcgtgttgttcggagcgcacacacacacaaccagatctcccccaaatccacccgtcggcacctccgcttcaaggtacgccgctcgtcctcccccccccccctctctaccttctctagatcggcgttccggtccatgcatggttagggcccggtagttctacttctgttcatgtttgtgttagatccgtgtttgtgttagatccgtgctgctagcgttcgtacacggatgcgacctgtacgtcagacacgttctgattgctaacttgccagtgtttctctttggggaatcctgggatggctctagccgttccgcagacgggatcgatttcatgattttttttgtttcgttgcatagggtttggtttgcccttttcctttatttcaatatatgccgtgcacttgtttgtcgggtcatcttttcatgcttttttttgtcttggttgtgatgatgtggtctggttgggcggtcgttctagatcggagtagaattctgtttcaaactacctggtggatttattaattttggatctgtatgtgtgtgccatacatattcatagttacgaattgaagatgatggatggaaatatcgatctaggataggtatacatgttgatgcgggttttactgatgcatatacagagatgctttttgttcgcttggttgtgatgatgtggtgtggttgggcggtcgttcattcgttctagatcggagtagaatactgtttcaaactacctggtgtatttattaattttggaactgtatgtgtgtgtcatacatcttcatagttacgagtttaagatggatggaaatatcgatctaggataggtatacatgttgatgtgggttttactgatgcatatacatgatggcatatgcagcatctattcatatgctctaaccttgagtacctatctattataataaacaagtatgttttataattattttgatcttgatatacttggatgatggcatatgcagcagctatatgtggatttttttagccctgccttcatacgctatttatttgcttggtactgtttcttttgtcgatgctcaccctgttgtttggtgttacttctgcaggtcgactttaacttagcctaggatccatggccactgtgaacaactggctcgctttctccctctccccgcaggagctgccgccctcccagacgacggactccacactcatctcggccgccaccgccgaccatgtctccggcgatgtctgcttcaacatcccccaagattggagcatgaggggatcagagctttcggcgctcgtcgcggagccgaagctggaggacttcctcggcggcatctccttctccgagcagcatcacaaggccaactgcaacatgatacccagcactagcagcacagtttgctacgcgagctcaggtgctagcaccggctaccatcaccagctgtaccaccagcccaccagctcagcgctccacttcgcggactccgtaatggtggcttcctcggccggtgtccacgacggcggtgccatgctcagcgcggccgccgctaacggtgtcgctggcgctgccagtgccaacggcggcggcatcgggctgtccatgattaagaactggctgcggagccaaccggcgcccatgcagccgagggtggcggcggctgagggcgcgcaggggctctctttgtccatgaacatggcggggacgacccaaggcgctgctggcatgccacttctcgctggagagcgcgcacgggcgcccgagagtgtatcgacgtcagcacagggtggagccgtcgtcgtcacggcgccgaaggaggatagcggtggcagcggtgttgccggcgctctagtagccgtgagcacggacacgggtggcagcggcggcgcgtcggctgacaacacggcaaggaagacggtggacacgttcgggcagcgcacgtcgatttaccgtggcgtgacaaggcatagatggactgggagatatgaggcacatctttgggataacagttgcagaagggaagggcaaactcgtaagggtcgtcaagtctatttaggtggctatgataaagaggagaaagctgctagggcttatgatcttgctgctctgaagtactggggtgccacaacaacaacaaattttccagtgagtaactacgaaaaggagctcgaggacatgaagcacatgacaaggcaggagtttgtagcgtctctgagaaggaagagcagtggtttctccagaggtgcatccatttacaggggagtgactaggcatcaccaacatggaagatggcaagcacggattggacgagttgcagggaacaaggatctttacttgggcaccttcagcacccaggaggaggcagcggaggcgtacgacatcgcggcgatcaagttccgcggcctcaacgccgtcaccaacttcgacatgagccgctacgacgtgaagagcatcctggacagcagcgccctccccatcggcagcgccgccaagcgcctcaaggaggccgaggccgcagcgtccgcgcagcaccaccacgccggcgtggtgagctacgacgtcggccgcatcgcctcgcagctcggcgacggcggagccctggcggcggcgtacggcgcgcactaccacggcgccgcctggccgaccatcgcgttccagccgggcgccgccagcacaggcctgtaccacccgtacgcgcagcagccaatgcgcggcggcgggtggtgcaagcaggagcaggaccacgcggtgatcgcggccgcgcacagcctgcaggacctccaccacctgaacctgggcgcggccggcgcgcacgactttttctcggcagggcagcaggccgccgccgctgcgatgcacggcctgggtagcatcgacagtgcgtcgctcgagcacagcaccggctccaactccgtcgtctacaacggcggggtcggcgacagcaacggcgccagcgccgtcggcggcagtggcggtggctacatgatgccgatgagcgctgccggagcaaccactacatcggcaatggtgagccacgagcaggtgcatgcacgggcctacgacgaagccaagcaggctgctcagatggggtacgagagctacctggtgaacgcggagaacaatggtggcggaaggatgtctgcatgggggactgtcgtgtctgcagccgcggcggcagcagcaagcagcaacgacaacatggccgccgacgtcgggcatggcggcgcgcagctcttcagtgtctggaacgacacttaagcgtacctagtggtacctgacatcttatagtctgcaacctctcgtgtctgaattcctatctttatcaagtgttattgcttccacgactataggacagctttcgtcgaaagcttttgctcatgtgatctcgaaggattcatctagtctgatttttcgtgacttgtatcggttttattggattcatccaacatatatcaataaaaaatgagttgtgtttcctttcttcctagttcagttaaaattatttccctcctgcgcttgtgctgtaattgtctgtgtacctgttgtttgtgactgtgttagttcccttggatatgatttcgtatttgatatgtacatggagatagcttagcttcattattggagtatgaagttagtatgacatagtcactctcctggaaaattgacactgcaaaccatatttttattctgaaccacaaatcctagtcagtccgctggcatatgccgtccgtttgctgaatccagaacgtgggtttggagatgtacggctgagatgcctctatgcgaaggggatttcgtggtgaaacgagatgggagtagagcaacgcccgtggaagatgcttcaaacttccacacttttgagcaacgatcggcagtagtaaggtagacgatttcaagatcaaagcatatgaagataaacaacatcaacaacaaaatttgttggggttctatagagagaaacagagctacatacatacactgttttgtatctaccatctgagatgatgaaaagatgaaaaactaaagaatgccccggcgccaacgccaggacacgccgcgcgcgcgtcacccgagccatctcttgacccagccggcgctgtatatttacacacgttgcagcatcgatcaccacctgttcgatcgcgtcgccgtcaccggcgcgccgcgacttattgaactagtctagggcgcggctaacaacctagcttagattgccttgtctaaacccttaggctaacgcgccac

SEQ ID NO: 139 - DNA, 3614 bp, synthetic construct
  misc_feature 1..3614: note = Plasmid E
  source 1..3614: mol_type = other DNA
accgaagcttgatatcgaattcctgcagcccatccctcagccgcctttcactatcttttttgcccgagtcattgtcatgtgaaccttggcatgtataatcggtgaattgcgtcgattttcctcttataggtgggccaatgaatccgtgtgatcgcgtctgattggctagagatatgtttcttccttgttggatgtattttcatacataatcatatgcatacaaatatttcattacactttatagaaatggtcagtaataaaccctatcactatgtctggtgtttcattttatttgcttttaaacgaaaattgacttcctgattcaatatttaaggatcgtcaacggtgtgcagttactaaattctggtttgtaggaactatagtaaactattcaagtcttcacttattgtgcactcacctctcgccacatcaccacagatgttattcacgtcttaaatttgaactacacatcatattgacacaatattttttttaaataagcgattaaaacctagcctctatgtcaacaatggtgtacataaccagcgaagtttagggagtaaaaaacatcgccttacacaaagttcgctttaaaaaataaagagtaaattttactttggaccacccttcaaccaatgtttcactttagaacgagtaattttattattgtcactttggaccaccctcaaatcttttttccatctacatccaatttatcatgtcaaagaaatggtctacatacagctaaggagatttatcgacgaatagtagctagcatactcgaggtcattcatatgcttgagaagagagtcgggatagtccaaaataaaacaaaggtaagattacctggtcaaaagtgaaaacatcagttaaaaggtggtataaagtaaaatatcggtaataaaaggtggcccaaagtgaaatttactcttttctactattataaaaattgaggatgtttttgtcggtactttgatacgtcatttttgtatgaattggtttttaagtttattcgcttttggaaatgcatatctgtatttgagtcgggttttaagttcgtttgcttttgtaaatacagagggatttgtataagaaatatctttaaaaaaacccatatgctaatttgacataatttttgagaaaaatatatattcaggcgaattctcacaatgaacaataataagattaaaatagctttcccccgttgcagcgcatgggtattttttctagtaaaaataaaagataaacttagactcaaaacatttacaaaaacaacccctaaagttcctaaagcccaaagtgctatccacgatccatagcaagcccagcccaacccaacccaacccaacccaccccagtccagccaactggacaatagtctccacacccccccactatcaccgtgagttgtccgcacgcaccgcacgtctcgcagccaaaaaaaaaaaaagaaagaaaaaaaagaaaaagaaaaaacagcaggtgggtccgggtcgtgggggccggaaacgcgaggaggatcgcgagccagcgacgaggccggccctccctccgcttccaaagaaacgccccccatcgccactatatacatacccccccctctcctcccatccccccaaccctaccaccaccaccaccaccacctccacctcctcccccctcgctgccggacgacgagctcctcccccctccccctccgccgccgccgcgccggtaaccaccccgcccctctcctctttctttctccgttttttttttccgtctcggtctcgatctttggccttggtagtttgggtgggcgagaggcggcttcgtgcgcgcccagatcggtgcgcgggaggggcgggatctcgcggctggggctctcgccggcgtggatcaggcccggatctcgcggggaatggggctctcggatgtagatctgcgatccgccgttgttgggggagatgatggggggtttaaaatttccgccatgctaaacaagatcaggaagaggggaaaagggcactatggtttatatttttatatatttctgctgcttcgtcaggcttagatgtgctagatctttctttcttctttttgtgggtagaatttgaatccctcagcattgttcatcggtagtttttcttttcatgatttgtgacaaatgcagcctcgtgcggagcttttttgtaggtagaaggatcctcgactctagaggatcgctcaggaaggccgctgagatagacgccatggcggccaatgcgggcggcggtggagcgggaggaggcagcggcagcggcagcgtggctgcgccggcggtgtgccgccccagcggctcgcggtggacgccgacgccggagcagatcaggatgctgaaggagctctactacggctgcggcatccggtcgcccagctcggagcagatccagcgcatcaccgccatgctgcggcagcacggcaagatcgagggcaagaacgtcttctactggttccagaaccacaaggcccgcgagcgccagaagcgccgcctcaccagcctcgacgtcaacgtgcccgccgccggcgcggccgacgccaccaccagccaactcggcgtcctctcgctgtcgtcgccgccgccttcaggcgcggcgcctccctcgcccaccctcggcttctacgccgccggcaatggcggcggatcggctgtgctgctggacacgagttccgactggggcagcagcggcgctgctatggccaccgagacatgcttcctgcaggactacatgggcgtgacggacacgggcagctcgtcgcagtggccacgcttctcgtcgtcggacacgataatggcggcggccgcggcgcgggcggcgacgacgcgggcgcccgagacgctccctctcttcccgacctgcggcgacgacggcggcagcggtagcagcagctacttgccgttctggggtgccgcgtccacaactgccggcgccacttcttccgttgcgatccagcagcaacaccagctgcaggagcagtacagcttttacagcaacagcaacagcacccagctggccggcaccggcaaccaagacgtatcggcaacagcagcagcagccgccgccctggagctgagcctcagctcatggtgctccccttaccctgctgcagggagtatgtgagagcaacgcgagctgccactgctcttcactgatgtctctggaatggaaggaggaggaagtgagcatagcgttggtgcgttgctgtcaagggcgaattgtaccacatggttaacctagacttgtccatcttctggattggccaacttaattaatgtatgaaataaaaggatgcacacatagtgacatgctaatcactataatgtgggcatcaaagttgtgtgttatgtgtaattactagttatctgaataaaagagaaagagatcatccatatttcttatcctaaatgaatgtcacgtgtctttataattctttgatgaaccagatgcatttcattaaccaaatccatatacatataaatattaatcatatataattaatatcaattgggttagcaaaacaaatctagtctaggtgtgttttgcgaatgcggccgcgaggtaccatcatttaaatccataccacattggcctaga

SEQ ID NO: 140 - DNA, 1872 bp, synthetic construct
  misc_feature 1..1872: note = GRF5~GIF1
  source 1..1872: mol_type = other DNA
atgctgagctcggcatcctcggccgcgggagcggccatggggatgggcggcggcgggtacgcgcaccagcccccgccacagcgcacggtcttcaccgccgcgcagtgggcggagctggagcagcaggcgctcatctacaagtacctcatggccggcgtccccgtcccgcccgacctcctcctccccgtccgccccggccccgccgccgccttctccttcgccggccccgccgccgcgtcgcccttctaccaccaacaccacccgtccctgagctactacgcctactacggcaagaaactggacccggagccgtggcggtgccgccgcaccgacggcaagaagtggcggtgctccaaggaggcgcaccccgactccaagtactgcgagcgccacatgcaccgtggccgcaaccgttcaagaaagcctgtggaatccaagaccgcctcgtcgtcgtcgcccgcgcacccgtcgccgccccagctgtccaccgtcaccaccaccgcgcctctcgagccccttgcagcggcggggggcaaggtccacggcctgtccctcggcggcggcgctgctggctcgtcgcacctcggcgtcgatgcttcgaatgctcactatcgttatggtagcaacaggtaccctctcggagctaaaccggacggcggcgagttgagcttcttctcaggagcgtcatcggggaacaactcgaggggcggcttcaccatcgactctccatcagataacaactcgtggcactccgccctggcgtccagcgtgcccccgttcacgctgtcgacgaagagcggggactccggcctcctgcccggcgcctacgcctcctactcccagtcccactcccacatggagccgccgcgggagctcgggcaggtcaccatcgcctcgctggcgcaggagcaggagcgccagcagccgttcagtggtgggatgctcgggaacgtgaagcaggagaaccagaaccagccgctgcggcccttcttcgacgagtggcccgggacgcgggcggactcgtggccgccggagatggacggcgcgccgcgggccggcaggacctccttctcctcctccaccacccagctctccatctccatcccgatgcccagatgtgagctgcatctcagaaaccagaactctggtggaggcggcagcggtggcggaggctccggaggcggtggcatgcagcagcaacacctgatgcagatgaaccagaacatgatggggggctacacctctcctgccgccgtgaccaccgatctcatccagcagtacctggacgagaacaagcagctgatcctggccatcctcgacaaccagaacaatggcaaggcggaggagtgcgaacggcaccaagctaagctccagcacaacctcatgtacctggccgccatcgctgacagccagccgccacagaccgcgccactatcacagtacccgtccaacctgatgatgcagccgggccctcggtacatgccaccgcagtccgggcagatgatgaacccgcagtcgctgatggcggcgcggtcctccatgatgtacgcgcacccgtccctgtcgccactccagcagcagcaggcggcgcacggacagctgggtatggctccagggggcggcggtggcggcacgaccagcgggttcagcatcctccacggcgaggccagcatgggcggtggtggtgctggcgcaggcgccggcaacaacatgatgaacgccggcatgttctcgggctttggccgcagcggcagtggcgccaaggaagggtcgacctctctgtcggttgacgtccggggtggaaccagctccggcgcgcagagcggggacggcgagtacctcaaagtcggcaccgaggaagaaggcagttag

SEQ ID NO: 141 - protein, 623 aa, synthetic construct
  REGION 1..623: note = GRF5~GIF1 PRT
MLSSASSAAGAAMGMGGGGYAHQPPPQRTVFTAAQWAELEQQALIYKYLMAGVPVPPDLLLPVRPGPAAAFSFAGPAAASPFYHQHHPSLSYYAYYGKKLDPEPWRCRRTDGKKWRCSKEAHPDSKYCERHMHRGRNRSRKPVESKTASSSSPAHPSPPQLSTVTTTAPLEPLAAAGGKVHGLSLGGGAAGSSHLGVDASNAHYRYGSNRYPLGAKPDGGELSFFSGASSGNNSRGGFTIDSPSDNNSWHSALASSVPPFTLSTKSGDSGLLPGAYASYSQSHSHMEPPRELGQVTIASLAQEQERQQPFSGGMLGNVKQENQNQPLRPFFDEWPGTRADSWPPEMDGAPRAGRTSFSSSTTQLSISIPMPRCELHLRNQNSGGGGSGGGGSGGGGMQQQHLMQMNQNMMGGYTSPAAVTTDLIQQYLDENKQLILAILDNQNNGKAEECERHQAKLQHNLMYLAAIADSQPPQTAPLSQYPSNLMMQPGPRYMPPQSGQMMNPQSLMAARSSMMYAHPSLSPLQQQQAAHGQLGMAPGGGGGGTTSGFSILHGEASMGGGGAGAGAGNNMMNAGMFSGFGRSGSGAKEGSTSLSVDVRGGTSSGAQSGDGEYLKVGTEEEGS

SEQ ID NO: 142 - DNA, 1077 bp, Zea mays
  source 1..1077: mol_type = unassigned DNA
atggagcggttcggcctggacggcggcggtggcggtggcgagctgccgccggggttccggttccacccgacggacgaggagctcatcacctactacctcctccgcaaggccgtggacggcagcttctgcggccgcgccatcgcggagatcgacctgaacaagtgcgagccatgggagctcccggacaaggcgaagatgggggagaaggagtggtacttctacagcctccgcgaccgcaagtacccgacgggcctgcgcaccaaccgcgccacggtggccggctactggaaggccaccggcaaggaccgcgagatccgcagcggccgcaccggcgcgctggtgggcatgaagaagacgctcgtcttctaccgcggccgcgcccccaagggacagaagacgcactgggtcatgcacgagtaccgcctcgagggcgcctacgcctaccatttcctccccagctccacaaggcaggacgagtgggtgatcgcgagggtgttccagaagcccggcgaggtcccacctgcagcccgcaagcaccgcctcggcgcccttagcagcactaccggcaccgccgcgggcgattcctgcttctcggactctacctcggcctccatcggcggcgcgtcgtcgtcatccacgcctggcccgctgttcgcgtcggcggccgccgccgtggccaatgccggcgccgccgacggcgacaccagctcctactgcggcggcgctgccaaccatggcaacctggtcaccggccgtgagctcgtgccctgcttctccactgccaccattaacggccccctagttgccgccgcgctcggcatcgggcagccgtacaacgcagccccgctgccgttcgagcagcagccgccgcctccggccttcctgccgagcctgcgttcccttcaggacaacctccagcttccaccgttcctctcagcaggcggtctgggcggcggcggggctctccactggctccccgccggcggcatggaggtcaaggtcgagggccgctcggcgccaccgcagatggctgtcggccccggccagctcgatggcgctttcggctggagcttctag

SEQ ID NO: 143 - DNA, 879 bp, Arabidopsis thaliana
  source 1..879: mol_type = unassigned DNA
atggagcctcctcagcaccaacatcaccaccatcaggccgatcaagagtccgggaacaacaacaacaacaagtccggttccggagggtacacttgcagacagacctccaccagatggacacctaccactgagcagatcaagatcctgaaggagttgtactacaacaatgccatccgctcccctactgctgatcagattcagaagatcaccgctcgcctgcgtcaattcggtaagatcgagggtaagaacgtcttctactggttccagaaccacaaggctcgtgagaggcagaagaagcgtttcaacgggactaacatgaccactccttcctcatcacccaattctgttatgatggccgccaacgaccactaccatcctttgcttcatcaccaccacggagttcctatgcaaagacccgcaaactccgtcaacgtgaagttgaaccaggaccatcacctctaccaccacaacaagccctacccctctttcaacaacgggaatctcaaccatgcctcctctggaaccgaatgtggagttgtcaacgcctccaacggctacatgtcttcccacgtgtacggctctatggagcaagattgctccatgaactacaacaacgttggaggcggatgggcaaacatggatcaccactactcctccgctccctacaacttcttcgatagggctaaacctctcttcggcttggagggacaccaagaagaagaggaatgcggaggtgatgcttacttggaacacagaaggactctccctctctttccaatgcacggtgaggaccacatcaacggaggatctggcgctatctggaagtatggacagtccgaggtcagaccatgcgcttccctggaattgagactgaactag

SEQ ID NO: 144 - protein, 292 aa, Arabidopsis thaliana
MEPPQHQHHHHQADQESGNNNNNKSGSGGYTCRQTSTRWTPTTEQIKILKELYYNNAIRSPTADQIQKITARLRQFGKIEGKNVFYWFQNHKARERQKKRFNGTNMTTPSSSPNSVMMAANDHYHPLLHHHHGVPMQRPANSVNVKLNQDHHLYHHNKPYPSFNNGNLNHASSGTECGVVNASNGYMSSHVYGSMEQDCSMNYNNVGGGWANMDHHYSSAPYNFFDRAKPLFGLEGHQEEEECGGDAYLEHRRTLPLFPMHGEDHINGGSGAIWKYGQSEVRPCASLELRLN

SEQ ID NO: 145 - DNA, 876 bp, Lotus japonicus
  source 1..876: mol_type = unassigned DNA
atggaacaaccacctcaacaacaacaacagaatgaggatggtggtgggagtagtggtggaaaaggggggtttctgagcaggcaaagcagtacacggtggactcccaccacagaccagataagaatattgaaggagctttactacaacaatggaataagatccccgagtgcagagcagattcagaggatctctgctcggctgagacagtacggcaagattgaaggcaagaatgtcttttactggttccagaaccacaaagctagagagaggcagaagaaaaggttcacttctgaaactcatcttcttcccaatcccatacaacaacaacaaagaaatggaactaatgctgcttggaagcaacctgaagaacaacccattattaaccacaccaagtattctagtaacaacatttcagctcctgcagggatcatcacttctgctccatcttcttctgcagagattgtttctgttggccagataggaaactttggttatggatctttgcctatggaaaagagttttagggactgctcaatatctgctggaggcaacacaggctatgctggaagtgctataaaccacaacctgggatggatgggtgtggatccatattcctcagcctacaccaatttctttgacaaaataaggccaactgaagaagaaaccatggaagaagaaggacaagagaatggttcaccagagattgaaacccttcctttattcccgatgcatggtgaggacattcatagtggctatttcaacctcaagtctaattcttctcactatgctggtggctggtaccagactgaagaagggtacttcaacaatggttctcgtgcttccttggagctcagcctcaaatatcctgattttgct

SEQ ID NO: 146 - protein, 292 aa, Lotus japonicus
MEQPPQQQQQNEDGGGSSGGKGGFLSRQSSTRWTPTTDQIRILKELYYNNGIRSPSAEQIQRISARLRQYGKIEGKNVFYWFQNHKARERQKKRFTSETHLLPNPIQQQQRNGTNAAWKQPEEQPIINHTKYSSNNISAPAGIITSAPSSSAEIVSVGQIGNFGYGSLPMEKSFRDCSISAGGNTGYAGSAINHNLGWMGVDPYSSAYTNFFDKIRPTEEETMEEEGQENGSPEIETLPLFPMHGEDIHSGYFNLKSNSSHYAGGWYQTEEGYFNNGSRASLELSLKYPDFA

SEQ ID NO: 147 - DNA, 888 bp, Glycine max
  source 1..888: mol_type = unassigned DNA
atggaacctcaacaacaacaacaacaagcacaagggagccaacaacaacaacaaaacgaggatggtggcagtggaaaaggggggtttctgagcaggcaaagtagtacacggtggactccaacaaacgaccagataagaatattgaaggaactttactacaacaatggaattagatccccgagtgcagagcagattcagaggatctctgctaggctgaggcagtacggtaagattgaaggcaagaatgtcttttattggttccagaaccacaaagctcgagaaaggcagaagaaaaggttcacttctgatcataatcataataatgtccccatgcaaagacccccaactaatccttctgctgcttggaaacctgatctagctgatcccattcacaccaccaagtattgtaacatctcttctactgcagggatctcttcggcatcatcttctgttgagatggttactgtgggacagatggggaattatgggtatggttctgtgcctatggagaaaagttttagggactgctcgatatcagctgggggtagcagtggccatgttggattaataaaccacaacttggggtgggttggtgtggacccatataattcctcaacctatgccaacttctttgacaaaataaggccaagtgatcaagaaacccttgaagaagaagcagagaacattggtgctactaagattgaaaccctccctttattccctatgcacggtgaggacatccacggctattgcaacctcaagtctaattcgtataactatgatggaaacggctggtatcatactgaagaagggttcaagaatgcttctcgtgcttccttggagctcagtctcaactcctacactcgcaggtctccagattatgcttaa

SEQ ID NO: 148 - protein, 295 aa, Glycine max
MEPQQQQQQAQGSQQQQQNEDGGSGKGGFLSRQSSTRWTPTNDQIRILKELYYNNGIRSPSAEQIQRISARLRQYGKIEGKNVFYWFQNHKARERQKKRFTSDHNHNNVPMQRPPTNPSAAWKPDLADPIHTTKYCNISSTAGISSASSSVEMVTVGQMGNYGYGSVPMEKSFRDCSISAGGSSGHVGLINHNLGWVGVDPYNSSTYANFFDKIRPSDQETLEEEAENIGATKIETLPLFPMHGEDIHGYCNLKSNSYNYDGNGWYHTEEGFKNASRASLELSLNSYTRRSPDYA

SEQ ID NO: 149 - DNA, 897 bp, Camelina sativa
  source 1..897: mol_type = unassigned DNA
atggagccaccgcagcatcagcatcatcaccatcaagccgaccaagaaagcggcaataacaacaagtccggttctggtggttacacttgtcgccaaaccagcacgaggtggacaccaacgacggagcagatcaaaatgctcaaagagctttattacaatagtggaatccggtcaccaacagcagatcagatccagaagatcactgctaggctgcgacagttcggaaagatcgagggcaagaacgtcttttactggttccagaaccacaaggctcgtgagcgtcagaagaagagattcaacggcacaaccatgaccacaccgtcttcatctcccaactcggttatgatggctaatgatcattatcatcaacatctccctctacttcaccatcatcatggcgttcccatgcagagacctgcgaactccgtcaacgttaaacttaaccaagagcatcatctctatcatcagaacaagtcatatcccagcttcaataacgggaatttaaatcatgcaagctcaggtactgaatgtggtgctgttaatgcttctaatggctactcaagtagccatatctatggatctatggaacaagactgttctatgaattacaacaacgtaggtggaggatggacggcaaacatggatcataatcatcattactcatcagcaccttacaacttcttcgatagaccaaaacctccgtttggtctagacggtcatcaggaagaagaagaatgtggtggcgatgcttatctggaacatcgacgtacgcttcctctcttccctatgcatggtgaagatcacataaatggtgccagctggaagtatggccaactggacggtcatgattgtcatggtagaggcccttgcgcttctcttgagcttcgtttgaactag

SEQ ID NO: 150 - protein, 298 aa, Camelina sativa
MEPPQHQHHHHQADQESGNNNKSGSGGYTCRQTSTRWTPTTEQIKMLKELYYNSGIRSPTADQIQKITARLRQFGKIEGKNVFYWFQNHKARERQKKRFNGTTMTTPSSSPNSVMMANDHYHQHLPLLHHHHGVPMQRPANSVNVKLNQEHHLYHQNKSYPSFNNGNLNHASSGTECGAVNASNGYSSSHIYGSMEQDCSMNYNNVGGGWTANMDHNHHYSSAPYNFFDRPKPPFGLDGHQEEEECGGDAYLEHRRTLPLFPMHGEDHINGASWKYGQLDGHDCHGRGPCASLELRLN

SEQ ID NO: 151 - DNA, 897 bp, Capsella rubella
  source 1..897: mol_type = unassigned DNA
atggagccaccacagcatcagcatcatcatcatcaagccgaccaagaaagcggcaacaacaacaacaagtccggctctggtggctacacgtgtcgccaaaccagcactaggtggacaccaacgacggagcagatcagaatcctcaaggatctttactacaacagtgcgatccggtcaccaacagccgatcagatccagaagatcaccgcgaggctgagacagtacgggaagatcgaaggcaagaacgtcttttactggttccagaaccataaggctcgtgagcgtcagaagaagagattcaacggcacaaccatgaccactccatcttcatctcccaactcggttatggtggctaatgatcactatcatcctctacttcaccatcatcatggtgttcccatgcaaaggcctgctaactccgtcaacgtcaaacttaaccaagaccatcatctctatcatcagaacaagtcatatcccaccttcaacaatgggaatttaaatcatggaagctcaggtactgaatgtggtgttgttaatgcttctaatggctacatgagtagccatgtctatggatctatggaacaagactgttcaatgaactacaacaacgtaggtactggaggatacggatcaaacatggatcatagtcatcattactcatctgcaccatacaacttctttgatagatcaaagcctctctttggtctagaaggtcatcaagaagatgaagaagaatatggtataggcgatgcttatctggaacatcgacgtacgcttcctctcttccctatgcatggtgaagatcacatgaacggtagtggtgctagctggaagtttgatggccgtgattgccatggtagaggcccttgcgcttctcttgagcttcgtctgaactag

SEQ ID NO: 152 - protein, 298 aa, Capsella rubella
MEPPQHQHHHHQADQESGNNNNKSGSGGYTCRQTSTRWTPTTEQIRILKDLYYNSAIRSPTADQIQKITARLRQYGKIEGKNVFYWFQNHKARERQKKRFNGTTMTTPSSSPNSVMVANDHYHPLLHHHHGVPMQRPANSVNVKLNQDHHLYHQNKSYPTFNNGNLNHGSSGTECGVVNASNGYMSSHVYGSMEQDCSMNYNNVGTGGYGSNMDHSHHYSSAPYNFFDRSKPLFGLEGHQEDEEEYGIGDAYLEHRRTLPLFPMHGEDHMNGSGASWKFDGRDCHGRGPCASLELRLN

SEQ ID NO: 153 - DNA, 588 bp, Arabis alpina
  source 1..588: mol_type = unassigned DNA
atggctactcatgtagccattagaagcattaacagcaccacattcagaacctgaacttgcatgatttaaattcccgttattgaagctgggatatgatttgttctgatgaagcagatggtgttcttggtcatgaagcttaacgttgagagaagcaggtctctgcatggaaacaccatgatgatgttgaagaagaggatgatgatgatggttatgatgataacgatcactggccatcataactgagttgggcgatgaagacgttggtgtggtggtcatggttgtgccattgaatctcttcttctgacgctcacgagccttatggttctgaaaccagtaaaagacgtttttgccctcgatcttaccatattgtctcagccttgcagagatcttctggatctcatcagcagttggtgaccggattccactattgtagtaaagatctttgaggattctgatttgctccgtggttggagtccatctcgtgctggtttgacgacaagtgtaaccaccagaaccggacttgttgttgttgttgccgctttcttggtcggcttgatgatgatgatgatgatgttgcggtggctccat

SEQ ID NO: 154 - protein, 304 aa, Arabis alpina
MEPPQHHHHHHQADQESGNNNNKSGSGGYTCRQTSTRWTPTTEQIRILKDLYYNSGIRSPTADEIQKISARLRQYGKIEGKNVFYWFQNHKARERQKKRFNGTTMTTTPTSSSPNSVMMASDRYHHNHHHHPLLQHHHGVSMQRPASLNVKLHDQEHHLLHQNKSYPSFNNGNLNHASSGSECGAVNASNGYMSSHVYGSMEQDYSMSNNNIGGGGWSNMDHNHHYSSPAYNFFDRPKPLFGLEGHQEEDQYGGDAYLEHRRTLPLFPMHGEDHINGGGGAIWKYRQLDGLELRLNSYAGVAPE

SEQ ID NO: 155 - DNA, 873 bp, Raphanus sativus
  source 1..873: mol_type = unassigned DNA
atggagccaccgcaacattaccatcaagccgatcaagaaagcggcaacaacaacaagtccgtctctggtggttacacgtgtcgtcaaacgagcacaagatggacaccaacaaccgatcaaatcagaatactcaaagatctttactacaacaatggagtccggtcaccaacagccgaccagatccagaagatctctgcaacgctgagacagtacggaaaaatcgagggaaaaaatgtcttttactggtttcaaaaccataaggctcgtgagcgacagaagaagagattcaacagcacaaccatggccacaccaacgtcttcatcgcccaactcggttatgatgatggctagtgatcaccatcatcatcatggtgttaccatccagagacctgctttggtcaacgttaagctcgaccaagaaaatcatatgtttcaccagaacagatcatatcccagctccaataacgggagtataaatcatgcaagttcaggcacggaatatggtgttttcggcgcttctaatggctacattagtaaccatatctatggatctatggaacaagactgttcaatgagctacaacagcgtaggtggaggatggacaaacatggatcataatcatcattactcaactccagcttacaacttctttgatagaccatcgcctctgtctggactagaaggtcatcaagaagaaggacaatatggtggcgattcttatctggaacatcgacgtacacttcctctcttccctttgcacggtgaggatcacatcaacggtggtggtggttccatcttgaagtacggacaatcagacggttgtgatcgttatggtagaggcccttgtgcttctcttaagctatgtctgaactga

SEQ ID NO: 156 - protein, 290 aa, Raphanus sativus
MEPPQHYHQADQESGNNNKSVSGGYTCRQTSTRWTPTTDQIRILKDLYYNNGVRSPTADQIQKISATLRQYGKIEGKNVFYWFQNHKARERQKKRFNSTTMATPTSSSPNSVMMMASDHHHHHGVTIQRPALVNVKLDQENHMFHQNRSYPSSNNGSINHASSGTEYGVFGASNGYISNHIYGSMEQDCSMSYNSVGGGWTNMDHNHHYSTPAYNFFDRPSPLSGLEGHQEEGQYGGDSYLEHRRTLPLFPLHGEDHINGGGGSILKYGQSDGCDRYGRGPCASLKLCLN

SEQ ID NO: 157 - DNA, 885 bp, Brassica napus
  source 1..885: mol_type = unassigned DNA
atggagccagcgcaacatcaccatcaagccgaccaagaaagcggcaacaacaacaagtccgtctctggtggttacacgtgtcgtcaaacgagtacaagatggacaccaacgaccgatcaaatcagaatactcaaagatctttactacaacaacggagtccggtcaccaacagccgaccagatccagaagatctctgcaaggctgagacagtacggaaagatcgagggaaaaaatgtcttttactggtttcaaaaccataaggctcgtgagcgacagaagaagagattcaacagcacaaccatgaccataccaacgtcttcatcgcccaactcggttatgatggctagtgatcactatcaccataaccatcatcatcatggcgttaccatccagagacctgctttggtcaacgttaagctcgaccaagaaaatcatatgtttcatcagaacagatcatatcccagcttcaataacgggaatacaaatcatgcaagttcaggcacggaatatggtgttttcagtgcttctaatggctacattagtagccatatctatgaacctatggaacaagactgttcaatgagctacaacaacgtaggtggaggatggacaaacatagatcataatcaccattactcaactccagcctacaacttcttagatagaccaatgcctctgtctggactagaaggtcatcatcaagaagaaggagaatatggtggcgatgcttatctggaacatagacgcacacttcctctcttccctttgcacggtgaggatcacatcaacggcggtggtggttccatctggaagtacagacaatcggacggttgtgatcgttatggtagaggcccttgtgcttctcttaagctgtgtctgaactga

SEQ ID NO: 158 - protein, 294 aa, Brassica napus
MEPAQHHHQADQESGNNNKSVSGGYTCRQTSTRWTPTTDQIRILKDLYYNNGVRSPTADQIQKISARLRQYGKIEGKNVFYWFQNHKARERQKKRFNSTTMTIPTSSSPNSVMMASDHYHHNHHHHGVTIQRPALVNVKLDQENHMFHQNRSYPSFNNGNTNHASSGTEYGVFSASNGYISSHIYEPMEQDCSMSYNNVGGGWTNIDHNHHYSTPAYNFLDRPMPLSGLEGHHQEEGEYGGDAYLEHRRTLPLFPLHGEDHINGGGGSIWKYRQSDGCDRYGRGPCASLKLCLN

SEQ ID NO: 159 - DNA, 885 bp, Brassica oleracea
  source 1..885: mol_type = unassigned DNA
atggagccagcgcaacatcaccatcaagccgaccaagaaagcggcaacaacaacaagtccgtctctggtggttacacgtgtcgtcaaacgagtacaagatggacaccaacgaccgatcaaatcagaatactcaaagatctttactacaacaacggagtccggtcaccaacagccgaccagatccagaagatctctgcaaggctgagacagtacggaaagatcgagggaaaaaatgtcttttactggtttcaaaaccataaggctcgtgagcgacagaagaagagattcaacagcacaaccatgaccataccaacgtcttcatcgcccaactcggttatgatggctagtgatcactatcaccataaccatcatcatcatggcgttaccatccagagacctgctttggtcaacgttaagctcgaccaagaaaatcatatgtttcatcagaacagatcatatcccagcttcaataacgggaatataaatcatgcaagttcaggcacggaatatggtgttttcagtgcttctaatggctacattagtagccatatctatggacctatggaacaagactgttcaatgagctacaacaacgtaggtggaggatggacaaatatagatcataatcaccattactcaactccagcctacaacttcttagatagaccaatgcctctgtctggactagaaggtcatcatcaagaagaaggagaatatggtggcgatgcttatctggaacatagacgcacacttcctctcttccctttgcacggtgaggatcacatcaacggcggtggtggttccatctggaagtacagacaatcggacggttgtgatcgttatggtagaggcccttgtgcttctcttaagctgtgtctgaactga

SEQ ID NO: 160 - protein, 294 aa, Brassica oleracea
MEPAQHHHQADQESGNNNKSVSGGYTCRQTSTRWTPTTDQIRILKDLYYNNGVRSPTADQIQKISARLRQYGKIEGKNVFYWFQNHKARERQKKRFNSTTMTIPTSSSPNSVMMASDHYHHNHHHHGVTIQRPALVNVKLDQENHMFHQNRSYPSFNNGNINHASSGTEYGVFSASNGYISSHIYGPMEQDCSMSYNNVGGGWTNIDHNHHYSTPAYNFLDRPMPLSGLEGHHQEEGEYGGDAYLEHRRTLPLFPLHGEDHINGGGGSIWKYRQSDGCDRYGRGPCASLKLCLN

SEQ ID NO: 161 - DNA, 882 bp, Helianthus annuus
  source 1..882: mol_type = unassigned DNA
atggaaactcaacaacaacaagcagatattcaagattttgggaacaaaaacagtaacacctatgcatgcaggcaaagcagtactaggtggacacccacaagtgatcagatcagaatactgaaagagctctactacaacaatggaatcagatcaccaactgctgatcagattcagagaatcgctgctcaactcagacagtacggcaagattgaaggcaagaacgtgttttattggtttcagaaccataaagctcgtgaacgccagaagaaacggttcactcctactgctcctccaccaccgtctcacttctccgatcatattaaccaccatcttcccaacgctgcccccatgcagattccgtctcaccaccaccactaccaccatcaagaaccaccacatgtctatgctcaccctcacaaactctacaccactcatcacattggggttggttcttcttcacaaggagtgatgggtgtagggtgtggctatggatctgttgctatggagaagagtttcaggaagtgttcaatatcaccaccgggagagagtaaggccacaggaggaattggccggaatatcggttcaagatcacggataagtgtcgattcgtgttccttcttcgacacaattaagccaaagacatatgagatgtttgagaatcatgatcaagatgaagaacaaggagagccttcaactgagatcgaaacacttccattattcccgattcacgacggcaaccatcatgatttcttcggcatgaggacggcaaatctgcaattggagcaaggcactggaggttactacactggaggaagctggtatcggtctgatgagagggcgtctcttgagctcagtctcaactcatatggttattataactaa

SEQ ID NO: 162 - protein, 293 aa, Helianthus annuus
METQQQQADIQDFGNKNSNTYACRQSSTRWTPTSDQIRILKELYYNNGIRSPTADQIQRIAAQLRQYGKIEGKNVFYWFQNHKARERQKKRFTPTAPPPPSHFSDHINHHLPNAAPMQIPSHHHHYHHQEPPHVYAHPHKLYTTHHIGVGSSSQGVMGVGCGYGSVAMEKSFRKCSISPPGESKATGGIGRNIGSRSRISVDSCSFFDTIKPKTYEMFENHDQDEEQGEPSTEIETLPLFPIHDGNHHDFFGMRTANLQLEQGTGGYYTGGSWYRSDERASLELSLNSYGYYN

SEQ ID NO: 163 - DNA, 795 bp, Populus trichocarpa
  source 1..795: mol_type = unassigned DNA
atggaacctcaccaacaacaaccaaatgaggataataacggtggcgccaaagggaactttctttgcaggcaaaccagtacaaggtggaatcccactactgaccagataagaatattgaaggaactgtactacatcaaaggtgttaggtccccaaatggagctgagattcagcagatctctgctaggcttagaaagtacggcaagattgaaggcaagaatgtattttattggtttcagaaccataaagctcgtgagaggcaaaagaaaagactcaccaatgaagtccccatgcaacaaagaactgcctggaaacctgaagattattactcttacaagtactccaacagtaataataatcctgggttttcttcggcttcttcatctgcaaataccggtgtggttactgttgggcagacagatagccatggatatggatcggtaaccatgcaggagaagaattcttgggactgttcagcaccagctggtggtagcaatggtgctggtagtggatccatgagcaatattaactatggatcaggggttgacattaactctcacagttcatcctatgctgtatttggtcaagaacaagaagcagctgcaaagattgagactcttcctctatttccaatgcttggtgaggacatcagtagctctttcaacatcaacaatatcaacccagacttttattacagtagcggctgtggctatggtgattatggcaatgacacttcttcccgtacttccctggaccttagtctctactcctacaatggccaaccacaagattattaa

SEQ ID NO: 164 - protein, 264 aa, Populus trichocarpa
MEPHQQQPNEDNNGGAKGNFLCRQTSTRWNPTTDQIRILKELYYIKGVRSPNGAEIQQISARLRKYGKIEGKNVFYWFQNHKARERQKKRLTNEVPMQQRTAWKPEDYYSYKYSNSNNNPGFSSASSSANTGVVTVGQTDSHGYGSVTMQEKNSWDCSAPAGGSNGAGSGSMSNINYGSGVDINSHSSSYAVFGQEQEAAAKIETLPLFPMLGEDISSSFNINNINPDFYYSSGCGYGDYGNDTSSRTSLDLSLYSYNGQPQDY

SEQ ID NO: 165 - DNA, 843 bp, Vitis vinifera
  source 1..843: mol_type = unassigned DNA
atggaacctcaacaacagctccagcagcagcagcaacaaaaccaacaacagccaaacgaggatagcggcagcagcaaaggcagttttctgtgcaggcaaagcagtacacgctggactcctacaactgaccagataagaatattgaaggacctttactacaacaatggagttaggtccccaagtgctgaacagattcagaggatctcagctaggctgaggcagtacggcaagatcgaaggcaagaacgtcttttattggtttcagaaccataaagctcgtgaaaggcagaagaagcgattcactactgatatgcccatgcaaagatcccttggaaatgccggttggagacctgatgatcccattcacaacaaatttcataccattcccactcctgggatatcttccccatcttcttcttcttcacccagtgtgcttgctgttgggcagatgggaagctttggatatggatctgtggagaggagttttacagactgttcaatatcagcaggtggtggtcgtggtggggttggtggatctataaaccagagcttcgaatgggttggcatggacccatattcttcatcttatgcactctttgacaagagaaaaacaatgggtgaaagcttcgaagaagagcaagaagaagaagcaactccggagattgaaacgctcccactctttcccatgcacgctgaggatatcactggcttttgcaacattaagcccgaatccgacgcctactactccggctggtacaggcccgccgacgccaagaccagttcccgcacttctcttgagcttagcctcaactcctacgccggcaggtccccggattccccctga

SEQ ID NO: 166 - protein, 280 aa, Vitis vinifera
MEPQQQLQQQQQQNQQQPNEDSGSSKGSFLCRQSSTRWTPTTDQIRILKDLYYNNGVRSPSAEQIQRISARLRQYGKIEGKNVFYWFQNHKARERQKKRFTTDMPMQRSLGNAGWRPDDPIHNKFHTIPTPGISSPSSSSSPSVLAVGQMGSFGYGSVERSFTDCSISAGGGRGGVGGSINQSFEWVGMDPYSSSYALFDKRKTMGESFEEEQEEEATPEIETLPLFPMHAEDITGFCNIKPESDAYYSGWYRPADAKTSSRTSLELSLNSYAGRSPDSP

SEQ ID NO: 167 - DNA, 879 bp, Arabidopsis thaliana; identical to SEQ ID NO: 143
  source 1..879: mol_type = unassigned DNA

SEQ ID NO: 168 - protein, 292 aa, Arabidopsis thaliana; identical to SEQ ID NO: 144

SEQ ID NO: 169 - DNA, 879 bp, Lotus japonicus
  source 1..879: mol_type = unassigned DNA
atggaacaacctccccaacagcagcaacaaaacgaagacggaggcggatcaagtgggggaaaaggagggttcctcagtaggcagtccagtactaggtggacacccaccacagaccagattcgcatcctcaaggagctctactacaacaacggaatacgctcaccctccgcagaacagatccagaggatctccgcaagactcagacagtacggcaagatcgagggcaagaacgtcttctactggttccaaaaccacaaagcccgcgaaaggcagaagaagcgcttcaccagtgagacacacttgctgcccaacccaattcagcagcaacagcgcaacggaacaaacgcagcttggaagcagccagaggagcaacccatcatcaaccacaccaagtactcctccaacaacatatccgcacccgcagggattatcacaagtgccccatcttcttccgcagaaatagtctccgtggggcagatcggaaacttcggatacggatctctgccaatggagaagtccttcagggactgcagtatctcagccggaggtaacacaggatacgccgggtctgctattaaccacaacctcggatggatgggagtcgacccatactcctctgcttacaccaacttcttcgacaaaatacgcccaacagaggaggagactatggaggaagaaggacaggagaacggctcaccagaaatcgagaccctgcctttgttcccaatgcacggagaggacatccactccggctacttcaacctcaagagtaactcatcccactacgctggcggatggtaccaaactgaggaaggctacttcaacaacggatcacgcgccagtctggagctgtccctgaagtaccctgacttcgcttag

SEQ ID NO: 170 - protein, 292 aa, Lotus japonicus; identical to SEQ ID NO: 146

SEQ ID NO: 171 - DNA, 909 bp, Medicago truncatula
  source 1..909: mol_type = unassigned DNA
atggaacaacctcagcagcagcagcaaccacagacccaacagcactctccaaacaacggaatcatggggtccagacagagttccaccagatggaccccaacaaccgaccagatccgcattctcaaagacctctactacaacaacggaataaggtctccaagtgccgagcaaatccagaggatctccgcaaggctcagacagtacgggaagatcgagggcaagaacgtcttctactggttccaaaaccacaaagccagagagcgccagaaaaagcgcttcacctccgacgtcaacgtcgtccctatcatccagcgcgcccccaacaacaatactatcataagtgccgccaactggaagcctgaccaccacgaacaacagcagaacattaatgtccacacaaaccactccacatacaacatctcctccgctggcctcagttctgcttcctgctcctcagcagaaatggtcactgtggggcaaataggcaactacggctacgggtctgtcccaatggagaagtctttccgcgaatgcaccatctcagctggatgctcatcatcccaggttggctcaaccataaacccccacatcggctggatcggacaccacgtcgacccatattcaagtgcctacgctaacctcttcgagaaaatacgccccaacgaggagatcatggaagagtacgaccagggacaggaaaacggttccccagagatcgagacactcccactcttccctatgcacggagaagacatccacggagggtattgcaacctcaaatcaaattcctccaactacggaggatggtaccaggcagaagacgcagggttcatgtacggaagtcgtaccacttctctcgagctcagtctgaactcctacggatgcaggtcccccgactacgccaattaa

SEQ ID NO: 172 - protein, 302 aa, Medicago truncatula
MEQPQQQQQPQTQQHSPNNGIMGSRQSSTRWTPTTDQIRILKDLYYNNGIRSPSAEQIQRISARLRQYGKIEGKNVFYWFQNHKARERQKKRFTSDVNVVPIIQRAPNNNTIISAANWKPDHHEQQQNINVHTNHSTYNISSAGLSSASCSSAEMVTVGQIGNYGYGSVPMEKSFRECTISAGCSSSQVGSTINPHIGWIGHHVDPYSSAYANLFEKIRPNEEIMEEYDQGQENGSPEIETLPLFPMHGEDIHGGYCNLKSNSSNYGGWYQAEDAGFMYGSRTTSLELSLNSYGCRSPDYAN

SEQ ID NO: 173 - DNA, 924 bp, Petunia x hybrida
  source 1..924: mol_type = unassigned DNA
atggaaacagcacagcaccagcagaacaaccaacagcactacctccaccaacacctctccatcggacaaggaacaaacatcgaggacggcagtaacaagaacaactcctccaacttcatgtgcaggcaaaatagtacccgctggacaccaaccactgaccagatcaggatattaaaggacctctactacaacaacggagtcagatcacctaccgctgaacagatccagagaatctccgccaagctcaggcagtacggcaagatcgagggcaagaacgtcttctactggttccagaaccataaagcccgcgagagacaaaagaagcgcctcatcgccgcagccaccaccgataacactaacctcccaatgcagatgcagttccagagaggagtctggagatcctctgcagacgaccccatccaccacaagtatactaatccaggagtgcactgcccttcagcttcttcccacggagttctcgcagtcggacagaacggcaatcacggatacggagccttggcaatggaaaaatccttccgcgactgctccatcagtccaggcagttccatgtcacaccaccaccaccaaaacttcgcttgggcaggagtcgatccttattcctcaaccacaacctaccctttcctcgagaagaccaagcacttcgagaatgaaaccctcgaagctgatgaagagcagcaagaggaggaccaggagaactactactaccaaaggaccacctctgccatcgaaaccctgcctctcttccctatgcacgaggagaacatctcctccttctgcaacctcaagcaccaggagtcatccggaggattctacaccgagtggtacagagcagacgacaacctcgcagcagccagagcttccctcgagctctccttgaactccttcatcggcaactcctcctag

SEQ ID NO: 174 - protein, 307 aa, Petunia x hybrida
METAQHQQNNQQHYLHQHLSIGQGTNIEDGSNKNNSSNFMCRQNSTRWTPTTDQIRILKDLYYNNGVRSPTAEQIQRISAKLRQYGKIEGKNVFYWFQNHKARERQKKRLIAAATTDNTNLPMQMQFQRGVWRSSADDPIHHKYTNPGVHCPSASSHGVLAVGQNGNHGYGALAMEKSFRDCSISPGSSMSHHHHQNFAWAGVDPYSSTTTYPFLEKTKHFENETLEADEEQQEEDQENYYYQRTTSAIETLPLFPMHEENISSFCNLKHQESSGGFYTEWYRADDNLAAARASLELSLNSFIGNSS

SEQ ID NO: 175 - DNA, 864 bp, Phaseolus vulgaris
  source 1..864: mol_type = unassigned DNA
atggaaccacagcagccccagggcagtcaaccaaacgaggacggtggaagtgggaaaggcggatttctctccagacagtcctccactaggtggactccaaccactgaccagatcagaatactcaaagacctctactacaacaacggaatcagatccccttccgcagaacagatccaaaggatctccgctaggctcagacagtacgggaagatcgagggcaagaacgtcttctactggttccaaaaccacaaggccagggagagacagaagaagaggttcacctccgacaacgtccccatgcaaagacctgcaccaacaaatgctgcacctccttggaaacccgaccaagaccccattcacaccaagtactccaacatctcctccacaggaatctccagtgcatcctcctcctcagtcgagatgatcaccgtcggacaaatggggaactacgggtacggaagtgtgccaatggaaaagtccttcagagactgctccatatccgccggaggatcttccggtcatgttggaataaaccacaacctcggctgggtgggagtcgatccttactcttctgcatacgccaacttcttcgataaaataagaccaaacgaagagaccctcgaggaagaagaagaggaggaggaggaggaagaagaagaggacggaggagcagaaattgagaccctccccctgttcccaatgcacggagaggacattcacggctactgcaacctcaagtccaacagttacaactacgacggcaacggctggtatcacagtgaggatggcttcaaaaacggcagtagggcctccctcgagctctccctcaactcttacaccagaagatcccccgacttcgcatag

SEQ ID NO: 176 - protein, 287 aa, Phaseolus vulgaris
MEPQQPQGSQPNEDGGSGKGGFLSRQSSTRWTPTTDQIRILKDLYYNNGIRSPSAEQIQRISARLRQYGKIEGKNVFYWFQNHKARERQKKRFTSDNVPMQRPAPTNAAPPWKPDQDPIHTKYSNISSTGISSASSSSVEMITVGQMGNYGYGSVPMEKSFRDCSISAGGSSGHVGINHNLGWVGVDPYSSAYANFFDKIRPNEETLEEEEEEEEEEEEEDGGAEIETLPLFPMHGEDIHGYCNLKSNSYNYDGNGWYHSEDGFKNGSRASLELSLNSYTRRSPDFA

SEQ ID NO: 177 - DNA, 963 bp, Zea mays
  source 1..963: mol_type = unassigned DNA
atggcggccaacgtgggcgcgggcaggagtgctggcggcggcggagccggcactggcactggcactgctgctggcagcggcggcgtgtcgacggccgtgtgccgccctagcggctcgcggtggacgccgacgccggagcagatcaggatcctcaaggagctctactacggctgcggcatccggtcgcccaactcggagcagatccagcgcatcaccgccatgctgcggcagcacggcaagatcgagggcaagaacgtcttctactggttccagaaccacaaggcccgcgagcgccagaagcgccgcctcaccaacctcgacgtcaacgtgcccgtcgccgccgacgacagcgcccaccgccttggcgtcctctcgttgtcgccttcttcaggttgttcaggcgcggcgcctccgtcgcccaccctcggcttctacgccggcggcaatggctccgctgtgatgctggacacgagttccgattggggcagcgctgctgccatggccactgaggcatgcttcatgcaggactacatgggcgtgatgggcggcgcgtcaccgtgggcatgctcctcctcgtcgtcggaggacccgatggcggcgctggcgctggcgccgaaggtgacccgggcgcccgagacgctccctctcttcccgaccggcggcggcggagacgataggcagcccccgcggccgcggcagtctgtcccagcaggcgaggccatccgcggcggcagcagcagcagcagctaccttccgttctggggtgccgcgcccaccccaactggcagtgccacttccgttgcgatccagcagcaacaccagctgatgcagatgcaagagcagtacagcttttacagcaacgcccagctgctgcccggcaccggcagccaggatgcagcagcaacatccctggagctgagcctcagctcctggtgctccccttaccctgcagggaccatgtga

SEQ ID NO: 178 - protein, 320 aa, Zea mays
MAANVGAGRSAGGGGAGTGTGTAAGSGGVSTAVCRPSGSRWTPTPEQIRILKELYYGCGIRSPNSEQIQRITAMLRQHGKIEGKNVFYWFQNHKARERQKRRLTNLDVNVPVAADDSAHRLGVLSLSPSSGCSGAAPPSPTLGFYAGGNGSAVMLDTSSDWGSAAAMATEACFMQDYMGVMGGASPWACSSSSSEDPMAALALAPKVTRAPETLPLFPTGGGGDDRQPPRPRQSVPAGEAIRGGSSSSSYLPFWGAAPTPTGSATSVAIQQQHQLMQMQEQYSFYSNAQLLPGTGSQDAAATSLELSLSSWCSPYPAGTM

SEQ ID NO: 179 - DNA, 978 bp, Zea mays
  source 1..978: mol_type = unassigned DNA
atggcggccaatgcgggcggcggtggagcgggaggaggcagcggcagcggcagcgtggctgcgccggcggtgtgccgccccagcggctcgcggtggacgccgacgccggagcagatcaggatgctgaaggagctctactacggctgcggcatccggtcgcccagctcggagcagatccagcgcatcaccgccatgctgcggcagcacggcaagatcgagggcaagaacgtcttctactggttccagaaccacaaggcccgcgagcgccagaagcgccgcctcaccagcctcgacgtcaacgtgcccgccgccggcgcggccgacgccaccaccagccaactcggcgtcctctcgctgtcgtcgccgccttcaggcgcggcgcctccctcgcccaccctcggcttctacgccgccggcaatggcggcggatcggctgggctgctggacacgagttccgactggggcagcagcggcgctgccatggccaccgagacatgcttcctgcaggactacatgggcgtgacggacacgggcagctcgtcgcagtggccatgcttctcgtcgtcggacacgataatggcggcggcggcggccgcggcgcgggtggcgacgacgcgggcgcccgagacactccctctcttcccgacctgcggcgacgacgacgacgacgacagccagcccccgccgcggccgcggcacgcagtcccagtcccggcaggcgagaccatccgcggcggcggcggcagcagcagcagctacttgccgttctggggtgccggtgccgcgtccacaactgccggcgccacttcttccgttgcgatccagcagcaacaccagctgcaggagcagtacagcttttacagcaacagcacccagctggccggcaccggcagccaagacgtatcggcttcagcggccgccctggagctgagcctcagctcatggtgctccccttaccctgctgcagggagcatgtga

SEQ ID NO: 180 - protein, 325 aa, Zea mays
MAANAGGGGAGGGSGSGSVAAPAVCRPSGSRWTPTPEQIRMLKELYYGCGIRSPSSEQIQRITAMLRQHGKIEGKNVFYWFQNHKARERQKRRLTSLDVNVPAAGAADATTSQLGVLSLSSPPSGAAPPSPTLGFYAAGNGGGSAGLLDTSSDWGSSGAAMATETCFLQDYMGVTDTGSSSQWPCFSSSDTIMAAAAAAARVATTRAPETLPLFPTCGDDDDDDSQPPPRPRHAVPVPAGETIRGGGGSSSSYLPFWGAGAASTTAGATSSVAIQQQHQLQEQYSFYSNSTQLAGTGSQDVSASAAALELSLSSWCSPYPAAGSM

SEQ ID NO: 181 - DNA, 666 bp, Zea mays
  source 1..666: mol_type = unassigned DNA
atggaggcgctgagcgggcgggtaggcgtcaagtgcgggcggtggaaccctacggcggagcaggtgaaggtcctgacggagctcttccgcgcggggctgcggacgcccagcacggagcagatccagcgcatctccacccacctcagcgccttcggcaaggtggagagcaagaacgtcttctactggttccagaaccacaaggcccgcgagcgccaccaccacaagaagcgacgccgcggcgcgtcgtcgtcctcccccgacagcggcagcggcaggggaagcaacaacgaggaagacggccgtggtgccgcctcgcagtcgcacgacgccgacgccgacgccgacctcgtgctgcaaccgccagagagcaagcgggaggccagaagctatggccaccatcaccggctcgtgacatgctacgtcagggacgtggtggagcagcaggaggcgtcgccgtcgtgggagcggccgacgagggaggtggagacgctagagctcttccccctcaagtcgtacggcgacctcgaggcggcggagaaggtccggtcgtacgtcagaggaagcggcgccaccagcgagcagtgcagggagttgtccttcttcgacgtcgtctccgccggccgggatccgccgctcgagctcaggctctgcagcttcggtccctag

SEQ ID NO: 182 - protein, 221 aa, Zea mays
MEALSGRVGVKCGRWNPTAEQVKVLTELFRAGLRTPSTEQIQRISTHLSAFGKVESKNVFYWFQNHKARERHHHKKRRRGASSSSPDSGSGRGSNNEEDGRGAASQSHDADADADLVLQPPESKREARSYGHHHRLVTCYVRDVVEQQEASPSWERPTREVETLELFPLKSYGDLEAAEKVRSYVRGSGATSEQCRELSFFDVVSAGRDPPLELRLCSFGP

SEQ ID NO: 183 - DNA, 975 bp, Zea mays
  source 1..975: mol_type = unassigned DNA
atggagacgccacagcagcaatccgccgccgccgccgccgccgccgcccacgggcaggacgacggcgggtcgccgccgatgtcgccggcctccgccgcggcggcggcgctggcgaacgcgcggtggaacccgaccaaggagcaggtggccgtgctggaggggctgtacgagcacggcctgcgcacccccagcgcggagcagatacagcagatcacgggcaggctgcgggagcacggcgccatcgagggcaagaacgtcttctactggttccagaaccacaaggcccgccagcgccagaggcagaagcaggacagcttcgcctacttcagcaggctcctccgccggcccccgccgctgcccgtgctctccatgccccccgcgccaccgtaccatcacgcccgcgtcccggcgccgcccgcgataccgatgccgatggcgccgccgccgcccgctgcatgcaacgacaacggcggcgcgcgtgtgatctacaggaacccattctacgtggctgcgccgcaggcgccccctgcaaatgccgcctactactacccacagccacagcagcagcagcagcagcaggtgacagtcatgtaccagtacccgagaatggaggtagccggccaggacaagatgatgaccagggccgcggcgcaccagcagcagcagcacaacggcgccgggcaacaaccgggacgcgccggccaccccagccgcgagacgctccagctgttcccgctccagcccaccttcgtgctgcggcacgacaaggggcgcgccgccaacggcagtaataacgactccctgacgtcgacgtcgacggcgactgcgacagcgacagcgacagcgacagcgtccgcttccatctccgaggactcggatggcctggagagcggcagctccggcaagggcgtcgaggaggcgcccgcgctgccgttctatgacttcttcgggctccagtcctccggaggccgctga

SEQ ID NO: 184 - protein, 324 aa, Zea mays
METPQQQSAAAAAAAAHGQDDGGSPPMSPASAAAAALANARWNPTKEQVAVLEGLYEHGLRTPSAEQIQQITGRLREHGAIEGKNVFYWFQNHKARQRQRQKQDSFAYFSRLLRRPPPLPVLSMPPAPPYHHARVPAPPAIPMPMAPPPPAACNDNGGARVIYRNPFYVAAPQAPPANAAYYYPQPQQQQQQQVTVMYQYPRMEVAGQDKMMTRAAAHQQQQHNGAGQQPGRAGHPSRETLQLFPLQPTFVLRHDKGRAANGSNNDSLTSTSTATATATATATASASISEDSDGLESGSSGKGVEEAPALPFYDFFGLQSSGGR

SEQ ID NO: 185 - DNA, 543 bp, Zea mays
  source 1..543: mol_type = unassigned DNA
atgcatggtgtacgtacgtatctcttaattttcattgtatcaaagctgcaggtgcaagtgccgccgacgacgacgacggtgggtggcacgacgcggtggaacccgtcgccggaccagataagggtgctggagatgctgtaccgcggggggatgcgcacgcccaactcgttccagatcgagcagatcacggaggagctcggcaagtacggccggatcgagggcaagaacgtcttctactggttccagaaccacaaggcccgcgagcgccagaagcagaagcgagctgccctcctcaccctcagcaccaccaccactgcttccacgctgctaccaccagctgctgaaaccaaggagggagtggagacgaaaaaagaagaagcgtgtgaagatgcatcgagccgcaagcggaggtgcagggcctgggaagatgtcgtcgtccatggtggcggcgacgatgccggtacggaggtagctgacgactactacaccgacgacgatgtgaccctggagctcttcccgctgcgtcctgatcaggggaaataa

SEQ ID NO: 186 - protein, 180 aa, Zea mays
MHGVRTYLLIFIVSKLQVQVPPTTTTVGGTTRWNPSPDQIRVLEMLYRGGMRTPNSFQIEQITEELGKYGRIEGKNVFYWFQNHKARERQKQKRAALLTLSTTTTASTLLPPAAETKEGVETKKEEACEDASSRKRRCRAWEDVVVHGGGDDAGTEVADDYYTDDDVTLELFPLRPDQGK

SEQ ID NO: 187 - DNA, 708 bp, Zea mays
  source 1..708: mol_type = unassigned DNA
atggacacggaggcgccgagcgggcgggtgggcgtcaagtgcgggcggtggaacccgacgccggagcaggtgaaggtcctgacggagctcttccgcgcggggctgcggacgcccagcacggaccagatccagcgcatctccgcccacctcggcgccttcggcaaggtggagagcaagaacgtcttctactggttccagaaccacaaggcccgcgagcgccaccaccacaagaagaagaagcgccgccgacgcggcgcggcaatggcatcgtcgtcctcccccgacagcggcagcggcagcgggagcagcgaggaagacggccgtgttgccgccgccgccgacgccgacctcgtgctgcaaccatcgccgggaagaagcaaaagcaaacgggaggccagaagaagctacggcggcggccaccatcgccggctcgttacatgtaagcagctagcgcacacacatcgctacgtcagggacgttgtggagcagcaggaggaggacacgtgggagcggccgacgagggaggcggtggagactctggagctcttccccctcaagtcgtacgtcgacctcgaggcggagaaggtccggcggtacgtcgtcagggccggcgccagcgagcagtgcagggacttctccttcttcgacgtgtccggcggtcgggatccgccgcttcttgagcttaggctctgcagcttcggtccctag

SEQ ID NO: 188 - protein, 235 aa, Zea mays
MDTEAPSGRVGVKCGRWNPTPEQVKVLTELFRAGLRTPSTDQIQRISAHLGAFGKVESKNVFYWFQNHKARERHHHKKKKRRRRGAAMASSSSPDSGSGSGSSEEDGRVAAAADADLVLQPSPGRSKSKREARRSYGGGHHRRLVTCKQLAHTHRYVRDVVEQQEEDTWERPTREAVETLELFPLKSYVDLEAEKVRRYVVRAGASEQCRDFSFFDVSGGRDPPLLELRLCSFGP

SEQ ID NO: 189 - DNA, 1545 bp, Zea mays
  source 1..1545: mol_type = unassigned DNA
atggcctcctccttcaacaacaaaaccagtcactggccgagcatgtttaggtccaagcacgccgctgagccgtggcaggcgcagcctgacatcagcagctcgccgccgtcgctcctctcaggtggcggctctagcagcaccaccaccatcggccgctgcctcaagcaccccctctcaggttactcaggtggcgaggagcggaccccggatccgaagccccggtggaaccccaggccggagcagatccggattctggaggccatcttcaactccggcatggtcaacccgccgcgcgacgagatcccccgcatccgcatgcgcctgcaggagtacggccaggtcggcgacgccaacgtcttctactggttccagaaccgcaagtcccgctccaagaacaagcagcgcaccggacagctggggctgggccttgcgcgcgcgccgggttgcggggccgctgcgccgcccgtcacgccgcagcccttgatccagaaccaattccaggtgctcgcctcgcccgcgcaggcgccagcttcctcgtcctcgtcctcctccgaccgctcctctgggtccagcaagccggcgccgcagccgatgtccgcgacggcagcggccatgaactttccagggccgctcggcgcggcgtgtgcgcagatgtactaccaagcccaccccgtggcgccggtctcggcgttgccagcgcacaaggtgcaggaccctgtagcctccgacgagcccgtcttccagccgtggccacaaggctacttcctgtcggctgccgaggtcgccagcattctcgggggccagtacaggcacgacgtgcccgtgcagcagcagccaccggcgacgttgcctgcgggagcgttcttggggctgtacaacgaggtgacagagccgactgtcactggtcacaggacatgcgcctggggcccggcggggctcgggcagttctggcccgtgggcggcgctgatcaccatcagcaccacaagcacaataccaccgcggcgaccaacaccgtagcaagggacgcggcgcacgagcacgccacgacgctggggttgctgcagtacggcttcgaagctagcgcggccatggagacggcttccgcggcggtgccccttgctgcgtcgccgggaaccgctgcgagcgtggcgacggctgggctcacatctttgcctgcaagtactaatgctgttgtcgtcaactatgatctgctgcaaggactggcagtgcccgggtccgggtccggggccgtcggtgtcagcaccggcggtgcaccgcctgtcgccgttgccgcggcgcccacggcagcgcaggagggcgtcgtcgtagcactgtgcatcacggacagcgtcacgggcaagagcgtggcacacaacgtcgcggctgccaggctcgacgtgagggcgcagttcggcgaggcggccgttctgctccgcgccgtcggcgaccgcggcgggctcgacctcgtgcccgtccccgtcgacgcgttgggctgcacagtggagccgctccagcacggtgccttttactacgtgctggtataa

SEQ ID NO: 190 - protein, 514 aa, Zea mays
MASSFNNKTSHWPSMFRSKHAAEPWQAQPDISSSPPSLLSGGGSSSTTTIGRCLKHPLSGYSGGEERTPDPKPRWNPRPEQIRILEAIFNSGMVNPPRDEIPRIRMRLQEYGQVGDANVFYWFQNRKSRSKNKQRTGQLGLGLARAPGCGAAAPPVTPQPLIQNQFQVLASPAQAPASSSSSSSDRSSGSSKPAPQPMSATAAAMNFPGPLGAACAQMYYQAHPVAPVSALPAHKVQDPVASDEPVFQPWPQGYFLSAAEVASILGGQYRHDVPVQQQPPATLPAGAFLGLYNEVTEPTVTGHRTCAWGPAGLGQFWPVGGADHHQHHKHNTTAATNTVARDAAHEHATTLGLLQYGFEASAAMETASAAVPLAASPGTAASVATAGLTSLPASTNAVVVNYDLLQGLAVPGSGSGAVGVSTGGAPPVAVAAAPTAAQEGVVVALCITDSVTGKSVAHNVAAARLDVRAQFGEAAVLLRAVGDRGGLDLVPVPVDALGCTVEPLQHGAFYYVLV

SEQ ID NO: 191 - DNA, 663 bp, Gnetum gnemon
  source 1..663: mol_type = unassigned DNA
atggaagaaaacagcaacagcagcagaagcagcaacagcggcgcacgttggaatccgacgccggagcagctgagcattctgaaagagctgtatcatggccgcggaatcaggtcgcccagcgccgaacagatccaccatatctcatggaaactcagctcctacggcaaaatcgagggcaagaacgtcttctactggttccagaaccataaggcccgccagcgtcaaaaagagcgtctcggttccgtcatgcctgcttctgcttcttcttcttcttttgcatctccttctcagggagctgtcggcattcgaaggggaagtacggtgctatgtcttaaggaaacttcagcttcatcttcatcttattcttctgttccgcgttcggtatcagctgtgcgccagtgtgctgcatctcgtgactgtggcttgcaccatgatctgacaactctggagctgtttcccctgcaccgtgaaagtagaatagacgctggggaggaagacgaggagcaacaggaggtggtggtgctagataataataataacacctggacaaggcaccaaaatgtaaatgtgaatcatgcaaataatgacgatgagccacagcatggtcatgggcagattgatattgatgtagggcttcgtctttgcctcggtggatttcgctga

SEQ ID NO: 192 - protein, 220 aa, Gnetum gnemon
MEENSNSSRSSNSGARWNPTPEQLSILKELYHGRGIRSPSAEQIHHISWKLSSYGKIEGKNVFYWFQNHKARQRQKERLGSVMPASASSSSFASPSQGAVGIRRGSTVLCLKETSASSSSYSSVPRSVSAVRQCAASRDCGLHHDLTTLELFPLHRESRIDAGEEDEEQQEVVVLDNNNNTWTRHQNVNVNHANNDDEPQHGHGQIDIDVGLRLCLGGFR

SEQ ID NO: 193 - DNA, 987 bp, Malus domestica
  source 1..987: mol_type = unassigned DNA
atggaccctcaacagaacccaaatgaagtacaagaaggaggcaacaggcaggggggtggaatcatgtgcaggcaaagcagtacgcggtggacacccacaactgatcagataaaaatcttgaaggacctttactacaacaatggcattaggtcacccagcgctgagcagattcagaggatctctgctaagctgcgacagttcggcaagatcgaaggcaagaacgttttctattggtttcagaaccacaaagctcgtgagaggcagaagaaaagattcacttcttcttctgctcctgatcaccatcatcatgcagcaccaccagtgccagctgtaccaccagaatccaataatatcaggcaaagatcatcaggggttgggattgatattaatgcaactgctgctgctgcttatgaacaagcacccattaatcaccaccgcaagtattccaacatttctgctccaccagccgggttttcttctgcatcttcttcttcagttggtgtgaatgtttctgttggggcacagatgggaaactatgggtatggatccattgctatggagaagagctttagggagtgctcaatatcatctggaggaagtactagcactggtcatgtgggtggatctaattataatacttttaatcacaactatggatcatgggttggtgttgatccatattcctcgccctacactatctttgacaagaaatcctcatcaaaaccagtgtttggtgaccaggaaaatatgacggaagaagaatactacaatctgcaagcttcccaagagattgagactctcccactcttccccatgcacggtgaagacattcatggctttggcaacatcaagtcatcctctatggatggctactactccggctggtacaggtccgatggcggcaacgatggtggctctcgcacttcccttgagcttagcctcaattcctacggtcacatgacccatgattacttcagatcatattga

SEQ ID NO: 194 - protein, 328 aa, Malus domestica
MDPQQNPNEVQEGGNRQGGGIMCRQSSTRWTPTTDQIKILKDLYYNNGIRSPSAEQIQRISAKLRQFGKIEGKNVFYWFQNHKARERQKKRFTSSSAPDHHHHAAPPVPAVPPESNNIRQRSSGVGIDINATAAAAYEQAPINHHRKYSNISAPPAGFSSASSSSVGVNVSVGAQMGNYGYGSIAMEKSFRECSISSGGSTSTGHVGGSNYNTFNHNYGSWVGVDPYSSPYTIFDKKSSSKPVFGDQENMTEEEYYNLQASQEIETLPLFPMHGEDIHGFGNIKSSSMDGYYSGWYRSDGGNDGGSRTSLELSLNSYGHMTHDYFRSY

SEQ ID NO: 195 - DNA, 867 bp, Manihot esculenta
  source 1..867: mol_type = unassigned DNA
atggaacctcaacaacaacagcagcagcagcaaaaccaacaacaaccaaacgatgacaatagcagcggtgccaaaggaaactttctttgcaggcaaagcagtactaggtggactcccacaactgaccaaataagaatattgaaggacctttactacaacagtggagttaggtccccaagtgcagagcagattcagaggatatctgctaggcttagacagtacggtaagattgaaggcaagaatgtcttttattggtttcagaaccataaagctcgtgagaggcagaagaaaaggttcaccactgatgtccccatgcaacaaagaactgtttcgaatgcttctagttggaagcctgaagactattccttccacaacaaataccccaacattgctcctgggttttcttctgcatctccatcctcagctgctgggcttcctgttggacagatgggaaactatgggtatggatctgtaactatggagaagagttttagggactgctcaatatcagctactgccaacggtggtgttggtggatccatgagccccaactgtgggtgggttggcattgatccctactgttcatcctactctctctttgacaagcaaaaatcaactaatgaaaccctagaagatgaagaacaagatcaagatcaagaagaggaagcaactccagggattgaaaccctccctctcttccctacccagagagaagacatcaatggcttctgcaacatgaagcaccaccccatctgctactccgaaaactactgctatggctctgacgatggaaacaacgcttcgcgtacttccctcgaacttagcctcaactcttacagcaatgggcaggcacgggattccatctaa

SEQ ID NO: 196 - protein, 288 aa, Manihot esculenta
MEPQQQQQQQQNQQQPNDDNSSGAKGNFLCRQSSTRWTPTTDQIRILKDLYYNSGVRSPSAEQIQRISARLRQYGKIEGKNVFYWFQNHKARERQKKRFTTDVPMQQRTVSNASSWKPEDYSFHNKYPNIAPGFSSASPSSAAGLPVGQMGNYGYGSVTMEKSFRDCSISATANGGVGGSMSPNCGWVGIDPYCSSYSLFDKQKSTNETLEDEEQDQDQEEEATPGIETLPLFPTQREDINGFCNMKHHPICYSENYCYGSDDGNNASRTSLELSLNSYSNGQARDSI

SEQ ID NO: 197 - DNA, 960 bp, Kalanchoe fedtschenkoi
  source 1..960: mol_type = unassigned DNA
atggaagctcaacagcaacagcataatacaatgatgggtgatgaccttggcggtggcaagttggcagccaccagcttcacaagagcgcaaaccaacagcagcaacaaccacagcctagttaataacaacggcggcagaagaagcagcacgaggtggacaccaacaacagaccagataagaatactcaaagatctttactacaacaatggagtgaggtctcccacggtggagcagattcagaggatctctgctaggttgagacagtacggtaagatcgagggcaaaaatgtcttctactggtttcagaaccaaaaggctcgtgaaagacagaagaggaggttcaacacaaccagcaccaccaacaacaacactgctcccgctcctctccctccatcttctactgtttgtaaaccttcttcgctagactcatccactccacacattcacactgcagcagcagctgctgctgctgcctccaaatactcagacatcaacaacaaccaaaaccttatctacccagctgggcacaatcagatgtcaggtttcggatatgctgcctccgtaacaatggagaagagcttcagagattgttctatatcgacgggcgggtcatctttcggttgggctaaaggaggaatgacagatcaccatctgtctcgtcatccctacccgcacacttcaccctatgcaatctacaaccagcggaaatcaataaacagtgatgagtatcacgagctactggcatcatcaacttcggatcatcatgaacatggggataatcggggtccggagattgaaaccctgccactatttcccatgcacggcgaggacatcaactacggcttctgccaccttaattcagccgagactgatggctggttcaatcgcgatgtgggtagtggctctcgtgcgtccctcgagctcagtctcaactcttacgcaggaatggaccacacctag

SEQ ID NO: 198 - protein, 319 aa, Kalanchoe fedtschenkoi
MEAQQQQHNTMMGDDLGGGKLAATSFTRAQTNSSNNHSLVNNNGGRRSSTRWTPTTDQIRILKDLYYNNGVRSPTVEQIQRISARLRQYGKIEGKNVFYWFQNQKARERQKRRFNTTSTTNNNTAPAPLPPSSTVCKPSSLDSSTPHIHTAAAAAAAASKYSDINNNQNLIYPAGHNQMSGFGYAASVTMEKSFRDCSISTGGSSFGWAKGGMTDHHLSRHPYPHTSPYAIYNQRKSINSDEYHELLASSTSDHHEHGDNRGPEIETLPLFPMHGEDINYGFCHLNSAETDGWFNRDVGSGSRASLELSLNSYAGMDHT

SEQ ID NO: 199 - DNA, 840 bp, Gossypium hirsutum
  source 1..840: mol_type = unassigned DNA
atggaaccccagcaacagcaacagcaaaaccaacaagctccaaatgaggattgtggtggtggcagtggcaaaggaagctttctttgcaggcaaagtagtacacggtggactcctaccactgaccagattagaatattgaaggacctttactacaacaatggagttaggtccccgagtgctgatcagattcaaaggatctctgctagacttagacagtacggaaaaatcgaaggcaagaatgtcttttattggtttcagaaccacaaggctcgtgagaggcagaagaaaaggttcaccaccacgactaatcatcatgtccccatgcaaagccctaccactgctgcaaataacaagtatcccaacataactcctggttattctcctacatctctttcttcaactggtgctcttactgttgggcagataggaaactatggctatgggtctataactatggaaaagagttttagggattgctcaatatcagcatgtggtagtagtacaagtgtaggcgaatccctgagtcacaactttggatgggttgggttcgatcctacttattcttcgtcctacacattctttgagcacaaaaaattcatggaagagagacaaaaagatgaagatgatgcagaagaagaagctgctgctccacaaattgagaccctccctctctttcccatgcacagtgaagacgctaatggtttttgcagtaatattaggcccagactagacagctgctactctgggtggtacaggtctgaagatggctacactggttctcgtgcctcacttgagctcagcctcaacccatatgcaggcagaccgcaagattctatctga

SEQ ID NO: 200 - protein, 279 aa, Gossypium hirsutum
MEPQQQQQQNQQAPNEDCGGGSGKGSFLCRQSSTRWTPTTDQIRILKDLYYNNGVRSPSADQIQRISARLRQYGKIEGKNVFYWFQNHKARERQKKRFTTTTNHHVPMQSPTTAANNKYPNITPGYSPTSLSSTGALTVGQIGNYGYGSITMEKSFRDCSISACGSSTSVGESLSHNFGWVGFDPTYSSSYTFFEHKKFMEERQKDEDDAEEEAAAPQIETLPLFPMHSEDANGFCSNIRPRLDSCYSGWYRSEDGYTGSRASLELSLNPYAGRPQDSI

SEQ ID NO: 201 - DNA, 969 bp, Zostera marina
  source 1..969: mol_type = unassigned DNA
atggaacatcatcatcagcagcagttccacggtggccagccgcagctgatgagtgaaaatgaagagatgaacaacaatgggagcgggggtgggagtagtaagagcagttttctttgcagacagtcgagcacaaggtggatacccactactgatcagataaggatactgaaggatctatactacaacagtggactgagatccccaaacgccgatcagatccaaagaatatccgccagactgaggcagtacggaaagatcgagggtaagaatgttttctactggtttcaaaatcacaaagcccgagagaggcagaagaagagactcaccgtcgatattgctgcagcggcaactaccaacaaattctccaacaacactaatatgtcttcttcttcttctccctcagggatttctcctgcttctcatgcagtgtatgcaggattagggcagatggggagcaatggcggtggatcagtcgtgatggagagaacttcttacatggagtgttccttgccaggtgggatgccgatgcccgtacctgaacccaatgtgggagtcggagtgggatgggtgagtgttgaaacaggagctactactatgcaacaattctactaccatcaacagagaccaaccacaccctttcctgctcctcatcatcaccaccattactacgacgacggttactattccaataataacaaacttcaagcccatcacctacatatacgcgaggaaaatcaacatccagaagatgacgacgaagaagaagaagaagaagaagaagatgaagagatagaaacacttccattgttcccaatccactcacaggagacacagtcttacttcctggaccaacaacatgcaatccacaatcaagaaagcaataacatggaaacctctttggagctcaccctaaactcctactatgctgcttccagtagcagtactccacatggatcagagcatgattaa

SEQ ID NO: 202 - protein, 322 aa, Zostera marina
MEHHHQQQFHGGQPQLMSENEEMNNNGSGGGSSKSSFLCRQSSTRWIPTTDQIRILKDLYYNSGLRSPNADQIQRISARLRQYGKIEGKNVFYWFQNHKARERQKKRLTVDIAAAATTNKFSNNTNMSSSSSPSGISPASHAVYAGLGQMGSNGGGSVVMERTSYMECSLPGGMPMPVPEPNVGVGVGWVSVETGATTMQQFYYHQQRPTTPFPAPHHHHHYYDDGYYSNNNKLQAHHLHIREENQHPEDDDEEEEEEEEDEEIETLPLFPIHSQETQSYFLDQQHAIHNQESNNMETSLELTLNSYYAASSSSTPHGSEHD

SEQ ID NO: 203 - DNA, 693 bp, Amborella trichopoda
  source 1..693: mol_type = unassigned DNA
atggatcattctgataactgcccaggtaacaacaacaactctggttctggttctggttctggaaccaagtctggttacatgtgcagacaatctaactctagatggatcccaaccgctgaacaaatcagaatccttagagaactttactactctaacggtgttagatctccaaccgctgaacaaatccaaagaatctctgctagacttagacaatacggtaagatcgaaggtaagaacgttttttactggtttcaaaaccataaggctagagaaagacaaaagaagagacttaccgttgatcttgctgttcaaagagctgctgctacctctggtggtcttccaccaggtgttcttaacgtttctcatatcgctggttctacctgcggttctgttcttatggaatcttctcttatggattgctgctctacctctgctcttgaaaaccataacggtagaaaggaaagagctaacggtgatatgatcgttgaaagagaaagatctgctccaggtaaggaaacccttcaactttttccaatgcatcattctccacaaaacgatgataccatcgctgatgattacttttttaacgatgaagaagaaaagccagtttgcatggcttctcttgaacttacccttaactcttttgatagagtttaccatccagattctgattttagatctcattcttcttaa

SEQ ID NO: 204 - protein, 230 aa, Amborella trichopoda
MDHSDNCPGNNNNSGSGSGSGTKSGYMCRQSNSRWIPTAEQIRILRELYYSNGVRSPTAEQIQRISARLRQYGKIEGKNVFYWFQNHKARERQKKRLTVDLAVQRAAATSGGLPPGVLNVSHIAGSTCGSVLMESSLMDCCSTSALENHNGRKERANGDMIVERERSAPGKETLQLFPMHHSPQNDDTIADDYFFNDEEEKPVCMASLELTLNSFDRVYHPDSDFRSHSS

SEQ ID NO: 205 - DNA, 834 bp, Aquilegia coerulea
  source 1..834: mol_type = unassigned DNA
atggaacctcaacaagatcccaataaccaacaacaacaacttcaacaacaacaacatgaagaaaacagcagtggaagtagtagcaaaagcagttttctttgcaggcaaactagtacaaggtggacacccacaagtgatcagataagaatcttgaaagacctttactacaacaatggagttaggtctccaagtgcagagcaaatacagagaatctcagcaaggttaaggcagtacggtaagattgaaggcaagaatgttttctattggtttcagaaccacaaagctcgtgagagacaaaagaagagattcacaaatgatacaacaaccatgtccatgcaaagagctactactgcaactggtcatgccaaatacattactacttctcctgggatttcatctccatcttctgctggtgtacttggtgttggacagatgggaagcaacatgggatatggatctgttgttatggagaagagttttagagactgttcaatatctcctgctgctggtggtggtggtggtggtggcagtaatatgggtggatatggatccatgaacaacaattttggttggattggtgcgggtgtcgagccatatccatttttcaacaagacaaagcatattcaaaaatatgaagaagaagatttctcccaaactgagattgaaacactaccactatttcccatgcatggtgaagacagtacaaggtttggttcatctggcaacccaaacccgaattggaactggtttcgaacaggagatgaaatgattggatctagaacatcattggagcttagcttgaattcttactctggcgggtcaattaataactga

SEQ ID NO: 206 - protein, 277 aa, Aquilegia coerulea
MEPQQDPNNQQQQLQQQQHEENSSGSSSKSSFLCRQTSTRWTPTSDQIRILKDLYYNNGVRSPSAEQIQRISARLRQYGKIEGKNVFYWFQNHKARERQKKRFTNDTTTMSMQRATTATGHAKYITTSPGISSPSSAGVLGVGQMGSNMGYGSVVMEKSFRDCSISPAAGGGGGGGSNMGGYGSMNNNFGWIGAGVEPYPFFNKTKHIQKYEEEDFSQTEIETLPLFPMHGEDSTRFGSSGNPNPNWNWFRTGDEMIGSRTSLELSLNSYSGGSINN

SEQ ID NO: 207 - DNA, 969 bp, Amaranthus hypochondriacus
  source 1..969: mol_type = unassigned DNA
atggagtttcaacaacaacaagatgaagagatgataaaccatgttgggaaaatgagcaacaacacaagtaacaataataataataataataactatttatgtagacaaagtagcacaagatggactccaacaacagaacaaataaagcttttaaaagatctttattatttacaaggaattagatctcctactgctgatcaaattcaaagcatttgtgctaggttacgtcgttatggaaaaattgaaggcaaaaatgttttttattggtttcaaaatcataaggctagggaaagacaaaaaaagaagcttactcctacttctcctaataataataataataataataataataatttcataagaaataataataataataataataatggaaatattaacacttttcatgctaaatatccttgttccttcaataataatcccggggtttcttgttcaagttcaccagcaggtgtgatttctggaggtgggcaattgatggggagttttgggtatggagctgtgactatggagactaaatttagggtaagaggaggtattcctattccaaatggagcaaatcaatggagtaactatttcaacccaaacaatccaacatcttactcaaatttctttattgacaaggtatcatcaaatgttgatcatcattatccatacattaaccatcatgatcatgatcatgatcatgatcatcatgatcatgatcattatggcccacaatcacctcatgagattcagactcttcctctctttcccatgcacaatgatcatcatgatctcgatctcgatctcgatctcgatcacgatcaagggttctacacctataagcctcaatcggacggctgtaattataccggaggatatcgatggtcatctaatgttaatggtggacatacttctcttgagcttagtcttaactcttatggatttggatgctattcacctaattaa

SEQ ID NO: 208 - protein, 322 aa, Amaranthus hypochondriacus
MEFQQQQDEEMINHVGKMSNNTSNNNNNNNNYLCRQSSTRWTPTTEQIKLLKDLYYLQGIRSPTADQIQSICARLRRYGKIEGKNVFYWFQNHKARERQKKKLTPTSPNNNNNNNNNNFIRNNNNNNNNGNINTFHAKYPCSFNNNPGVSCSSSPAGVISGGGQLMGSFGYGAVTMETKFRVRGGIPIPNGANQWSNYFNPNNPTSYSNFFIDKVSSNVDHHYPYINHHDHDHDHDHHDHDHYGPQSPHEIQTLPLFPMHNDHHDLDLDLDLDHDQGFYTYKPQSDGCNYTGGYRWSSNVNGGHTSLELSLNSYGFGCYSPN

SEQ ID NO: 209 - DNA, 924 bp, Cucumis sativus
  source 1..924: mol_type = unassigned DNA
atggaacatcctgccaaacaacaacaacaagaacaaggaattaatgatcaaggtggtgaaggtggtggtggaagcaatggaaaaggtgggtttttgtgtaggcaaagtagcagtcgatggactccaacaactgaccaaatacgaatattgaaagagctttattataacaatggtgttcgctccccaagcgctgatcaaattcagaggatctctgctaggcttagacagtacggtaaaatcgaaggcaaaaacgttttttattggtttcaaaaccataaggctcgtgaaagacagaagaaaagattcacttcaaattctacttctcctattactacctccaatactactacaactactactgattttaaaatttcttcaactaataataatattaactggaagtctgaagatcattcctcctcttctcataacaaatttcctccaggaataacaattgctttaattgattcttgtttttgcagctccttcttcttcggttatggtcgccgttggccatatgggaaattacggatatgggagtgttcaatatcgtcgggaggaaatagcagtgtcgtcggttaccggagccacaacatgggatcatggatcggtatcgatccgtattcttctccggcagctgccgcggcggggggatcagccaatgtgtttgaaaaaacaaaatatgttgaagaaagcatggaagatcacgaggagcaagagatcgaaactctcccccttttccccattcatggtgaccggaataatctcggtggtttctgcagcatgaagccggaatattcagagagctactacaccaccacttggtacgggcggtctgacgataatggagccgccggttctcgggcttcgctggaactcagcctcaactcttacgccaccatctcacctgatgatggaatgtga

SEQ ID NO: 210 - protein, 307 aa, Cucumis sativus
MEHPAKQQQQEQGINDQGGEGGGGSNGKGGFLCRQSSSRWTPTTDQIRILKELYYNNGVRSPSADQIQRISARLRQYGKIEGKNVFYWFQNHKARERQKKRFTSNSTSPITTSNTTTTTTDFKISSTNNNINWKSEDHSSSSHNKFPPGITIALIDSCFCSSFFFGYGRRWPYGKLRIWECSISSGGNSSVVGYRSHNMGSWIGIDPYSSPAAAAAGGSANVFEKTKYVEESMEDHEEQEIETLPLFPIHGDRNNLGGFCSMKPEYSESYYTTTWYGRSDDNGAAGSRASLELSLNSYATISPDDGM

SEQ ID NO: 211 - DNA, 840 bp, Pinus taeda
  source 1..840: mol_type = unassigned DNA
atggaatctgctgaaagaatcggttcttacgatgtttacagacaaccatcttctaccagatggaacccaacctctgaacaactttctatccttagagaactttactacaccaacggtatcagatctccaaccgttgatgaaatccatagaatctctatgaagctttctagatacggtaagatcgaaggtaagaacgttttttactggtttcaaaaccataaggctagacatagacaaaagaccagactttctgctatgaacgttggtaagccagctgcttctccagctctttctcaaaccaccagaaagcataagcaatgctacatcaccaccaacatcgttcttacccttaaccaacattgctacaccaagaccaacatggttcttcaaatcatctggtctcttggtcttggtaacaagtctcaaaccaccaagatggtttgggaaatcaagatcaccgcttttccaaccatccataccgaatctttttacgaaaacagaatggctggtgaaaactcttcttgcaaggaagctgcttgctgctctcttgaacaaatgtacgctgttaagcatcatgatgttatgaaggctatggaagaaaaccaacttcaagaaggtaagatcaacagacatgttgaaacccttgaactttttccaacccattgcgaagatagatctccagaaccatctgaaaagaagtcttgctgctggggttcttgcgaaaccaaggaaaaccataacaacaacccaccaggtggttacaagggtaagcaaagagattctgttcttgatctttgcctttctcttggtaacaagtcttgcggtcttcatgataactaa

SEQ ID NO: 212 - protein, 279 aa, Pinus taeda
MESAERIGSYDVYRQPSSTRWNPTSEQLSILRELYYTNGIRSPTVDEIHRISMKLSRYGKIEGKNVFYWFQNHKARHRQKTRLSAMNVGKPAASPALSQTTRKHKQCYITTNIVLTLNQHCYTKTNMVLQIIWSLGLGNKSQTTKMVWEIKITAFPTIHTESFYENRMAGENSSCKEAACCSLEQMYAVKHHDVMKAMEENQLQEGKINRHVETLELFPTHCEDRSPEPSEKKSCCWGSCETKENHNNNPPGGYKGKQRDSVLDLCLSLGNKSCGLHDN

SEQ ID NO: 213 - DNA, 819 bp, synthetic construct
  misc_feature 1..819: note = WUS ortholog of Solanum lycopersicum with KpnI site replaced bychanging C to T at 762bpSolanum lycopersicum coding sequence
  source 1..819: mol_type = other DNA
atggaacatcaacacaacatagaagatggtggtaaaaatagtaacaacagtttcctgtgcaggcaaagtagtagccgttggacgccaacgagcgatcagataagaatattgaaggatctctactacaacaatggagttaggtctccaactgctgaacagattcagaggatatctgctaagttgagacagtacggtaagattgaaggcaaaaatgtgttttattggtttcagaaccataaagctcgtgaaagacaaaagaagaggctcattgctgctgcctctgccactgataataataatatctcttccatgcaaatgattccacatctttggagatctcctgatgatcaccacaagtacaacactactactactaatccaggtgttcagtgtccatcaccatcttcacatggggtattaccagtggtacagactggaaactatggttatggaactttggctatggagaagagctttagggagtgttcaatatcaccaccaggtggtagttatcatcaaaatttgacatgggttggtgttgatccttacaacaatatgagtactacttctccagcaacttacccttttcttgaaaaaagcaacaacaaacactatgaagaaaccctagatgaagagcaagaagaagaaaattaccaaaggggtaactctgctttagaaactctgtcacttttccccatgcatgaagagaacatcatctcaaatttctgcatcaaacatcatgaatcttctggaggatggtaccattctgataataacaatttggctgctcttgaacttactctcaactctttcccctaa

SEQ ID NO: 214 - protein, 272 aa, Solanum lycopersicum
MEHQHNIEDGGKNSNNSFLCRQSSSRWTPTSDQIRILKDLYYNNGVRSPTAEQIQRISAKLRQYGKIEGKNVFYWFQNHKARERQKKRLIAAASATDNNNISSMQMIPHLWRSPDDHHKYNTTTTNPGVQCPSPSSHGVLPVVQTGNYGYGTLAMEKSFRECSISPPGGSYHQNLTWVGVDPYNNMSTTSPATYPFLEKSNNKHYEETLDEEQEEENYQRGNSALETLSLFPMHEENIISNFCIKHHESSGGWYHSDNNNLAALELTLNSFP

SEQ ID NO: 215 - DNA, 2130 bp, Zea mays
  source 1..2130: mol_type = unassigned DNA
atggccactgtgaacaactggctcgctttctccctctccccgcaggagctgccgccctcccagacgacggactccacgctcatctcggccgccaccgccgaccatgtctccggcgatgtctgcttcaacatcccccaagattggagcatgaggggatcagagctttcggcgctcgtcgcggagccgaagctggaggacttcctcggcggcatctccttctccgagcagcatcacaagtccaactgcaacttgatacccagcactagcagcacagtttgctacgcgagctcagctgctagcaccggctaccatcaccagctgtaccagcccaccagctccgcgctccacttcgcggactccgtcatggtggcctcctcggccggtgtccacgacggcggttccatgctcagcgcggccgccgctaacggtgtcgctggcgctgccagtgccaacggcggcggcatcgggctgtccatgatcaagaactggctgcggagccaaccggcgcccatgcagccgagggcggcggcggctgagggcgcgcaggggctctctttgtccatgaacatggcggggacgacccaaggcgctgctggcatgccacttctcgctggagagcgcgcacgggcgcccgagagtgtatcgacgtcagcacagggtggtgccgtcgtcgtcacggcgccgaaggaggatagcggtggcagcggtgttgccggtgctctagtagccgtgagcacggacacgggtggcagcggcggcgcgtcggctgacaacacggcaaggaagacggtggacacgttcgggcagcgcacgtcgatttaccgtggcgtgacaaggcatagatggactgggagatatgaggcacatctttgggataacagttgcagaagggaaggacaaactcgtaagggtcgtcaagtctatttaggtggctatgataaagaggagaaagctgctagggcttatgatcttgctgctctgaagtactggggtgccacaacaacaacaaattttccagtgagtaactacgaaaaggagctcgaggacatgaagcacatgacaaggcaggagtttgtagcgtctctgagaaggaagagcagtggtttctccagaggtgcatccatttacaggggagtgactaggcatcaccaacatggaagatggcaagcacggattggacgagttgcagggaacaaggatctttacttgggcaccttcagcacccaggaggaggcagcggaggcgtacgacatcgcggcgatcaagttccgcggcctcaacgccgtcaccaacttcgacatgagccgctacgacgtgaagagcatcctggacagcagcgccctccccatcggcagcgccgccaagcgtctcaaggaggccgaggccgcagcgtccgcgcagcaccaccacgccggcgtggtgagctacgacgtcggccgcatcgcctcgcagctcggcgacggcggagccctagcggcggcgtacggcgcgcactaccacggcgccgcctggccgaccatcgcgttccagccgggcgccgccaccacaggcctgtaccacccgtacgcgcagcagccaatgcgcggcggcgggtggtgcaagcaggagcaggaccacgcggtgatcgcggccgcgcacagcctgcaggacctccaccacttgaacctgggcgcggccggcgcgcacgactttttctcggcagggcagcaggccgccgccgcagctgcgatgcacggcctggctagcatcgacagtgcgtcgctcgagcacagcaccggctccaactccgtcgtctacaacggcggggtcggcgatagcaacggcgccagcgccgttggcagcggcggtggctacatgatgccgatgagcgctgccggagcaaccactacatcggcaatggtgagccacgagcagatgcatgcacgggcctacgacgaagccaagcaggctgctcagatggggtacgagagctacctggtgaacgcggagaacaatggtggcggaaggatgtctgcatgggggaccgtcgtctctgcagccgcggcggcagcagcaagcagcaacgacaacattgccgccgacgtcggccatggcggcgcgcagctcttcagtgtctggaacgacacttaa

SEQ ID NO: 216 - protein, 709 aa, Zea mays
MATVNNWLAFSLSPQELPPSQTTDSTLISAATADHVSGDVCFNIPQDWSMRGSELSALVAEPKLEDFLGGISFSEQHHKSNCNLIPSTSSTVCYASSAASTGYHHQLYQPTSSALHFADSVMVASSAGVHDGGSMLSAAAANGVAGAASANGGGIGLSMIKNWLRSQPAPMQPRAAAAEGAQGLSLSMNMAGTTQGAAGMPLLAGERARAPESVSTSAQGGAVVVTAPKEDSGGSGVAGALVAVSTDTGGSGGASADNTARKTVDTFGQRTSIYRGVTRHRWTGRYEAHLWDNSCRREGQTRKGRQVYLGGYDKEEKAARAYDLAALKYWGATTTTNFPVSNYEKELEDMKHMTRQEFVASLRRKSSGFSRGASIYRGVTRHHQHGRWQARIGRVAGNKDLYLGTFSTQEEAAEAYDIAAIKFRGLNAVTNFDMSRYDVKSILDSSALPIGSAAKRLKEAEAAASAQHHHAGVVSYDVGRIASQLGDGGALAAAYGAHYHGAAWPTIAFQPGAATTGLYHPYAQQPMRGGGWCKQEQDHAVIAAAHSLQDLHHLNLGAAGAHDFFSAGQQAAAAAAMHGLASIDSASLEHSTGSNSVVYNGGVGDSNGASAVGSGGGYMMPMSAAGATTTSAMVSHEQMHARAYDEAKQAAQMGYESYLVNAENNGGGRMSAWGTVVSAAAAAAASSNDNIAADVGHGGAQLFSVWNDT

SEQ ID NO: 217 - DNA, 2040 bp, Zea mays
  source 1..2040: mol_type = unassigned DNA
atggcttcagcgaacaactggctgggcttctcgctctcgggccaggataacccgcagcctaaccaggacagctcgcctgccgccggtatcgacatctccggcgccagcgacttctatggcctgcccacgcagcagggctccgacgggcatctcggcgtgccgggcctgcgggacgatcacgcttcttatggtatcatggaggcctacaacagggttcctcaagaaacccaagattggaacatgaggggcttggactacaacggcggtggctcggagctctcgatgcttgtggggtccagcggcggcggcgggggcaacggcaagagggccgtggaagacagcgagcccaagctcgaagatttcctcggcggcaactcgttcgtctccgatcaagatcagtccggcggttacctgttctctggagtcccgatagccagcagcgccaatagcaacagcgggagcaacaccatggagctctccatgatcaagacctggctacggaacaaccaggtggcccagccccagccgccagctccacatcagccgcagcctgaggaaatgagcaccgacgccagcggcagcagctttggatgctcggattcgatgggaaggaacagcatggtggcggctggtgggagctcgcagagcctggcgctctcgatgagcacgggctcgcacctgcccatggttgtgcccagcggcgccgccagcggagcggcctcggagagcacatcgtcggagaacaagcgagcgagcggtgccatggattcgcccggcagcgcggtagaagccgtaccgaggaagtccatcgacacgttcgggcaaaggacctctatatatcgaggtgtaacaaggcatagatggacagggcggtatgaggctcatctatgggataatagttgtagaagggaagggcagagtcgcaagggtaggcaagtttaccttggtggctatgacaaggaggacaaggcagcaagggcttacgatttggcagctctcaagtattggggcactacgacaacaacaaatttccctataagcaactacgaaaaagagctagaagaaatgaaacatatgactagacaggagtacattgcatacctaagaagaaatagcagtggattttctcgtggggcatcaaagtatcgtggagtaactagacatcatcagcatgggagatggcaagcaaggatagggagagttgcaggaaacaaggatctttacttgggcacattcagcaccgaggaggaggcggcggaggcctacgacatcgccgcgatcaagttccgcggtctcaacgccgtcaccaacttcgacatgagccgctacgacgtgaagagcatcctcgagagcagcacactgcctgtcggcggtgcggccaggcgcctcaaggacgccgtggaccacgtggaggccggcgccaccatctggcgcgccgacatggacggcgccgtgatctcccagctggccgaagccgggatgggcggctacgcctcgtacggccaccacggctggccgaccatcgcgttccagcagccgtcgccgctctccgtccactacccgtacggccagccgtcccgcgggtggtgcaaacccgagcaggacgcggccgccgccgcggcgcacagcctgcaggacctccagcagctgcacctcggcagcgcggcccacaacttcttccaggcgtcgtcgagctccacagtctacaacggcggcgccggcgccagtggtgggtaccagggcctcggtggtggcagctctttcctcatgccgtcgagcactgtcgtggcggcggccgaccaggggcacagcagcacggccaaccaggggagcacgtgcagctacggggacgaccaccaggaggggaagctcatcggttacgacgccgccatggtggcgaccgcagctggtggagacccgtacgctgcggcgaggaacgggtaccagttctcgcagggctcgggatccacggtgagcatcgcgagggcgaacgggtacgctaacaactggagctctcctttcaacaacggcatggggtga

SEQ ID NO: 218 - protein, 679 aa, Zea mays
MASANNWLGFSLSGQDNPQPNQDSSPAAGIDISGASDFYGLPTQQGSDGHLGVPGLRDDHASYGIMEAYNRVPQETQDWNMRGLDYNGGGSELSMLVGSSGGGGGNGKRAVEDSEPKLEDFLGGNSFVSDQDQSGGYLFSGVPIASSANSNSGSNTMELSMIKTWLRNNQVAQPQPPAPHQPQPEEMSTDASGSSFGCSDSMGRNSMVAAGGSSQSLALSMSTGSHLPMVVPSGAASGAASESTSSENKRASGAMDSPGSAVEAVPRKSIDTFGQRTSIYRGVTRHRWTGRYEAHLWDNSCRREGQSRKGRQVYLGGYDKEDKAARAYDLAALKYWGTTTTTNFPISNYEKELEEMKHMTRQEYIAYLRRNSSGFSRGASKYRGVTRHHQHGRWQARIGRVAGNKDLYLGTFSTEEEAAEAYDIAAIKFRGLNAVTNFDMSRYDVKSILESSTLPVGGAARRLKDAVDHVEAGATIWRADMDGAVISQLAEAGMGGYASYGHHGWPTIAFQQPSPLSVHYPYGQPSRGWCKPEQDAAAAAAHSLQDLQQLHLGSAAHNFFQASSSSTVYNGGAGASGGYQGLGGGSSFLMPSSTVVAAADQGHSSTANQGSTCSYGDDHQEGKLIGYDAAMVATAAGGDPYAAARNGYQFSQGSGSTVSIARANGYANNWSSPFNNGMG

SEQ ID NO: 219 - DNA, 2133 bp, Zea mays
  source 1..2133: mol_type = unassigned DNA
atggccactgtgaacaactggctcgctttctccctctccccgcaggagctgccgccctcccagacgacggactccacactcatctcggccgccaccgccgaccatgtctccggcgatgtctgcttcaacatcccccaagattggagcatgaggggatcagagctttcggcgctcgtcgcggagccgaagctggaggacttcctcggcggcatctccttctccgagcagcatcacaaggccaactgcaacatgatacccagcactagcagcacagtttgctacgcgagctcaggtgctagcaccggctaccatcaccagctgtaccaccagcccaccagctcagcgctccacttcgcggactccgtaatggtggcctcctcggccggtgtccacgacggcggtgccatgctcagcgcggccgccgctaacggtgtcgctggcgctgccagtgccaacggcggcggcatcgggctgtccatgattaagaactggctgcggagccaaccggcgcccatgcagccgagggtggcggcggctgagggcgcgcaggggctctctttgtccatgaacatggcggggacgacccaaggcgctgctggcatgccacttctcgctggagagcgcgcacgggcgcccgagagtgtatcgacgtcagcacagggtggagccgtcgtcgtcacggcgccgaaggaggatagcggtggcagcggtgttgccggcgctctagtagccgtgagcacggacacgggtggcagcggcggcgcgtcggctgacaacacggcaaggaagacggtggacacgttcgggcagcgcacgtcgatttaccgtggcgtgacaaggcatagatggactgggagatatgaggcacatctttgggataacagttgcagaagggaagggcaaactcgtaagggtcgtcaagtctatttaggtggctatgataaagaggagaaagctgctagggcttatgatcttgctgctctgaagtactggggtgccacaacaacaacaaattttccagtgagtaactacgaaaaggagctcgaggacatgaagcacatgacaaggcaggagtttgtagcgtctctgagaaggaagagcagtggtttctccagaggtgcatccatttacaggggagtgactaggcatcaccaacatggaagatggcaagcacggattggacgagttgcagggaacaaggatctttacttgggcaccttcagcacccaggaggaggcagcggaggcgtacgacatcgcggcgatcaagttccgcggcctcaacgccgtcaccaacttcgacatgagccgctacgacgtgaagagcatcctggacagcagcgccctccccatcggcagcgccgccaagcgcctcaaggaggccgaggccgcagcgtccgcgcagcaccaccacgccggcgtggtgagctacgacgtcggccgcatcgcctcgcagctcggcgacggcggagccctggcggcggcgtacggcgcgcactaccacggcgccgcctggccgaccatcgcgttccagccgggcgccgccagcacaggcctgtaccacccgtacgcgcagcagccaatgcgcggcggcgggtggtgcaagcaggagcaggaccacgcggtgatcgcggccgcgcacagcctgcaggacctccaccacctgaacctgggcgcggccggcgcgcacgactttttctcggcagggcagcaggccgccgccgctgcgatgcacggcctgggtagcatcgacagtgcgtcgctcgagcacagcaccggctccaactccgtcgtctacaacggcggggtcggcgacagcaacggcgccagcgccgtcggcggcagtggcggtggctacatgatgccgatgagcgctgccggagcaaccactacatcggcaatggtgagccacgagcaggtgcatgcacgggcctacgacgaagccaagcaggctgctcagatggggtacgagagctacctggtgaacgcggagaacaatggtggcggaaggatgtctgcatgggggactgtcgtgtctgcagccgcggcggcagcagcaagcagcaacgacaacatggccgccgacgtcggccatggcggcgcgcagctcttcagtgtctggaacgacacttaa

SEQ ID NO: 220 - DNA, 1680 bp, Oryza sativa
  source 1..1680: mol_type = unassigned DNA
atggcctccatcaccaactggctcggcttctcctcctcctccttctccggcgccggcgccgaccccgtcctgccccacccgccgctgcaagagtgggggagcgcttatgagggcggcggcacggtggcggccgccggcggggaggagacggcggcgccgaagctggaggacttcctcggcatgcaggtgcagcaggagacggccgccgcggcggcggggcacggccgtggaggcagctcgtcggtcgttgggctgtccatgatcaagaactggctacgcagccagccgccgcccgcggtggttgggggagaagacgctatgatggcgctcgcggtgtcgacgtcggcgtcgccgccggtggacgcgacggtgccggcctgcatttcgccggatgggatggggtcgaaggcggccgacggcggcggcgcggccgaggcggcggcggcggcggcggcgcagaggatgaaggcggccatggacacgttcgggcagcggacgtccatctaccggggtgtcaccaagcacaggtggacaggaaggtatgaagcccatctttgggataacagctgcagaagagaaggtcagactcgcaaaggcagacaagtcaatgcaggaggatatgataaggaagaaaaagctgctagggcttatgatttggctgcccttaaatactggggcactacaacgacgacgaattttccggtaagcaactacgaaaaagagttggatgaaatgaagcacatgaataggcaggaatttgttgcatcccttagaagaaaaagcagtggattttcacgtggtgcttccatatatcgtggtgttacaagacaccatcagcatggaaggtggcaagcaaggataggacgggtggcaggaaacaaggatctgtatttgggcacatttggcacccaagaggaagctgcagaggcatatgatatcgctgcaatcaaattccgtggtctcaatgctgtgacaaactttgacatgagccggtacgatgtcaagagcatcattgaaagcagcaatctcccaattggtactggaaccacccggcgattgaaggactcctctgatcacactgataatgtcatggacatcaatgtcaataccgaacccaataatgtggtatcatcccacttcaccaatggggttggcaactatggttcgcagcattatggttacaatggatggtcgccaattagcatgcagccgatcccctcgcagtacgccaacggccagcccagggcatggttgaaacaagagcaggacagctctgtggttacagcggcgcagaacctgcacaatctacatcattttagttccttgggctacacccacaacttcttccagcaatctgatgttccagacgtcacaggtttcgttgatgcgccttcgaggtccagtgactcatactccttcaggtacaatggaacaaatggctttcatggtctcccgggtggaatcagctatgctatgccggttgcgacagcggtggaccaaggtcagggcatccatggctatggagaagatggtgtggcaggcattgacaccacacatgacctgtatggcagccgtaatgtgtactacctttccgagggttcgcttcttgccgatgtcgaaaaagaaggcgactatggccaatctgtggggggcaacagctgggttttgccgacaccgtag

SEQ ID NO: 221 - protein, 559 aa, Oryza sativa
MASITNWLGFSSSSFSGAGADPVLPHPPLQEWGSAYEGGGTVAAAGGEETAAPKLEDFLGMQVQQETAAAAAGHGRGGSSSVVGLSMIKNWLRSQPPPAVVGGEDAMMALAVSTSASPPVDATVPACISPDGMGSKAADGGGAAEAAAAAAAQRMKAAMDTFGQRTSIYRGVTKHRWTGRYEAHLWDNSCRREGQTRKGRQVNAGGYDKEEKAARAYDLAALKYWGTTTTTNFPVSNYEKELDEMKHMNRQEFVASLRRKSSGFSRGASIYRGVTRHHQHGRWQARIGRVAGNKDLYLGTFGTQEEAAEAYDIAAIKFRGLNAVTNFDMSRYDVKSIIESSNLPIGTGTTRRLKDSSDHTDNVMDINVNTEPNNVVSSHFTNGVGNYGSQHYGYNGWSPISMQPIPSQYANGQPRAWLKQEQDSSVVTAAQNLHNLHHFSSLGYTHNFFQQSDVPDVTGFVDAPSRSSDSYSFRYNGTNGFHGLPGGISYAMPVATAVDQGQGIHGYGEDGVAGIDTTHDLYGSRNVYYLSEGSLLADVEKEGDYGQSVGGNSWVLPTP

SEQ ID NO: 222 - DNA, 2104 bp, Oryza sativa
  source 1..2104: mol_type = unassigned DNA
atggcttctgcaaacaactggctgggcttctcgctctccggccaagagaatccgcagcctcaccaggatagctcgcctccggcagccatcgacgtctccggcgccggcgacttctatggcctgccgacgtcgcagccgacggcggccgacgcgcacctcggcgtggcggggcatcatcacaacgcctcgtatggcatcatggaggccttcaataggggagctcaagaggcacaagattggaacatgagggggctggactacaacggcggcgcctcggagctgtcgatgctcgtcggctccagcggcggcaagagggcggcggcggtggaggagaccgagccgaagctggaggacttcctcggcggcaactcgttcgtctccgagcaagatcatcacgcggcggggggcttcctcttctccggcgtcccgatggccagcagcaccaacagcaacagcgggagcaacactatggagctctccatgatcaagacctggctccggaacaacggccaggtgcccgccggccaccagccgcagcagcagcagccggcggccgcggccgccgccgcgcagcagcaggcgcacgaggcggcggagatgagcaccgacgcgagcgcgagcagcttcgggtgctcctccgacgcgatggggaggagtaacaacggcggcgcggtctcggcggcggccggcgggacgagctcgcagagcctggcgctctcgatgagcacgggctcgcactcgcacctgcctatcgtcgtcgccggcggcgggaacgccagcggcggagcggccgagagcacatcgtcggagaacaagcgggccagcggcgccatggattcgccgggcggtggcgcgatagaggccgtgccgaggaagtccatcgacacgttcgggcaaaggacctcgatatatcgaggtgtaacaaggcatagatggacagggcgatatgaggctcatctctgggataatagctgtagaagagaagggcagagtcgcaagggtaggcaaggtggctatgacaaggaggataaagcagcgagagcttatgatttggcagctctgaagtattggggcacaacaacaacaacaaatttcccaataagtaactatgaaaaagagctagatgaaatgaaacatatgaccaggcaggagtatattgcatacctaagaaggaatagcagtggattttctcgtggtgcatcgaaatatcgtggtgtaaccaggcaccatcagcatgggagatggcaagcaaggatagggagggttgcaggaaacaaggacctctacttaggcaccttcagcaccgaggaggaggcggcggaggcgtacgacatcgcggcgatcaagttccgggggctcaacgccgtcaccaactttgacatgagccgctacgacgtcaagagcatcctggagagcagcacgctgccggtgggcggcgcggcgaggcggctgaaggaggcggcggaccacgcggaggcggccggcgccaccatctggcgcgccgccgacatggacggcgccggcgtcatctccggcctggccgacgtcgggatgggcgcctacgccgcctcgtaccaccaccaccaccaccacggctggccgaccatcgcgttccagcagccgccgccgctcgccgtgcactacccgtacggccaggcgccggcggcgccgtcgcgcgggtggtgcaagcccgagcaggacgccgccgtcgctgccgccgcgcacagcctccaggacctccagcagctgcacctcggcagcgccgccgcccacaacttcttccaggcgtcgtcgagctcgacggtctacaacggcggcggcggcgggtaccagggcctcggtggcaacgccttcttgatgccggcgagcaccgtcgtggccgaccaggggcacagcagcacggccaccaaccatggaaacacctgcagctacggcaacgaggagcaggggaagctcatcgggtacgacgccatggcgatggcgagcggcgccgccggcggcgggtaccagctgtcgcagggctcggcgtcgacggtgagcatcgcgagggcgaacggctactcggccaactggagctcgcctttcaatggcgccatgggatgat

SEQ ID NO: 223 - protein, 700 aa, Oryza sativa
MASANNWLGFSLSGQENPQPHQDSSPPAAIDVSGAGDFYGLPTSQPTAADAHLGVAGHHHNASYGIMEAFNRGAQEAQDWNMRGLDYNGGASELSMLVGSSGGKRAAAVEETEPKLEDFLGGNSFVSEQDHHAAGGFLFSGVPMASSTNSNSGSNTMELSMIKTWLRNNGQVPAGHQPQQQQPAAAAAAAQQQAHEAAEMSTDASASSFGCSSDAMGRSNNGGAVSAAAGGTSSQSLALSMSTGSHSHLPIVVAGGGNASGGAAESTSSENKRASGAMDSPGGGAIEAVPRKSIDTFGQRTSIYRGVTRHRWTGRYEAHLWDNSCRREGQSRKGRQGGYDKEDKAARAYDLAALKYWGTTTTTNFPISNYEKELDEMKHMTRQEYIAYLRRNSSGFSRGASKYRGVTRHHQHGRWQARIGRVAGNKDLYLGTFSTEEEAAEAYDIAAIKFRGLNAVTNFDMSRYDVKSILESSTLPVGGAARRLKEAADHAEAAGATIWRAADMDGAGVISGLADVGMGAYAASYHHHHHHGWPTIAFQQPPPLAVHYPYGQAPAAPSRGWCKPEQDAAVAAAAHSLQDLQQLHLGSAAAHNFFQASSSSTVYNGGGGGYQGLGGNAFLMPASTVVADQGHSSTATNHGNTCSYGNEEQGKLIGYDAMAMASGAAGGGYQLSQGSASTVSIARANGYSANWSSPFNGAMG

SEQ ID NO: 224 - DNA, 1977 bp, Oryza sativa
  source 1..1977: mol_type = unassigned DNA
atggcttctgcagataactggctaggcttctcgctctccggccaaggcaacccacagcatcaccagaacggctcgccgtctgccgccggcgacgccgccatcgacatctccggctcaggcgacttctatggtctgccaacgccggacgcacaccacatcggcatggcgggcgaagacgcgccctatggcgtcatggatgctttcaacagaggcacccatgaaacccaagattgggcgatgaggggtttggactacggcggcggctcctccgacctctcgatgctcgtcggctcgagcggcggcgggaggaggacggtggccggcgacggcgtcggcgaggcgccgaagctggagaacttcctcgacggcaactcattctccgacgtgcacggccaagccgccggcgggtacctctactccggaagcgctgtcggcggcgccggtggttacagtaacggcggatgcggcggcggaaccatagagctgtccatgatcaagacgtggctccggagcaaccagtcgcagcagcagccatcgccgccgcagcacgctgatcagggcatgagcaccgacgccagcgcgagcagctacgcgtgctccgacgtgctggtggggagctgcggcggcggcggcgccgggggcacggcgagctcgcatgggcagggcctggcgctgtcgatgagcacggggtcggtggccgccgccggagggggcggcgccgtcgtcgcggccgagagctcgtcgtcggagaacaagcgggtggattcgccgggcggcgccgtggacggcgccgtcccgaggaaatccatcgacaccttcgggcaaaggacgtctatataccgaggtgtaacaaggcatagatggacaggaagatatgaagctcatctgtgggataatagctgtaggagagaaggccaaagtcgcaaggggagacaggtttgtgtaggcggttatgacaaagaagataaggcggctcgggcttatgatttggcagctctaaaatactggggcacgaccacaacaacaaatttcccaatgagtaattatgaaaaggagctagaggaaatgaaacacatgaccaggcaggagtacattgcacatcttagaaggaatagcagtggattttctcgtggtgcatccaaatatcgtggtgttactaggcatcatcagcatgggagatggcaggcaaggatagggcgagttgcaggcaacaaggatatctacctaggcaccttcagcaccgaggaggaggccgccgaggcgtacgacatcgccgccatcaagttccgcgggctcaacgccgtcaccaacttcgacatgagccggtacgacgtcaagagcatcctggacagcagcacgctgccggtcggcggcgcggcgcggcggctcaaggaggcggaggtcgccgccgccgccgcgggcggcggcgtgatcgtctcccacctggccgacggcggtgtgggtgggtactactacgggtgcggcccgaccatcgcgttcggcggcggcggccagcagccggcgccgctcgccgtgcactacccgtcgtacggccaggccagcgggtggtgcaagccggagcaggacgcggtgatcgcggccgggcactgcgcgacggacctccagcacctgcacctcgggagcggcggcgccgccgccacccacaacttcttccagcagccggcgtcaagctcggccgtctacggcaacggcggcggcggcggcggcaacgcgttcatgatgccgatgggcgccgtggtggccgccgccgatcacggcgggcagagcagcgcctacggcggtggcgacgagagcgggaggctcgtcgtggggtacgacggcgtcgtcgacccgtacgcggccatgagaagcgcgtacgagctctcgcagggctcgtcgtcgtcgtcggtgagcgtcgcgaaggcggcgaacgggtacccggacaactggagctcgccgttcaacggcatgggatga

SEQ ID NO: 225 - protein, 658 aa, Oryza sativa
MASADNWLGFSLSGQGNPQHHQNGSPSAAGDAAIDISGSGDFYGLPTPDAHHIGMAGEDAPYGVMDAFNRGTHETQDWAMRGLDYGGGSSDLSMLVGSSGGGRRTVAGDGVGEAPKLENFLDGNSFSDVHGQAAGGYLYSGSAVGGAGGYSNGGCGGGTIELSMIKTWLRSNQSQQQPSPPQHADQGMSTDASASSYACSDVLVGSCGGGGAGGTASSHGQGLALSMSTGSVAAAGGGGAVVAAESSSSENKRVDSPGGAVDGAVPRKSIDTFGQRTSIYRGVTRHRWTGRYEAHLWDNSCRREGQSRKGRQVYLGGYDKEDKAARAYDLAALKYWGTTTTTNFPMSNYEKELEEMKHMTRQEYIAHLRRNSSGFSRGASKYRGVTRHHQHGRWQARIGRVAGNKDIYLGTFSTEEEAAEAYDIAAIKFRGLNAVTNFDMSRYDVKSILDSSTLPVGGAARRLKEAEVAAAAAGGGVIVSHLADGGVGGYYYGCGPTIAFGGGGQQPAPLAVHYPSYGQASGWCKPEQDAVIAAGHCATDLQHLHLGSGGAAATHNFFQQPASSSAVYGNGGGGGGNAFMMPMGAVVAAADHGGQSSAYGGGDESGRLVVGYDGVVDPYAAMRSAYELSQGSSSSSVSVAKAANGYPDNWSSPFNGMG

SEQ ID NO: 226 - DNA, 2082 bp, Sorghum bicolor
  source 1..2082: mol_type = unassigned DNA
atggcttcgacgaacaaccactggctgggtttctcgctctcgggccaggataacccgcagcctaatcatcaggacagctcgcctgccgccgccggcatcgacatctccggcgccagcgacttctatggcttgcccacgcagcagggctccgacgggaatctcggcgtgccgggcctgcgggacgatcacgcttcttatggcatcatggaggccttcaacagggttcctcaagaaacccaagattggaacatgaggggattggactacaacggcggtggctcggaactctcgatgcttgtggggtccagcggcggcggcgggggcggcggcaagagggccgtggaagacagcgagcccaagctcgaagatttcctcggcggcaactcgttcgtctccgagcatgatcagtccggcggttacctgttctctggagtcccgatggccagcagcaccaacagcaacagcgggagcaacaccatggagctctccatgatcaagacctggctccggaacaaccaggtgccccagccgcagccgccagcagctccgcatcaggcgccgcagactgaggagatgagcaccgacgccaacgccagcgccagcagctttggctgctcggattcgatggggaggaacggcacggtggcggctgctgggagctcccagagcctggcgctctcgatgagcacgggctcgcacctgccgatggttgtggccggcggcggcgccagcggagcggcctcggagagcacgtcatcggagaacaagcgagcgagcggcgccatggattcgcccggcagcgcggtagaagccgtcccgaggaagtccatcgacacgttcgggcaaaggacctctatatatcgaggtgtaacaagacatagatggacagggcgatatgaggctcatctatgggataatagttgtagaagagaagggcagagtcgcaagggtaggcaagtttaccttggtggctatgacaaggaagacaaggcagcaagggcttatgatttggcagctctcaagtattggggcactactacaacaacaaatttccctataagcaactatgaaaaggagctagaggaaatgaaacatatgactaggcaggagtatattgcatacctaagaagaaatagcagtggattttctcgtggcgcatcaaaatatcgtggagtaactagacatcatcagcatgggagatggcaagcaaggatagggagagttgcaggaaacaaggatctctacttgggcacattcagcaccgaggaggaggcggcggaggcctacgacatcgccgcgatcaagttccgcggtctgaacgccgtcaccaacttcgacatgagccgctacgacgtcaagagcatcctcgagagcagcacgctgcctgtcggcggcgcggccaggcgcctcaaggatgccgtggaccacgtggaggccggcgccaccatctggcgcgccgacatggacggcggcgtgatctcccagctcgccgaagccgggatgggcggctacgcctcgtacgggcaccacgcctggccgaccatcgcgttccagcagccgtcgccgctctccgtccactacccgtacgggcagccgccgtcccgcgggtggtgcaagcccgagcaggacgcggccgtcgccgccgccgcgcacagcctgcaggacctccagcagctgcacctcggcagcgcggcacacaacttcttccaggcgtcgtcgagctcggcagtctacaacagcggcggcggcggcgctagcggcgggtaccaccagggcctcggtggcggcagcagctccttcctcatgccgtcgagcactgtcgtggcgggggccgaccaggggcacagcagcagcacggccaaccaggggagcacgtgcagctacggggacgatcaccaggaagggaagctcatcgggtacgacgccatggtggcggcgaccgcagccggcggggacccgtacgccgcggcgaggagcgggtaccagttctcgtcgcagggctcgggatccacggtgagcatcgcgagggcgaacgggtactctaacaactggagctctcctttcaacggcggcatggggtga

SEQ ID NO: 227 - protein, 693 aa, Sorghum bicolor
MASTNNHWLGFSLSGQDNPQPNHQDSSPAAAGIDISGASDFYGLPTQQGSDGNLGVPGLRDDHASYGIMEAFNRVPQETQDWNMRGLDYNGGGSELSMLVGSSGGGGGGGKRAVEDSEPKLEDFLGGNSFVSEHDQSGGYLFSGVPMASSTNSNSGSNTMELSMIKTWLRNNQVPQPQPPAAPHQAPQTEEMSTDANASASSFGCSDSMGRNGTVAAAGSSQSLALSMSTGSHLPMVVAGGGASGAASESTSSENKRASGAMDSPGSAVEAVPRKSIDTFGQRTSIYRGVTRHRWTGRYEAHLWDNSCRREGQSRKGRQVYLGGYDKEDKAARAYDLAALKYWGTTTTTNFPISNYEKELEEMKHMTRQEYIAYLRRNSSGFSRGASKYRGVTRHHQHGRWQARIGRVAGNKDLYLGTFSTEEEAAEAYDIAAIKFRGLNAVTNFDMSRYDVKSILESSTLPVGGAARRLKDAVDHVEAGATIWRADMDGGVISQLAEAGMGGYASYGHHAWPTIAFQQPSPLSVHYPYGQPPSRGWCKPEQDAAVAAAAHSLQDLQQLHLGSAAHNFFQASSSSAVYNSGGGGASGGYHQGLGGGSSSFLMPSSTVVAGADQGHSSSTANQGSTCSYGDDHQEGKLIGYDAMVAATAAGGDPYAAARSGYQFSSQGSGSTVSIARANGYSNNWSSPFNGGMG

SEQ ID NO: 228 - DNA, 2112 bp, Sorghum bicolor
  source 1..2112: mol_type = unassigned DNA
atggctactgtgaacaactggctcgctttctccctctccccgcaggagctgccgcccacccagacggactccaccctcatctctgccgccaccaccgacgatgtctccggcgatgtctgcttcaacatcccccaagattggagcatgaggggatccgagctttcggcgctcgtcgccgagccgaagctggaggacttcctcggcggaatctccttctccgagcagcaccacaaggccaactgcaacatgatccccagcactagcagcacagcttgctacgcgagctcgggtgctaccgccggctaccatcaccagctgtaccaccagcccaccagctccgcgctccacttcgctgactccgtcatggtggcctcctcggccggcggcgtccacgacggaggtgccatgctcagcgcggccagcgctaatggtagcgctggcgctggcgctgccagtgccaatggcagcggcagcatcgggctgtccatgatcaagaactggctgcggagccaaccagctcccatgcagccgagggtggcggcggctgagagcgtgcaggggctctctttgtccatgaacatggcgggggcgacgcaaggcgccgctggcatgccacttcttgctggagagcgcggccgggcgcccgagagtgtctcgacgtcggcacagggtggagccgtcgtcacggctccaaaggaggatagcggtggcagcggtgttgccgccaccggcgccctagtagccgtgagcacggacacgggtggcagcggcgcgtcggctgacaacacggcaaggaagacggtggacacgttcgggcagcgcacgtcgatttaccgtggcgtgacaaggcatagatggactgggagatatgaagcacatctgtgggacaacagttgcagaagggaaggacaaactcgcaagggtcgtcaagtctatttaggtggctatgataaagaggagaaagctgctagggcttatgatctggctgctcttaagtactggggtcccacgacaacaacaaattttccagtgaataactacgaaaaggagctggaggatatgaagcacatgacaaggcaggagtttgtagcgtctctgagaaggaagagcagtggtttctccagaggtgcatccatttacaggggagtgactaggcatcaccagcatggaagatggcaagcacggattggacgagttgcagggaacaaggatctctacttgggcaccttcagcacgcaggaggaggcagcggaggcatacgacattgcggcgatcaagttccgcggcctcaacgccgtcacaaacttcgacatgagccgctacgacgtcaagagcatcctggacagcagtgcgctccccatcggcagcgccgccaagcgtctcaaggaggccgaggccgccgcgtccgcacagcaccatgccggcgtggtgagctacgacgtcggccgcatagcctcacagctcggcgacggcggcgccctggcggcggcgtacggcgcgcactaccatggcgcctggccgaccatcgcgttccagccgagcgcggccacgggcctgtaccacccgtacgcgcagccgatgcgcgggtggtgcaagcaggagcaggaccacgcggtgatcgcggccgcgcacagcctgcaggagctccaccacctgaacctgggtgctgccgccggcgcgcacgacttcttctcggcggggcagcaggcggcgatgcacggcctgggtagcatggacaatgcatcactcgagcacagcaccggctccaactccgtcgtgtacaacggtgttggtgatagcaacggcagcaccgtcgtcggcagtggtggctacatgatgcctatgagcgctgccacggcgacggctaccacggcaatggtgagccacgagcaggtgcatgcacgggcacagggtgatcaccacgacgaagccaagcaggctgctcagatggggtacgagagctacctggtgaacgcagagaactatggcggcgggaggatgtctgcggcctgggcgactgtctcagcgccaccggcggcaagcagcaacgataacatggcggacgtcggccatggcggcgcacagctcttcagtgtctggaacgatacttaa

SEQ ID NO: 229 - protein, 703 aa, Sorghum bicolor
MATVNNWLAFSLSPQELPPTQTDSTLISAATTDDVSGDVCFNIPQDWSMRGSELSALVAEPKLEDFLGGISFSEQHHKANCNMIPSTSSTACYASSGATAGYHHQLYHQPTSSALHFADSVMVASSAGGVHDGGAMLSAASANGSAGAGAASANGSGSIGLSMIKNWLRSQPAPMQPRVAAAESVQGLSLSMNMAGATQGAAGMPLLAGERGRAPESVSTSAQGGAVVTAPKEDSGGSGVAATGALVAVSTDTGGSGASADNTARKTVDTFGQRTSIYRGVTRHRWTGRYEAHLWDNSCRREGQTRKGRQVYLGGYDKEEKAARAYDLAALKYWGPTTTTNFPVNNYEKELEDMKHMTRQEFVASLRRKSSGFSRGASIYRGVTRHHQHGRWQARIGRVAGNKDLYLGTFSTQEEAAEAYDIAAIKFRGLNAVTNFDMSRYDVKSILDSSALPIGSAAKRLKEAEAAASAQHHAGVVSYDVGRIASQLGDGGALAAAYGAHYHGAWPTIAFQPSAATGLYHPYAQPMRGWCKQEQDHAVIAAAHSLQELHHLNLGAAAGAHDFFSAGQQAAMHGLGSMDNASLEHSTGSNSVVYNGVGDSNGSTVVGSGGYMMPMSAATATATTAMVSHEQVHARAQGDHHDEAKQAAQMGYESYLVNAENYGGGRMSAAWATVSAPPAASSNDNMADVGHGGAQLFSVWNDT

SEQ ID NO: 230 - DNA, 2112 bp, Setaria italica; identical to SEQ ID NO: 228
  source 1..2112: mol_type = unassigned DNA

SEQ ID NO: 231 - protein, 703 aa, Setaria italica; identical to SEQ ID NO: 229

SEQ ID NO: 232 - DNA, 2064 bp, Brachypodium distachyon
  source 1..2064: mol_type = unassigned DNA
atggctaccgtgaacaactggctgggcttctccctctccccgcaggagctcccgtcctccgccgctgccgccgccggcgacgtctccggcgccgacgtctgcttcaacatcccgcaagattggggcatgaggggatcggagctgtcggcgctggtggcggagccgaagctggaggacttcctcggcggcatctcttcctactctgaccatcacaaggcagccagaagcaacaacatgaacatcaatggcgccgccgcctgctacgcgagctccggcagcagcggctaccagctttaccacgaccaccccaactccctccagttcgccgactctgtcatggtcgcttcctccgctggcggcgtccacaatgaacatggcatcatggcaagcaccactgccaatggtgcaggcaccaatggcggcatcgggctgtccatgatcaagagctggctgcggagccagccggcgccggcgcagcaggagcagcagagggcggaggggctgtcgctgtccatgaacatgccgctcctgcaggcggcggcggcggagactagcttgtccacgtcggcagcgcagcagggatctcggaaggagaataatggcagcagtagtgctggttctggagccgtggtgtcagccggtactaccagcgccggcgcggtggtggtggagtcgccggcagcggggaggaagaccgccgacacgttcgggcagcggacttcgatctaccgcggcgtcaccaggcatagatggacagggaggtatgaggctcacctgtgggacaacagctgcagaagagaaggacaaactcgcaagggtcgtcaagtctatctcggtggttatgacaaagaggagaaagctgcaagagcttatgatttggctgctctcaagtattggggccccaccacgacgacaaattttccagtagataactacgagaaggagctggaggagatgaagcacatgacaaggcaggagtttgtggcgtctctccgaaggaagagcagtggtttttcaagaggtgcatccatttatcgtggagtaactaggcaccaccaacatgggagatggcaagcaaggatagggagagttgcagggaacaaggatctctacttgggcactttcagcacgcaggaggaggcggcggaggcgtacgacatcgcggcgatcaagttccgggggctgaacgccgtcactaacttcgacatgtcccgctacgacgtcaagagcatcctcgacagcaccgccgcgctgcctgtcggcggcaccaagcgcctcagggacgcggctgccgccgatcagcactaccagcagcgcgccgggggcgtcgtcagctacgccgcgccgcagctcggtggtgtcaacgagaccgcccttgcctatggcgcgccctactaccaccaccaaacctccgccgcagcgtggccgaccatcgcgttccaggcggcgccgcaagcgtcgtcggggcacgggcacatgctgtaccacccgtacgggcagccattgatgcgcgggtggtgcaagcaagagcaggagcaagggcaagggcagcaggagccggaccacgcggtgatcgcggccgcgcacagcctgcaggacctccaccacctcaacctcggcgccggtgcgcacgacttcttctcccagcatgcccacgccatgcaccagcagcagcagcagcacggcggcctcggcagcgtcgacaacaacggcgcggcgtcgctggagcacagcactggctccaactccgtcgtctacaacggggccgctgccgccggggacaccaacaacagctacatgctgccgcccatgagcgctgcagcagcagctggcttcggcctccgcgatcagcaggacgaaggcgggaagatggcgtacgagaacttcctcctcggcgccgccaccgacggctactgtggccctggaaggatggcggccacctggacaccggtgtcggtttcggcggcccagccagtggcggcaacgagcagcggcagcgacatggccggtgccgtctgccatggcggcgcgcagctcttcagcgtctggaacgacgacagttag

SEQ ID NO: 233 - protein, 687 aa, Brachypodium distachyon
MATVNNWLGFSLSPQELPSSAAAAAGDVSGADVCFNIPQDWGMRGSELSALVAEPKLEDFLGGISSYSDHHKAARSNNMNINGAAACYASSGSSGYQLYHDHPNSLQFADSVMVASSAGGVHNEHGIMASTTANGAGTNGGIGLSMIKSWLRSQPAPAQQEQQRAEGLSLSMNMPLLQAAAAETSLSTSAAQQGSRKENNGSSSAGSGAVVSAGTTSAGAVVVESPAAGRKTADTFGQRTSIYRGVTRHRWTGRYEAHLWDNSCRREGQTRKGRQVYLGGYDKEEKAARAYDLAALKYWGPTTTTNFPVDNYEKELEEMKHMTRQEFVASLRRKSSGFSRGASIYRGVTRHHQHGRWQARIGRVAGNKDLYLGTFSTQEEAAEAYDIAAIKFRGLNAVTNFDMSRYDVKSILDSTAALPVGGTKRLRDAAAADQHYQQRAGGVVSYAAPQLGGVNETALAYGAPYYHHQTSAAAWPTIAFQAAPQASSGHGHMLYHPYGQPLMRGWCKQEQEQGQGQQEPDHAVIAAAHSLQDLHHLNLGAGAHDFFSQHAHAMHQQQQQHGGLGSVDNNGAASLEHSTGSNSVVYNGAAAAGDTNNSYMLPPMSAAAAAGFGLRDQQDEGGKMAYENFLLGAATDGYCGPGRMAATWTPVSVSAAQPVAATSSGSDMAGAVCHGGAQLFSVWNDDS

SEQ ID NO: 234 - DNA, 3769 bp, Sorghum bicolor
  source 1..3769: mol_type = unassigned DNA
atggctactgtgaacaactggctcgctttctccctctccccgcaggagctgccgcccacccagacggactccaccctcatctctgccgccaccaccgacgatgtctccggcgatgtctgcttcaacatcccccaaggtatgcatctatcgatcgatatatgtacgtacagtgcgcatatatatatatatctgcagtttgtggtacgaatactgattgaagctagcatgaaatgtcgtttgttctttcagattggagcatgaggggatccgagctttcggcgctcgtcgccgagccgaagctggaggacttcctcggcggaatctccttctccgagcagcaccacaaggccaactgcaacatgatccccagcactagcagcacagcttgctacgcgagctcgggtgctaccgccggctaccatcaccagctgtaccaccagcccaccagctccgcgctccacttcgctgactccgtcatggtggcctcctcggccggcggcgtccacgacggaggtgccatgctcagcgcggccagcgctaatggtagcgctggcgctggcgctgccagtgccaatggcagcggcagcatcgggctgtccatgatcaagaactggctgcggagccaaccagctcccatgcagccgagggtggcggcggctgagagcgtgcaggggctctctttgtccatgaacatggcgggggcgacgcaaggcgccgctggcatgccacttcttgctggagagcgcggccgggcgcccgagagtgtctcgacgtcggcacagggtggagccgtcgtcacggctccaaaggaggatagcggtggcagcggtgttgccgccaccggcgccctagtagccgtgagcacggacacgggtggcagcggcgcgtcggctgacaacacggcaaggaagacggtggacacgttcgggcagcgcacgtcgatttaccgtggcgtgacaaggtaataagggtccggtattacaatgaatcgtcacttcgtcagagaactaaactagcacaaatcagcaatgaatcaagtaatatcatgaaatttagaaaagccgttagcaatgcaaggagctatcattatagatttgattgcatctagacagttctgaattaaatgagtagggcaatgtgtagcctttgatgatctcgctgattattaggagtgccatttgtattggctatgattgtggtatatacagcagtagacaattaacaaaaggctaccactttcgaattattttaggcatagatggactgggagatatgaagcacatctgtgggacaacagttgcagaagggaaggacaaactcgcaagggtcgtcaaggtaccaatataatgcaatacaccgtatttaaatatatatgcttttctgtaattaagtttatactttcacaaaactgacattacttcgcattatcatttttggattgtcgtcgtcatgattggcgggattgaaatgaactattgaatctacagtctatttaggtaagcgatttcacttggttattaatttgggaccaactacttaatccagtttgtttttcccctataaccattattttttcatctgtgttctcaactcttacttttccatcttgttccactgataggtggctatgataaagaggagaaagctgctagggcttatgatctggctgctcttaagtactggggtcccacgacaacaacaaattttccagtatgtatatgtagaatgcagttttacttcactgaagatcatacctttgctatgtctcaaatgccgttcattagttagtggatctgaagtgaaggttctgtaatttttgttaactatgtacattgctggaattgtacttaaagtcatttgtttttgtatatctaggtgaataactacgaaaaggagctggaggatatgaagcacatgacaaggcaggagtttgtagcgtctctgagaaggtcggtcgaacagcattgattaatcaatgccaactctattgaataaacatctactctgttaattgttaaagtttgagagaaagatctgcatgttagatcttaatagaccactgtatatgaatgcaggaagagcagtggtttctccagaggtgcatccatttacaggggagtgactaggtatgaattcatataatggcgtcaacaaacacacatacactttgattgaggaggcgaatgcacgcatggattgaatgtgaatggtgttttacttgaactatgtaattataggcatcaccagcatggaagatggcaagcacggattggacgagttgcagggaacaaggatctctacttgggcaccttcagtaagtatcagagatgttttctcattgtatatagaggagtacttctatatgtatatatacattcagttattcaccacacaaaagcaaattgcagtcaactaataacaatctcaacgcaatgagaagcaagtgttacagctgatagtacacatttgtagaccttctgcatatggatgttatatatgatgactattaaaaatgtgaccattgcatcaagtcatgcaaagttgcattgcagtagtacatacattacttagtgcatgctcctcaagtggctttttcaaacctgatcccatgtctggcgctattgttgtctcccattcacccgtgcatcaggtcaaaatagtactatgcctcaataagaaacacatgagcatgcactggcagcagcagactaatcaagttctatcatttactaataaactaattaggctacagcatccaaaagattctacccattaagccacaactgttcatgcatgcattcataaaccaggataccaccatgcatgcgtgcaccgtgttcgtgcttggaatattgagctgagccgagtgcacccttgcgtggatgcaggcacgcaggaggaggcagcggaggcatacgacattgcggcgatcaagttccgcggcctcaacgccgtcacaaacttcgacatgagccgctacgacgtcaagagcatcctggacagcagtgcgctccccatcggcagcgccgccaagcgtctcaaggaggccgaggccgccgcgtccgcacagcaccatgccggcgtggtgagctacgacgtcggccgcatagcctcacagctcggcgacggcggcgccctggcggcggcgtacggcgcgcactaccatggcgcctggccgaccatcgcgttccagccgagcgcggccacgggcctgtaccacccgtacgcgcagccgatgcgcgggtggtgcaagcaggagcaggaccacgcggtgatcgcggccgcgcacagcctgcaggagctccaccacctgaacctgggtgctgccgccggcgcgcacgacttcttctcggcggggcagcaggcggcgatgcacggcctgggtagcatggacaatgcatcactcgagcacagcaccggctccaactccgtcgtgtacaacggtgttggtgatagcaacggcagcaccgtcgtcggcagtggtggctacatgatgcctatgagcgctgccacggcgacggctaccacggcaatggtgagccacgagcaggtgcatgcacgggcacagggtgatcaccacgacgaagccaagcaggctgctcagatggggtacgagagctacctggtgaacgcagagaactatggcggcgggaggatgtctgcggcctgggcgactgtctcagcgccaccggcggcaagcagcaacgataacatggcggacgtcggccatggcggcgcacagctcttcagtgtctggaacgatacttaa

SEQ ID NO: 235 - DNA, 35833 bp, synthetic construct
  misc_feature 1..35833: note = PHP8418-0005
  source 1..35833: mol_type = other DNA
gtttacccgccaatatatcctgtcaaacactgcggccgcacttgaccgcggatggagccggagctgtggtgaggccatcgacgggaggtgggggagaacacagtctcagtgttctttgtgagtccgcaaggtttttagcttttctgtattaattaaggttgctgttggctgtagaatacggtcgtggaagagctgtatcggtagctactacgtaagctattatatactggaagtctggagctcgtcgatctccggtcgtcttcctccatttctcctcgtcttgctttgactgctgctaccatttgcttctgttttctgatgaagcatgccatgtcggccaccagtgtttgtgtggtttttgcagggaatggctttcaagtgctgtgattgaatggccctcgtcgtcctcggctgagctcacatggacgcgtcatgtgagtgagatatatgatcatatgatgagtggggttcgggtgagtgcgtacttgaagtaggatcccgctttcactcattcattcattggcctttaaaccgggaaattttcgcgaggagatggagggaagcaagcagggtgacgagtgcagagtgccgcgagcgctttgtcaaaaggcaccgccgtaggcaaaaaaatcaatggccctgactgactcgatggtagtactactgtagagactagagagggttgctccccatatcttcgtgtgacttttactccagcattgcatttccgtcattgagacgttaattaatagcagctttcgggacagatgactgtggccatgtttcgtcacggccgcttcgtgccagctgggggtactatagtactgtgattttgttagtaaaaactttcattaggccaccattgacgaccgggccttcgcttttgctgcgctaattaaccatttcccggcgaccgaagggaacatgaacatgccccgacacatgagggcatgaggactagtgttctccctgtcgttcgttgacttgactagtgatagtttaaacgctcttcaactggaagagcggttactaccggttcactagctagctgctaatcgagctagttaccctatgaggtgacatgaagcgctcacggttactatgacggttagcttcacgactgttggtggcagtagcgtacgacttagctatagttccggacttacctagctaataacttcgtatagcatacattatacgaagttatggttaccgagctgttaccaagcggccgcacactgatagtttaaactgaaggcgggaaacgacaatctgatcatgagcggagaattaagggagtcacgttatgacccccgccgatgacgcgggacaagccgttttacgtttggaactgacagaaccgcaacgattgaaggagccactcagccgcgggtttctggagtttaatgagctaagcacatacgtcagaaaccattattgcgcgttcaaaagtcgcctaaggtcactatcagctagcaaatatttcttgtcaaaaatgctccactgacgttccataaattcccctcggtatccaattagagtctcatattcactcccatggcggccaatgcgggcggcggtggagcgggaggaggcagcggcagcggcagcgtggctgcgccggcggtgtgccgccccagcggctcgcggtggacgccgacgccggagcagatcaggatgctgaaggagctctactacggctgcggcatccggtcgcccagctcggagcagatccagcgcatcaccgccatgctgcggcagcacggcaagatcgagggcaagaacgtcttctactggttccagaaccacaaggcccgcgagcgccagaagcgccgcctcaccagcctcgacgtcaacgtgcccgccgccggcgcggccgacgccaccaccagccaactcggcgtcctctcgctgtcgtcgccgccgccttcaggcgcggcgcctccctcgcccaccctcggcttctacgccgccggcaatggcggcggatcggctgtgctgctggacacgagttccgactggggcagcagcggcgctgctatggccaccgagacatgcttcctgcaggactacatgggcgtgacggacacgggcagctcgtcgcagtggccacgcttctcgtcgtcggacacgataatggcggcggccgcggcgcgggcggcgacgacgcgggcgcccgagacgctccctctcttcccgacctgcggcgacgacggcggcagcggtagcagcagctacttgccgttctggggtgccgcgtccacaactgccggcgccacttcttccgttgcgatccaacagcaacaccagctgcaggagcagtacagcttttacagcaacagcaacagcacccagctggccggcaccggcaaccaagacgtatcggcaacagcagcagcagccgccgccctggagctgagcctcagctcatggtgctccccttaccctgctgcagggagtatgtgagagcaacgcgagctgccactgctcttcactgatgtctctggaatggaaggaggaggaagtgagaacagatcattcgacaaagcagcattagtccgttgatcggtggaagaccactcgtcagtgttgagttgaatgtttgatcaataaaatacggcaatgctgtaagggttgttttttatgccattgataatacactgtactgttcagttgttgaactctatttcttagccatgccaagtgcttttcttattttgaataacattacagcaaaaagttgaaagacaaaaaaaaaaacccccgaacagagtgctttgggtcccaagcttctttagactgtgttcggcgttccccctaaatttctccccctatatctcactcacttgtcacatcagcgttctctttccccctatatctccacgctctacagcagttccacctatatcaaacctctataccccaccacaacaatattatatactttcatcttcaactaactcatgtaccttccaatttttttctactaataattatttacgtgcacagaaacttagcaaggagagagagagcgggaatttaaatgctcggcgttaggcttttagtccgctaggtggctagaccgaggttaggacgctagttcactaggggcctagtggtgttttaagacgtcacggtcactacgaatcgaccgaagcttgcatgggccgcatcgagcagctggcttgtggggaccagacaaaaaaggaatggtgcagaattgttaggcgcacctaccaaaagcatctttgcctttattgcaaagataaagcagattcctctagtacaagtggggaacaaaataacgtggaaaagagctgtcctgacagcccactcactaatgcgtatgacgaacgcagtgacgaccacaaaactcgagcaacgagatcatgagccaatcaaagaggagtgatgtagacctaaagcaataatggagccatgacgtaagggcttacgcccatacgaaataattaaaggctgatgtgacctgtcggtctctcagaacctttactttttatgtttggcgtgtatttttaaatttccacggcaatgacgatgtgaccgtcgacccactaaaacattgctttgtcaaaagctaaaaaagatgatgcccgacagccacttgtgtgaagcatgagaagccggtccctccactaagaaaattagtgaagcatcttccagtggtccctccactcacagctcaatcagtgagcaacaggacgaaggaaatgacgtaagccatgacgtctaatcccagggccagcttgcatgcctgcagtgcagcgtgacccggtcgtgcccctctctagagataatgagcattgcatgtctaagttataaaaaattaccacatattttttttgtcacacttgtttgaagtgcagtttatctatctttatacatatatttaaactttactctacgaataatataatctatagtactacaataatatcagtgttttagagaatcatataaatgaacagttagacatggtctaaaggacaattgagtattttgacaacaggactctacagttttatctttttagtgtgcatgtgttctcctttttttttgcaaatagcttcacctatataatacttcatccattttattagtacatccatttagggtttagggttaatggtttttatagactaatttttttagtacatctattttattctattttagcctctaaattaagaaaactaaaactctattttagtttttttatttaataatttagatataaaatagaataaaataaagtgactaaaaattaaacaaataccctttaagaaattaaaaaaactaaggaaacatttttcttgtttcgagtagataatgccagcctgttaaacgccgtcgacgagtctaacggacaccaaccagcgaaccagcagcgtcgcgtcgggccaagcgaagcagacggcacggcatctctgtcgctgcctctggacccctctcgagagttccgctccaccgttggacttgctccgctgtcggcatccagaaattgcgtggcggagcggcagacgtgagccggcacggcaggcggcctcctcctcctctcacggcaccggcagctacgggggattcctttcccaccgctccttcgctttcccttcctcgcccgccgtaataaatagacaccccctccacaccctctttccccaacctcgtgttgttcggagcgcacacacacacaaccagatctcccccaaatccacccgtcggcacctccgcttcaaggtacgccgctcgtcctcccccccccccctctctaccttctctagatcggcgttccggtccatgcatggttagggcccggtagttctacttctgttcatgtttgtgttagatccgtgtttgtgttagatccgtgctgctagcgttcgtacacggatgcgacctgtacgtcagacacgttctgattgctaacttgccagtgtttctctttggggaatcctgggatggctctagccgttccgcagacgggatcgatttcatgattttttttgtttcgttgcatagggtttggtttgcccttttcctttatttcaatatatgccgtgcacttgtttgtcgggtcatcttttcatgcttttttttgtcttggttgtgatgatgtggtctggttgggcggtcgttctagatcggagtagaattctgtttcaaactacctggtggatttattaattttggatctgtatgtgtgtgccatacatattcatagttacgaattgaagatgatggatggaaatatcgatctaggataggtatacatgttgatgcgggttttactgatgcatatacagagatgctttttgttcgcttggttgtgatgatgtggtgtggttgggcggtcgttcattcgttctagatcggagtagaatactgtttcaaactacctggtgtatttattaattttggaactgtatgtgtgtgtcatacatcttcatagttacgagtttaagatggatggaaatatcgatctaggataggtatacatgttgatgtgggttttactgatgcatatacatgatggcatatgcagcatctattcatatgctctaaccttgagtacctatctattataataaacaagtatgttttataattattttgatcttgatatacttggatgatggcatatgcagcagctatatgtggatttttttagccctgccttcatacgctatttatttgcttggtactgtttcttttgtcgatgctcaccctgttgtttggtgttacttctgcaggtcgactttaacttagcctaggatccatggccactgtgaacaactggctcgctttctccctctccccgcaggagctgccgccctcccagacgacggactccacactcatctcggccgccaccgccgaccatgtctccggcgatgtctgcttcaacatcccccaagattggagcatgaggggatcagagctttcggcgctcgtcgcggagccgaagctggaggacttcctcggcggcatctccttctccgagcagcatcacaaggccaactgcaacatgatacccagcactagcagcacagtttgctacgcgagctcaggtgctagcaccggctaccatcaccagctgtaccaccagcccaccagctcagcgctccacttcgcggactccgtaatggtggcttcctcggccggtgtccacgacggcggtgccatgctcagcgcggccgccgctaacggtgtcgctggcgctgccagtgccaacggcggcggcatcgggctgtccatgattaagaactggctgcggagccaaccggcgcccatgcagccgagggtggcggcggctgagggcgcgcaggggctctctttgtccatgaacatggcggggacgacccaaggcgctgctggcatgccacttctcgctggagagcgcgcacgggcgcccgagagtgtatcgacgtcagcacagggtggagccgtcgtcgtcacggcgccgaaggaggatagcggtggcagcggtgttgccggcgctctagtagccgtgagcacggacacgggtggcagcggcggcgcgtcggctgacaacacggcaaggaagacggtggacacgttcgggcagcgcacgtcgatttaccgtggcgtgacaaggcatagatggactgggagatatgaggcacatctttgggataacagttgcagaagggaagggcaaactcgtaagggtcgtcaagtctatttaggtggctatgataaagaggagaaagctgctagggcttatgatcttgctgctctgaagtactggggtgccacaacaacaacaaattttccagtgagtaactacgaaaaggagctcgaggacatgaagcacatgacaaggcaggagtttgtagcgtctctgagaaggaagagcagtggtttctccagaggtgcatccatttacaggggagtgactaggcatcaccaacatggaagatggcaagcacggattggacgagttgcagggaacaaggatctttacttgggcaccttcagcacccaggaggaggcagcggaggcgtacgacatcgcggcgatcaagttccgcggcctcaacgccgtcaccaacttcgacatgagccgctacgacgtgaagagcatcctggacagcagcgccctccccatcggcagcgccgccaagcgcctcaaggaggccgaggccgcagcgtccgcgcagcaccaccacgccggcgtggtgagctacgacgtcggccgcatcgcctcgcagctcggcgacggcggagccctggcggcggcgtacggcgcgcactaccacggcgccgcctggccgaccatcgcgttccagccgggcgccgccagcacaggcctgtaccacccgtacgcgcagcagccaatgcgcggcggcgggtggtgcaagcaggagcaggaccacgcggtgatcgcggccgcgcacagcctgcaggacctccaccacctgaacctgggcgcggccggcgcgcacgactttttctcggcagggcagcaggccgccgccgctgcgatgcacggcctgggtagcatcgacagtgcgtcgctcgagcacagcaccggctccaactccgtcgtctacaacggcggggtcggcgacagcaacggcgccagcgccgtcggcggcagtggcggtggctacatgatgccgatgagcgctgccggagcaaccactacatcggcaatggtgagccacgagcaggtgcatgcacgggcctacgacgaagccaagcaggctgctcagatggggtacgagagctacctggtgaacgcggagaacaatggtggcggaaggatgtctgcatgggggactgtcgtgtctgcagccgcggcggcagcagcaagcagcaacgacaacatggccgccgacgtcgggcatggcggcgcgcagctcttcagtgtctggaacgacacttaagcgtacctagtggtacctgacatcttatagtctgcaacctctcgtgtctgaattcctatctttatcaagtgttattgcttccacgactataggacagctttcgtcgaaagcttttgctcatgtgatctcgaaggattcatctagtctgatttttcgtgacttgtatcggttttattggattcatccaacatatatcaataaaaaatgagttgtgtttcctttcttcctagttcagttaaaattatttccctcctgcgcttgtgctgtaattgtctgtgtacctgttgtttgtgactgtgttagttcccttggatatgatttcgtatttgatatgtacatggagatagcttagcttcattattggagtatgaagttagtatgacatagtcactctcctggaaaattgacactgcaaaccatatttttattctgaaccacaaatcctagtcagtccgctggcatatgccgtccgtttgctgaatccagaacgtgggtttggagatgtacggctgagatgcctctatgcgaaggggatttcgtggtgaaacgagatgggagtagagcaacgcccgtggaagatgcttcaaacttccacacttttgagcaacgatcggcagtagtaaggtagacgatttcaagatcaaagcatatgaagataaacaacatcaacaacaaaatttgttggggttctatagagagaaacagagctacatacatacactgttttgtatctaccatctgagatgatgaaaagatgaaaaactaaagaatgccccggcgccaacgccaggacacgccgcgcgcgcgtcacccgagccatctcttgacccagccggcgctgtatatttacacacgttgcagcatcgatcaccacctgttcgatcgcgtcgccgtcaccggcgcgccgcgacttattgaactagtctagggcgcggctaacaacctagcttagattgccttgtctaaacccttaggctaacgcgccacccgcggttcaaagccaatgactgttgttaggtccagtttctaaggacgaatcatccaatcactggttctttctgaacaaaacaaagagctatagagttacgttactgtagccgagacagagcctgcaatctggttatgccacatactaggttctttcttaaagttgactcactctatcctaagttctacttacaaggagctacaacaaattggtcataaccggagagcgttcaaggaggtaatatcccatcttactctgtagcaaggctacaaaaggagagctaaagaactaggctacaaaaagagagctaaagaactaactatctagcaagactacagagctatagtgtagagatttcataaccggtgagcgttcaaggatactttgaagagaagaggtaatatctcaactagcaagactacaaaaaaatggagatataaaactaactgtctaacaagactacagagctatagtagagatagatacgttcgacacttaagcatgagaattcgagctcggtaccctggttcacaaactcaatacaacacacagtggagtagggtattacgctccggcggcccgaaccactctaaatccttgtgtcctcgtgtgctcttccaccattaatgactgtaattgcagggacacgaagagttgtagcgcttttgccaacaagatccgctatatgctagtagagtggaacctgcacagcaacaagcatccaataatctgagaataagaattatgtgtggtgatggttctcatctctgcaactcgccattttcgcgagagaaccaaatccaagttggtgaagatcatgatttgggctcatgggctggcatagtagctattacctttgcaattgtggttcgaatctatccgatattctccttttcagggagagctaatgcttatgcttattgggtattttggtttgacactgcttcacgcccaaaaaaaggcaactatgtctgagttggatatggcccaaaaaaaggcagctatgtctgagttggatatggaagtcttctttcgtttagggtgaagtaagaccaagctcatgagcttattatcttaggtcggaacaaattagttgataggcatggcacatttatcaaattataatgattttaacagaaaagcaacacctctttttcagcagcaccagctttgcaagctgcaattgacactccaagcatagtatttgctccaaactcagcctgcatttcgcacaatatcatatctatttccatttggataaaatatattttccagaaatatgggaacagaatcaagatacagaaaaaagttgtggtagtagtggtaagtggaaacacaagtacagtgaaaagatagcattatttctgaacagtcaaattaaccgaaataagtagtatcacatactgcccctaaattgactacacccaatgtaaagaattgcttgagcatattgagccatcagttgtttgtttgtgtaacggatttgacaatgcagagttcaggagcaaaaaaccgcaaaggagagaaagagggaaaggatctcctagtatcccaccttgtggcgcgccctgtcaagtgcatgatggcctggtcgatctgcgtctgctgctgcggttccatcccaacgagtgcctccgacaccttgtcgttgatcacccgcaccgcgtaggcgacccccctggcgaggaacttccgcctctcggaggccccggccgcgtcggcggcggcgccctcgagcgcgcccacgctagccgtagatgctcggtgcacggccttgttggtgtgcaactcgacctcaacggccggtgcgctacgcccgtcaaggatctggcgcgcccgcaccctcgtgatcacggtgggcgcctcccgcctcatgtggccgacgatgaaaagcgccgggttaggggccttggcgcgcaccgccgtattcagggcctcctcgctcttgcgcgagagcaggtgcttccccaggtactcctgcactgacaaggctgccacagcggtggaatttgtcctcacgacttcgccacgtcgtcctcacctccctggcttcccacgactccgccgtatcgaggtgctcggtgggtcgtcttaatccgaagtccgaactaggaagacgagacagagaggtctgaggaatgggcctcgtttgatgttgagctgaattatttttccagcataagcccaggtcttggtccatgaacaaaattactagaaacccagcccagtactacgatctaaaagagggactgccactggatagctctctctagcattctccacgctccaatacagcggcgtcgtgtctatccgggtctatccgcgaacacgtgagaactctccagaaactgctttctcctccacttcatctctctcgctttccctctataaaaagaccccttctaggaattgagggagacagcaagcaccaagcagcgatccgaagctcaatcaattcactcaaacctcttccccaaatcttcgattagatcttcgttgacaagaagactagaaccgaacctgacatgtccaacctgctcacggttcaccagaaccttccggctcttccagtggacgcgacgtccgatgaagtcaggaagaacctcatggacatgttccgcgacaggcaagcgttcagcgagcacacctggaagatgctgctctccgtctgccgctcctgggctgcatggtgcaagctgaacaacaggaagtggttccccgctgagcccgaggacgtgagggattaccttctgtacctgcaagcgcgaggtttgtttctgcttctacctttgatatatatataataattatcattaattagtagtaatataatatttcaaatatttttttcaaaataaaagaatgtagtatatagcaattgcttttctgtagtttataagtgtgtatattttaatttataacttttctaatatatgaccaaaacatggtgatgcctaggtctggcagtgaagaccatccagcaacaccttggacaactgaacatgcttcacaggcgctccggcctcccgcgccccagcgactcgaacgccgtgagcctcgtcatgcgccgcatcaggaaggaaaacgtcgatgccggcgaaagggcaaagcaggccctcgcgttcgagaggaccgatttcgaccaggtccgcagcctgatggagaacagcgacaggtgccaggacattaggaacctggcgttcctcggaattgcatacaacacgctcctcaggatcgcggaaattgcccgcattcgcgtgaaggacattagccgcaccgacggcggcaggatgcttatccacattggcaggaccaagacgctcgtttccaccgcaggcgtcgaaaaggccctcagcctcggagtgaccaagctcgtcgaacgctggatctccgtgtccggcgtcgcggacgacccaaacaactacctcttctgccgcgtccgcaagaacggggtggctgcccctagcgccaccagccaactcagcacgagggccttggaaggtattttcgaggccacccaccgcctgatctacggcgcgaaggatgacagcggtcaacgctacctcgcatggtccgggcactccgcccgcgttggagctgctagggacatggcccgcgccggtgtttccatccccgaaatcatgcaggcgggtggatggacgaacgtgaacattgtcatgaactacattcgcaaccttgacagcgagacgggcgcaatggttcgcctcctggaagatggtgactgaggtacccaacctagacttgtccatcttctggattggccaacttaattaatgtatgaaataaaaggatgcacacatagtgacatgctaatcactataatgtgggcatcaaagttgtgtgttatgtgtaattactagttatctgaataaaagagaaagagatcatccatatttcttatcctaaatgaatgtcacgtgtctttataattctttgatgaaccagatgcatttcattaaccaaatccatatacatataaatattaatcatatataattaatatcaattgggttagcaaaacaaatctagtctaggtgtgttttgcgatccgatatcgaattggccacggtaccagctgctgctgttctagggttcacaagtctgcctatttgtcttccccaatggagctatggttgtctggtctggtccttggtcgtgtcccgtttcattgtgtactatttacctgtaatgtgtatccttaagtctggtttgatggtgtctgaaacgttttgctgtggtagagcagcatggaagaactataatgaataagtgatccctaatcattgtgtccaaattttgcttctgctatacccttttgtgctgtttcttatgttttgcttaaaaatttgatctgacaaacaaatttgtctaaattatgctcttgttctgactgtgtactgtacacatttgtattgctaccggtttggcacatagttttctctttgattgcagatcaaacccttctgattgcagattgcttggctatggctgatgtgctcactgttcttctttagcttgtatattgctgatggtggcttggctacggctgaaaaagttgctgctgcgccgacttggcaactgttgctccagtaatgctttgtcctctcttcctagccgccgacttggcacttggcagctgttgctcctgtaatgcgttgttatctcttatctcttgagatgtactatgattttgaggctgtttgacttgtgccagattgccagtgctgatgctatattatctcaggtttttatgctagtatatgttttactgtgtgctgcctgtgtcgagttacgtaatctattgaaccgctatgcgtgttgatgccctgttgttgcttgccagattgatgcccctgttgcttgcagcttgcaagctgtagtgaaatcctaaaattccaaaccaaatctattctgaacttttgaagatctgtgatgtccggaagaaaagattcaaacagataaacgggactctccagaatctataaaataaatgatcgacaaacgctttgctttggtaggcttcataacttcgtatagcatacattatacgaagttataagcttttaattaagtcatctagttgaaggatcgctatcaactttgtatagaaaagttgggccgaattcgagctcggtacggccagaatggcccggaccgacctgcagtgcagcgtgacccggtcgtgcccctctctagagataatgagcattgcatgtctaagttataaaaaattaccacatattttttttgtcacacttgtttgaagtgcagtttatctatctttatacatatatttaaactttactctacgaataatataatctatagtactacaataatatcagtgttttagagaatcatataaatgaacagttagacatggtctaaaggacaattgagtattttgacaacaggactctacagttttatctttttagtgtgcatgtgttctcctttttttttgcaaatagcttcacctatataatacttcatccattttattagtacatccatttagggtttagggttaatggtttttatagactaatttttttagtacatctattttattctattttagcctctaaattaagaaaactaaaactctattttagtttttttatttaataatttagatataaaatagaataaaataaagtgactaaaaattaaacaaataccctttaagaaattaaaaaaactaaggaaacatttttcttgtttcgagtagataatgccagcctgttaaacgccgtcgacgagtctaacggacaccaaccagcgaaccagcagcgtcgcgtcgggccaagcgaagcagacggcacggcatctctgtcgctgcctctggacccctctcgagagttccgctccaccgttggacttgctccgctgtcggcatccagaaattgcgtggcggagcggcagacgtgagccggcacggcaggcggcctcctcctcctctcacggcaccggcagctacgggggattcctttcccaccgctccttcgctttcccttcctcgcccgccgtaataaatagacaccccctccacaccctctttccccaacctcgtgttgttcggagcgcacacacacacaaccagatctcccccaaatccacccgtcggcacctccgcttcaaggtacgccgctcgtcctcccccccccccctctctaccttctctagatcggcgttccggtccatgcatggttagggcccggtagttctacttctgttcatgtttgtgttagatccgtgtttgtgttagatccgtgctgctagcgttcgtacacggatgcgacctgtacgtcagacacgttctgattgctaacttgccagtgtttctctttggggaatcctgggatggctctagccgttccgcagacgggatcgatttcatgattttttttgtttcgttgcatagggtttggtttgcccttttcctttatttcaatatatgccgtgcacttgtttgtcgggtcatcttttcatgcttttttttgtcttggttgtgatgatgtggtctggttgggcggtcgttctagatcggagtagaattctgtttcaaactacctggtggatttattaattttggatctgtatgtgtgtgccatacatattcatagttacgaattgaagatgatggatggaaatatcgatctaggataggtatacatgttgatgcgggttttactgatgcatatacagagatgctttttgttcgcttggttgtgatgatgtggtgtggttgggcggtcgttcattcgttctagatcggagtagaatactgtttcaaactacctggtgtatttattaattttggaactgtatgtgtgtgtcatacatcttcatagttacgagtttaagatggatggaaatatcgatctaggataggtatacatgttgatgtgggttttactgatgcatatacatgatggcatatgcagcatctattcatatgctctaaccttgagtacctatctattataataaacaagtatgttttataattattttgatcttgatatacttggatgatggcatatgcagcagctatatgtggatttttttagccctgccttcatacgctatttatttgcttggtactgtttcttttgtcgatgctcaccctgttgtttggtgttacttctgcaggtcgactctagaggatccaccggtcgccaccatggcaccgaagaagaagcgcaaggtgatggacaagaagtacagcatcggcctcgacatcggcaccaactcggtgggctgggccgtcatcacggacgaatataaggtcccgtcgaagaagttcaaggtcctcggcaatacagaccgccacagcatcaagaaaaacttgatcggcgccctcctgttcgatagcggcgagaccgcggaggcgaccaggctcaagaggaccgccaggagacggtacactaggcgcaagaacaggatctgctacctgcaggagatcttcagcaacgagatggcgaaggtggacgactccttcttccaccgcctggaggaatcattcctggtggaggaggacaagaagcatgagcggcacccaatcttcggcaacatcgtcgacgaggtaagtttctgcttctacctttgatatatatataataattatcattaattagtagtaatataatatttcaaatatttttttcaaaataaaagaatgtagtatatagcaattgcttttctgtagtttataagtgtgtatattttaatttataacttttctaatatatgaccaaaacatggtgatgtgcaggtggcctaccacgagaagtacccgacaatctaccacctccggaagaaactggtggacagcacagacaaggcggacctccggctcatctaccttgccctcgcgcatatgatcaagttccgcggccacttcctcatcgagggcgacctgaacccggacaactccgacgtggacaagctgttcatccagctcgtgcagacgtacaatcaactgttcgaggagaaccccataaacgctagcggcgtggacgccaaggccatcctctcggccaggctctcgaaatcaagaaggctggagaaccttatcgcgcagttgccaggcgaaaagaagaacggcctcttcggcaaccttattgcgctcagcctcggcctgacgccgaacttcaaatcaaacttcgacctcgcggaggacgccaagctccagctctcaaaggacacctacgacgacgacctcgacaacctcctggcccagataggagaccagtacgcggacctcttcctcgccgccaagaacctctccgacgctatcctgctcagcgacatccttcgggtcaacaccgaaattaccaaggcaccgctgtccgccagcatgattaaacgctacgacgagcaccatcaggacctcacgctgctcaaggcactcgtccgccagcagctccccgagaagtacaaggagatcttcttcgaccaatcaaaaaacggctacgcgggatatatcgacggcggtgccagccaggaagagttctacaagttcatcaaaccaatcctggagaagatggacggcaccgaggagttgctggtcaagctcaacagggaggacctcctcaggaagcagaggaccttcgacaacggctccatcccgcatcagatccacctgggcgaactgcatgccatcctgcggcgccaggaggacttctacccgttcctgaaggataaccgggagaagatcgagaagatcttgacgttccgcatcccatactacgtgggcccgctggctcgcggcaactcccggttcgcctggatgacccggaagtcggaggagaccatcacaccctggaactttgaggaggtggtcgataagggcgctagcgctcagagcttcatcgagcgcatgaccaacttcgataaaaacctgcccaatgaaaaagtcctccccaagcactcgctgctctacgagtacttcaccgtgtacaacgagctcaccaaggtcaaatacgtcaccgagggcatgcggaagccggcgttcctgagcggcgagcagaagaaggcgatagtggacctcctcttcaagaccaacaggaaggtgaccgtgaagcaattaaaagaggactacttcaagaaaatagagtgcttcgactccgtggagatctcgggcgtggaggatcggttcaacgcctcactcggcacgtatcacgacctcctcaagatcattaaagacaaggacttcctcgacaacgaggagaacgaggacatcctcgaggacatcgtcctcaccctgaccctgttcgaggaccgcgaaatgatcgaggagaggctgaagacctacgcgcacctgttcgacgacaaggtcatgaaacagctcaagaggcgccgctacactggttggggaaggctgtcccgcaagctcattaatggcatcagggacaagcagagcggcaagaccatcctggacttcctcaagtccgacgggttcgccaaccgcaacttcatgcagctcattcacgacgactcgctcacgttcaaggaagacatccagaaggcacaggtgagcgggcagggtgactccctccacgaacacatcgccaacctggccggctcgccggccattaaaaagggcatcctgcagacggtcaaggtcgtcgacgagctcgtgaaggtgatgggccggcacaagcccgaaaatatcgtcatagagatggccagggagaaccagaccacccaaaaagggcagaagaactcgcgcgagcggatgaaacggatcgaggagggcattaaagagctcgggtcccagatcctgaaggagcaccccgtggaaaatacccagctccagaatgaaaagctctacctctactacctgcagaacggccgcgacatgtacgtggaccaggagctggacattaatcggctatcggactacgacgtcgaccacatcgtgccgcagtcgttcctcaaggacgatagcatcgacaacaaggtgctcacccggtcggataaaaatcggggcaagagcgacaacgtgcccagcgaggaggtcgtgaagaagatgaaaaactactggcgccagctcctcaacgcgaaactgatcacccagcgcaagttcgacaacctgacgaaggcggaacgcggtggcttgagcgaactcgataaggcgggcttcataaaaaggcagctggtcgagacgcgccagatcacgaagcatgtcgcccagatcctggacagccgcatgaatactaagtacgatgaaaacgacaagctgatccgggaggtgaaggtgatcacgctgaagtccaagctcgtgtcggacttccgcaaggacttccagttctacaaggtccgcgagatcaacaactaccaccacgcccacgacgcctacctgaatgcggtggtcgggaccgccctgatcaagaagtacccgaagctggagtcggagttcgtgtacggcgactacaaggtctacgacgtgcgcaaaatgatcgccaagtccgagcaggagatcggcaaggccacggcaaaatacttcttctactcgaacatcatgaacttcttcaagaccgagatcaccctcgcgaacggcgagatccgcaagcgcccgctcatcgaaaccaacggcgagacgggcgagatcgtctgggataagggccgggatttcgcgacggtccgcaaggtgctctccatgccgcaagtcaatatcgtgaaaaagacggaggtccagacgggcgggttcagcaaggagtccatcctcccgaagcgcaactccgacaagctcatcgcgaggaagaaggattgggacccgaaaaaatatggcggcttcgacagcccgaccgtcgcatacagcgtcctcgtcgtggcgaaggtggagaagggcaagtcaaagaagctcaagtccgtgaaggagctgctcgggatcacgattatggagcggtcctccttcgagaagaacccgatcgacttcctagaggccaagggatataaggaggtcaagaaggacctgattattaaactgccgaagtactcgctcttcgagctggaaaacggccgcaagaggatgctcgcctccgcaggcgagttgcagaagggcaacgagctcgccctcccgagcaaatacgtcaatttcctgtacctcgctagccactatgaaaagctcaagggcagcccggaggacaacgagcagaagcagctcttcgtggagcagcacaagcattacctggacgagatcatcgagcagatcagcgagttctcgaagcgggtgatcctcgccgacgcgaacctggacaaggtgctgtcggcatataacaagcaccgcgacaaaccaatacgcgagcaggccgaaaatatcatccacctcttcaccctcaccaacctcggcgctccggcagccttcaagtacttcgacaccacgattgaccggaagcggtacacgagcacgaaggaggtgctcgatgcgacgctgatccaccagagcatcacagggctctatgaaacacgcatcgacctgagccagctgggcggagacaagagaccacgggaccgccacgatggcgagctgggaggccgcaagcgggcaaggtaggtaccgtcatgggtcgtttaagctgccgatgtgcctgcgtcgtctggtgccctctctccatatggaggttgtcaaagtatctgctgttcgtgtcatgagtcgtgtcagtgttggtttaataatggaccggttgtgttgtgtgtgcgtactacccagaactatgacaaatcatgaataagtttgatgtttgaaattaaagcctgtgctcattatgttctgtctttcagttgtctcctaatatttgcctgcaggtactggctatctaccgtttcttacttaggaggtgtttgaatgcactaaaactaatagttagtggctaaaattagttaaaacatccaaacaccatagctaatagttgaactattagctatttttggaaaattagttaatagtgaggtagttatttgttagctagctaattcaactaacaatttttagccaactaacaattagtttcagtgcattcaaacacccccttaatgttaacgtggttctatctaccgtctcctaatatatggttgattgttcggtttgttgctatgctattgggttctgattgctgctagttcttgctgaatccagaagttctcgtagtatagctcagattcatattatttatttgagtgataagtgatccaggttattactatgttagctaggttttttttacaaggataaattatctgtgatcataattcttatgaaagctttatgtttcctggaggcagtggcatgcaatgcatgacagcaacttgatcacaccagctgaggtagatacggtaacaaggttcttaaatctgttcaccaaatcattggagaacacacatacacattcttgccagtcttggttagagaaatttcatgacaaaatgccaaagctgtcttgactcttcacttttggccatgagtcgtgacttaacggcaaacgctaattagtcactaggcccaggaaacactaactaagccctagcttatcctagcgcaacctagttaggtcttccccaagtttgtacaaaaaagcaggctggatcggccagaatggccccggaccggagctttgagagtacaatgatgaacctagattaatcaatgccaaagtctgaaaaatgcaccctcagtctatgatccagaaaatcaagattgcttgaggccctgttcggttgttccggattagagccccggattaattcctagccggattacttctctaatttatatagattttgatgagctggaatgaatcctggcttattccggtacaaccgaacaggccctgaaggataccagtaatcgctgagctaaattggcatgctgtcagagtgtcagtattgcagcaaggtagtgagataaccggcatcatggtgccagtttgatggcaccattagggttagagatggtggccatgggcgcatgtcctggccaactttgtatgatatatggcagggtgaataggaaagtaaaattgtattgtaaaaagggatttcttctgtttgttagcgcatgtacaaggaatgcaagttttgagcgagggggcatcaaagatctggctgtgtttccagctgtttttgttagccccatcgaatccttgacataatgatcccgcttaaataagcaacctcgcttgtatagttccttgtgctctaacacacgatgatgataagtcgtaaaatagtggtgtccaaagaatttccaggcccagttgtaaaagctaaaatgctattcgaatttctactagcagtaagtcgtgtttagaaattatttttttatataccttttttccttctatgtacagtaggacacagtgtcagcgccgcgttgacggagaatatttgcaaaaaagtaaaagagaaagtcatagcggcgtatgtgccaaaaacttcgtcacagagagggccataagaaacatggcccacggcccaatacgaagcaccgcgacgaagcccaaacagcagtccgtaggtggagcaaagcgctgggtaatacgcaaacgttttgtcccaccttgactaatcacaagagtggagcgtaccttataaaccgagccgcaagcaccgaattgcataatgaggatcgaggatggttttagagctagaaatagcaagttaaaataaggctagtccgttatcaacttgaaaaagtggcaccgagtcggtgctttttttttgcggccgcgtctaaaaacggcccctaactaacgcttagttgcccgctagattagtcccccgttagtgcctagttagacacacgacgaactaggggctagaattcctgcaaattgggttagcaaaacaaatctagtctaggtgtgttttgcgatccgatcgatggggatttatccccgtggggaacggggatggggaagaaatgtctctcgcaagagttcgtgggaatccccgcgggaaatttttttgtcgcggggacggatacggggagccaaagggtgccatccctaacaccgacaccgggcctgacgctgtcgccgcagctgctcatcttgtggttgtgggctgtgcccggtttccctgttgcggattgcgggtggcagcctggcaggtgggtgcgacccgtttggattcccttgtctgggccccttgtgtcagtaccgtctgtactccgatgacatgcaccgtcgtccacagtcaagtccaaaatctcccctctttttttaacggaacagttcaaaacctccttgacgcacgctgtcgtgtaccagcactcggtggacaccacgtttgtaatccaggccgacacgtcggtcccacgtcgacaggccccaccgtccggtctgtagcgtgtacgtattcgggcgacggacgtgtcgtcgtcgtcttgcgagtcccattcccatcaccatctgagccacacatcctctgaacaaaagcagggaggcctccacgcacatccccctttctcccactccgtgtccgtggcacccaccccaaaccctcgcgccgcctccgagacagccgccgcaaccatggccaccgccgccgccgcgtctaccgcgctcactggcgccactaccgctgcgcccaaggcgaggcgccgggcgcacctcctggccacccgccgcgccctcgccgcgcccatcaggtgctcagcggcgtcacccgccatgccgatggctcccccggccaccccgctccggccgtggggccccaccgagccccgcaagggtgctgacatcctcgtcgagtccctcgagcgctgcggcgtccgcgacgtcttcgcctaccccggcggcgcgtcgatggagatccaccaggcactcacccgctcccccgtcatcgccaaccacctcttccgccacgagcaaggggaggcctttgccgcctccggctacgcgcgctcctcgggccgcgtcggcgtctgcatcgccacctccggccccggcgccaccaacctagtctccgcgctcgccgacgcgctgctcgattccgtcccgatggtcgccatcacgggacaggtggcgcgacgcatgattggcaccgacgccttccaggagacgcccatcgtcgaggtcacgcgctccatcaccaagcacaactacctggtcctcgacgtcgacgacatcccccgcgtcgtgcaggaggctttcttcctcgcctcctctggtcgaccagggccggtgcttgtcgacatccccaaggacatccagcagcagatggcggtgcctgtctgggacaagcccatgagtctgcctgggtacattgcgcgccttcccaagccccctgcgactgagttgcttgagcaggtgctgcgtcttgttggtgaatcgcggcgccctgttctttatgtgggcggtggctgcgcagcatctggtgaggagttgcgacgctttgtggagctgactggaatcccggtcacaactactcttatgggcctcggcaacttccccagcgacgacccactgtctctgcgcatgctaggtatgcatgggacggtgtatgcaaattatgcagtggataaggccgatctgttgcttgcacttggtgtgcggtttgatgatcgcgtgacagggaagattgaggcttttgcaagcagggctaagattgtgcacgttgatattgatccggctgagattggcaagaacaagcagccacatgtgtccatctgtgcagatgttaagcttgctttgcagggcatgaatgctcttcttgaaggaagcacatcaaagaagagctttgactttggctcatggaacgatgagttggatcagcagaagagggaattcccccttgggtataaaacatctaatgaggagatccagccacaatatgctattcaggttcttgatgagctgacgaaaggcgaggccatcatcggcacaggtgttgggcagcaccagatgtgggcggcacagtactacacttacaagcggccaaggcagtggttgtcttcagctggtcttggggctatgggatttggtttgccggctgctgctggtgcttctgtggcaaacccaggtgtcactgttgttgacatcgatggagatggtagctttctcatgaacgttcaggagctagctatgatccgaattgagaacctcccagtgaaggtctttgtgctaaacaaccagcacctggggatggtggtgcagttggaggacaggttctataaggccaacagagcgcacacatacttgggaaacccagagaatgaaagtgagatatatccagatttcgtgacgatcgccaaagggttcaacattccagccgtccgtgtgacaaagaagaacgaagtccgcgcagcgataaagaagatgctcgagactccagggccgtacctcttggatataatcgtcccacaccaggagcatgtgttgcctatgatccctagtggtggggctttcaaggatatgatcctggatggtgatggcaggactgtgtactgacttcgaataggtacccggggatcctctagtgccgtgggtcgtttaagctgccgctgtacctgtgtcgtctggtgccttctggtgtacctgggaggttgtcgtctatcaagtatctgtggttggtgtcatgagtcagtgagtcccaatactgttcgtgtcctgtgtgcattatacccaaaactgttatgggcaaatcatgaataagcttgatgttcgaacttaaaagtctctgctcaatatggtattatggttgtttttgttcgtctcctaatatttgcctgggatcaaattttattggctggtgttcatttgacctccatgttcttgctaggctccattttttactctacagccataatatgtttgattgtttggtttgttctttgttgtacacctggttctgtcgagcttagttttcgacactggcttacagcttaacatgttgctattttattgggttctgattgctattttattgggttctgattgctagtttttgctgaatccaaaaaccatgttatttatttaagcgatccaggttattattatgatggtggctaagtttttttttttccaagggtaaattttctggattctccagtgtttctgtggccgaattcaatcactagagtcgacctgcagtcacccggtccgggcctagaaggccacccggggtcggaggagactagccgttagttagtgcagaccgtctctaatcagtgactagcgacgtcccgacccacccagctttcttgtacaaagtggccgttaacggatcggccagaatggcccggaccgggttaccccggaatcggacctcgggacgtcgccaaagttagctaggtgtccttagcgtttcttaggttctaggcgttaggggtcaataggttagcctagaagtcccgcactaacagcctagcttaacagttccaagctaagccactagactagccctatccgactaacctagtctaagccgaacggggatctaatctaagctaggcacccattagactagttcactagcgcgaccgcactaaactaggctaaaggttaatagcaactagttagctaggggacgttagctgcccaagcttggttaccgcataatgaggatcgaggatgaggagcatgcacggatagatggcgtctagcatatcgataggacatgacaagtggtacgatccccgtcacatgtccatggaggcatctgatatggacacggcgtgtatctatcgcggctggaacagaaccagcgctcgcgcggcggtcggcgggagggacagaccttggctccgtgcgttcaggttgtgcttgtgccgcgcgccacgcacggtctccgccgcctgcagctgaaattttagatttacatcctatccctttattttttttatttgtcacaattcagttcaaaaatgaagaacggaggtagtgcatcctttgtgagactaatgaaaatcacatctggatcctgaaatcggcgtcgtaacctacaaggccacggactggattagatagtggtccatggtgcataatgaggatcgaggggtaccagtctaattacaaaactaattgcacaaccgctaagctgaatcgcgagatggatctattaaccttaattagtccatgatttgacaatgtggtgctacaataaccatttgctaatgatggattacttaggtttaatagattcgtctcgtgatttagcctatgggttctgctattaattttgtaattagctcatatttagttcttataattagtatccgaacatccaatgtgacatgctaaagtttaaccctggtatccaaatgaagtcttatgagagtttcatcactccggtggtatatgtacttaggctccgttttcttccaccgacttatttttagcacccgtcacattgaatgtttagatactaattagaagtattaaacgtagactatttacaaaatccattacataagacgaatctaaacggcgagacgaatctattaaacctaattagtccatgatttgacaatgtgttgctacagtaaacatttgctaatgatggattaattaggcttaatagattcgtctcgccgtttagcctccacttatgtaatgggttttctaaacaatctacgtttaatactcctaattagtatctaaatattcaatgtgacacgtgctaaaaataagtcagtggaaggaagagaacgtccccttagttttccatcttattaattgtacgatgaaactgtgcagccagatgattgacaatcgcaatacttcaactagtgggccatgcacatcagcgacgtgtaacgtcgtgagttgctgttcccgtagagaaatatcaactggtgggccacgcacatcagcgtcgtgtaacgtggacggaggagccccgtgacggcgtcgacatcgaacggccaccaaccacggaaccacccgtccccacctctcggaagctccgctccacggcgtcgacatctaacggctaccagcaggcgtacgggttggagtggactccttgcctctttgcgctggcggcttccggaaattgcgtggcggagacgaggcgggctcgtctcacacggcacggaagacgtcacgggttccttccccacctctcctcttccccaccgccataaatagccgaccccctcgcctttctccccaatctcatctcgtctcgtgttgttcggagcacaccacccgccccaaatcgttcttcccgcaagcctcggcgatccttcacccgcttcaaggtacggcgatcgtcttcctcctctagatcggcgtgatctgcaagtagttgatttggtagatggttaggatctgtgcactgaagaaatcatgttagatccgcgatgtttctgttcgtagatggctgggaggtggaatttttgtgtagatctgatatgttctcctgtttatcttgtcacgctcctgcgatttgtggggattttaggtcgttgatctgggaatcgtggggttgcttctaggctgttcgtagatgaggtcgttctcacggtttactggatcattgcctagtagatcagctcgggctttcgtctttgtatatggtgcccatacttgcatctatgatctggttccgtggtgttacctaggtttctgcgcctgattcgtccgatcgattttgttagcatgtggtaaacgtttggtcatggtctgatttagattagagtcgaataggatgatctcgatctagctcttgggattaatatgcatgtgtcaccaatctgttccgtggttaagatgatgaatctatgcttagttaatgggtgtagatatatatgctgctgttcctcaatgatgccgtagcttttacctgagcagcatggttcctcctgttacttaggtagatgcacatgcttatagatcaagatatgtactgctactgttggaattgtttagtatacctgatgatcatccatgctcttgttacttgttttggtatacttggatgatggcatgctgctgctttttgttgatttgagcccatccatatctgcatatgtcacatgattaagatgattacgctgtttctgtatgatgccatagcttttatgtgagcaacatgcatcctcctggttatatgcattaatagatggaagatatctattgctacaatttgatgattattttgtacatacgatgatcaagcatgctcttcatactttgttgatatacttggataatgaaatgctgctgcacgttcattctatagcactaatgatgtgatgaacacgcacgacctgtttgtggcatctgtttgaatgtgttgttgctgttcactagagactgttttattaacctactgctagatacttacccttctgtctgtttattcttttgcaggtcgaccgccggggatccatggttgaacaagatggattgcacgcaggttctccggccgcttgggtggagaggctattcggctatgactgggcacaacagacaatcggctgctctgatgccgccgtgttccggctgtcagcgcaggggcgcccggttctttttgtcaagaccgacctgtccggtgccctgaatgaactgcaggacgaggcagcgcggctatcgtggctggccacgacgggcgttccttgcgcagctgtgctcgacgttgtcactgaagcgggaagggactggctgctattgggcgaagtgccggggcaggatctcctgtcatctcaccttgctcctgccgagaaagtatccatcatggctgatgcaatgcggcggctgcatacgcttgatccggctacctgcccattcgaccaccaagcgaaacatcgcatcgagcgagcacgtactcggatggaagccggtcttgtcgatcaggatgatctggacgaagagcatcaggggctcgcgccagccgaactgttcgccaggctcaaggcgcgcatgcccgacggcgatgatctcgtcgtgacccatggcgatgcctgcttgccgaatatcatggtggaaaatggccgcttttctggattcatcgactgtggccggctgggtgtggcggaccgctatcaggacatagcgttggctacccgtgatattgctgaagagcttggcggcgaatgggctgaccgcttcctcgtgctttacggtatcgccgctcccgattcgcagcgcatcgccttctatcgccttcttgacgagttcttctgagcccatcggtcatggatgcttctactgtacctgggtcgtctggtctctgcctgtgtcacctttgaagtacctgtgtcgggattgtgtttggtctagaactgcagtttgtctttgatgttcttttgtctggtcttatgaactggttgtatctgtatgtttactgtaaactgttgttgcggtgcagcagtatggcatccgaatgaataaatgatgtttggacttaaatctgtactctgtttgttttcggttatgccagttctatattgcctgagatcagaatgtttagcttttgagttctgtttggcttgtggtcgactcctgtttcttacttgaggcgtaactctgttctggcaaactcaaatgtctaactgaatgttttaggacttaattgttggacagattaacgtgtttggtttgtttctagattgtgattcggaaggcttgttagttgtggaatcaaggagagcagctaggtctgtgcagaacgttattttggatttaagccttctcagattatgccattactctaaacctaatgatatcatatttcactcggggatgttggagtagtcttttctttctcctgcagacaaaatgattttgctttcgtgtgtgtacatgattttgtgcaactgttgcaacaactgaagtagacaagttttgacctcaccagaagaatgaaaaagattttggaatttgttacatcgacaaaccattgtaacttggcccatcagaatgcacagagaagcggctacaaattgacatgcgttgcaaactttgcaatagttgatgcacatgtttgccattgcctgccagtcttaggaaaagtgtgtggttcgagaaatctaagcatatgtgctctgctcacattgcgtggaacccacacagctttgtcacactcttgtccactccagaagtcattcctggcgctgtttacccctggtaaagagtaaccgaaaacttctcaaggctgtacccaaaactggaaggaaatttggaggcggccgcatgaggagcaatcattgttcaagacatgatgcaaagctagaaaactttgattgtggccgtccttgtgaagtttaggccggggggaacttcatgaaccctatcgaagcttaattagttcttttttgttgttagccatgtttgtattgtagttaaggtgaacaacatgacgccgcacccgcgatctcagggctcgtccccacacaggagggcacgtcgtcgtcttcgccgccgagcatcagagattcagagcacatacacgcacatctcaagcaaacggagtagtacgtcctactcctacgtacatacctagccgacgacctttatgtgcacaccaccactgctctgctgcccggcctctccgtcgtccgttcatcaccagcataatgaggatcgaggatgaggggcgcgccgacgtcccgaggtccgattccgggctaattaacacctagctcgccactcgactaattagggactaagcctagcgcttagccgttaaaacctagcacaccctaagcacccttagttaggttcccctcttaattaagccctagtgagcccctaagttaaggggacgctaagagccccctaacctagtattcggctagaggcgaactaggctaaacacctaagcgcacctctttaagctagatcgctagggggctaggctagagcttcgctagattagtctaagggcagcctgcagggccctcttgtcggaccagttgcccaccacgttggtgaggggcaactttattatacaaagttgatagatcctcatgtcttcctgcccttaaggccaattgttcaagattcattcaacaattgaaacatctcccatgattaaatcagtataaggttgctatggtcttgcttgacaaagtttttttttgagggaatttcaactaaatttttgagtgaaactatcaaatactgattttaaaaaatttttataaaaggaagcgcagagataaaaggccatctatgctacaaaagtacccaaaaatgtaatcctaaagtatgaattgcattttttttttgtttggacgaaaggaaaggagtattaccacaagaatgatatcatcttcatatttagatcttttttgggtaaagcttgagattctctaaatatagagaaatcagaagaaaaaaaaaccgtgttttggtggttttgatttctagcctccacaataactttgacggcgtcgacaagtctaacggacaccaagcagcgaaccaccagcgccgagccaagcgaagcagacggccgagacgttgacaccttcggcgcggcatctctcgagagttccgctccggcgctccacctccaccgctggcggtttcttattccgttccgttccgcctcctgctctgctcctctccacaccacacggcacgaaaccgttacggcaccggcagcacccagcacgggagaggggattcctttcccaccgttccttccctttccgccccgccgctataaatagccagccccatccccagcttttttccccaatctcatctcctctctcctgttgttcggagcacacgcacaatccgatcgatccccaaatccccttcgtctctcctcgcgagcctcgtggatcccagcttcaaggtacggcgatcgatcatcccccctccttctctctaccttcttttctctagactacatcggatggcgatccatggttagggcctgctagtttcccttcctgttttgtcgatggctgcgaggcacaatagatctgatggcgttatgacggctaacttgtcatgttgttgcgatttatagtccctttaggagatcagtttaatttctcggatggttcgagatcggtggtccatggttagtaccctaagatccgcgctgttagggttcgtagatggaggcgacctgttctgattgttaacttgtcagtacctgggaaatcctgggatggttctagctcgtccgcagatgagatcgatttcatgatcctctgtatcttgtttcgttgcctaggttccgtctaatctatccgtggtatgatgtagatgttttgatcgtgctaactacgtcttgtaaagttaattgtcaggtcataatttttagcatgcctttttttttgtttggttttgtctaattgggctgtcgttctagatcagagtagaagactgttccaaactacctgctggatttattgaacttggatctgtatgtgtgtcacatatcttcataaattcatgattaagatggattgaaatatcttttatctttttggtatggatagttctatatgttggtgtggctttgttagatgtatacatgcttagatacatgaagcaacgtgctgctactgtttagtaattgctgttcatttgtctaataaacagataaggatatgtatttatgttgctgttggttttgctggtactttgttggatacaaatgcttcaatacagaaaacagcatgctgctacgatttaccatttatctaatcttatcatatgtctaatctaataaacaaacatgcttttaaattatcttcatatgcttggatgatggcatacacagcggctatgtgtggttttttaaatacccagcatcatgggcatgcatgacactgctttaatatgctttttatttgcttgagactgtttcttttgtttatactgaccctttagttcggtgactcttctgcaggtcgactttaacttagcctaggatccatggcccagtccaagcacggcctgaccaaggagatgaccatgaagtaccgcatggagggctgcgtggacggccacaagttcgtgatcaccggcgagggcatcggctaccccttcaagggcaagcaggccatcaacctgtgcgtggtggagggcggccccttgcccttcgccgaggacatcttgtccgccgccttcatgtacggcaaccgcgtgttcaccgagtacccccaggacatcgtcgactacttcaagaactcctgccccgccggctacacctgggaccgctccttcctgttcgaggacggcgccgtgtgcatctgcaacgccgacatcaccgtgagcgtggaggagaactgcatgtaccacgagtccaagttctacggcgtgaacttccccgccgacggccccgtgatgaagaagatgaccgacaactgggagccctcctgcgagaagatcatccccgtgcccaagcagggcatcttgaagggcgacgtgagcatgtacctgctgctgaaggacggtggccgcttgcgctgccagttcgacaccgtgtacaaggccaagtccgtgccccgcaagatgcccgactggcacttcatccagcacaagctgacccgcgaggaccgcagcgacgccaagaaccagaagtggcacctgaccgagcacgccatcgcctccggctccgccttgccctccggactcagatctcgatagggtaccaatggccagttaacagatccagctgctgctgttctagggttcacaagtctgcctatttgtcttccccaatggagctatggttgtctggtctggtccttggtcgtgtcccgtttcattgtgtactatttacctgtaatgtgtatccttaagtctggtttgatggtgtctgaaacgttttgctgtggtagagcagcatggaagaactataatgaataagtgatccctaatcattgtgtccaaattttgcttctgctatacccttttgtgctgtttcttatgttttgcttaaaaatttgatctgacaaacaaatttgtctaaattatgctcttgttctgactgtgtactgtacacatttgtattgctaccggtttggcacatagttttctctttgattgcagatcaaacccttctgattgcagattgcttggctatggctgatgtgctcactgttcttctttagcttgtatattgctgatggtggcttggctacggctgaaaaagttgctgctgcgccgacttggcaactgttgctccagtaatgctttgtcctctcttcctagccgccgacttggcacttggcagctgttgctcctgtaatgcgttgttatctcttatctcttgagatgtactatgattttgaggctgtttgacttgtgccagattgccagtgctgatgctatattatctcaggtttttatgctagtatatgttttactgtgtgctgcctgtgtcgagttacgtaatctattgaaccgctatgcgtgttgatgccctgttgttgcttgccagattgatgcccctgttgcttgcagcttgcaagctgtagtgaaatcctaaaattcgaaaccaaatctattctgaacttttgaagatctgtgatgtccggaagaaaagattcaaacagataaacgggactctccagaatctataaaataaatgatcgacaaacgctttgctttggtaggcttcctagttagttagcggaccgaagcttcggttgtttctgtggccgaattcaatcactagagtcgacctgcatgattccgatgacttcgtaggttcctagctcaagccgctcgtgtccaagcgtcacttacgattagctaatgattacggcatctaggaccgactagctagctagctaagagctcggtaccgagctcgaattcattccgattaatcgtggcctcttgctcttcaggatgaagagctatgtttaaacgtgcaagcgctactagacaattcagtacattaaaaacgtccgcaatgtgttattaagttgtctaagcgtcaatttgtttacaccacaatatatcctgcca

SEQ ID NO: 236 - DNA, 35833 bp, synthetic construct
  misc_feature 1..35833: note = PHP8418-0006
  source 1..35833: mol_type = other DNA
gtttacccgccaatatatcctgtcaaacactgcggccgcacttgaccgcggatggagccggagctgtggtgaggccatcgacgggaggtgggggagaacacagtctcagtgttctttgtgagtccgcaaggtttttagcttttctgtattaattaaggttgctgttggctgtagaatacggtcgtggaagagctgtatcggtagctactacgtaagctattatatactggaagtctggagctcgtcgatctccggtcgtcttcctccatttctcctcgtcttgctttgactgctgctaccatttgcttctgttttctgatgaagcatgccatgtcggccaccagtgtttgtgtggtttttgcagggaatggctttcaagtgctgtgattgaatggccctcgtcgtcctcggctgagctcacatggacgcgtcatgtgagtgagatatatgatcatatgatgagtggggttcgggtgagtgcgtacttgaagtaggatcccgctttcactcattcattcattggcctttaaaccgggaaattttcgcgaggagatggagggaagcaagcagggtgacgagtgcagagtgccgcgagcgctttgtcaaaaggcaccgccgtaggcaaaaaaatcaatggccctgactgactcgatggtagtactactgtagagactagagagggttgctccccatatcttcgtgtgacttttactccagcattgcatttccgtcattgagacgttaattaatagcagctttcgggacagatgactgtggccatgtttcgtcacggccgcttcgtgccagctgggggtactatagtactgtgattttgttagtaaaaactttcattaggccaccattgacgaccgggccttcgcttttgctgcgctaattaaccatttcccggcgaccgaagggaacatgaacatgccccgacacatgagggcatgaggactagtgttctccctgtcgttcgttgacttgactagtgatagtttaaacgctcttcaactggaagagcggttactaccggttcactagctagctgctaatcgagctagttaccctatgaggtgacatgaagcgctcacggttactatgacggttagcttcacgactgttggtggcagtagcgtacgacttagctatagttccggacttacctagctaataacttcgtatagcatacattatacgaagttatggttaccgagctgttaccaagcggccgcacactgatagtttaaactgaaggcgggaaacgacaatctgatcatgagcggagaattaagggagtcacgttatgacccccgccgatgacgcgggacaagccgttttacgtttggaactgacagaaccgcaacgattgaaggagccactcagccgcgggtttctggagtttaatgagctaagcacatacgtcagaaaccattattgcgcgttcaaaagtcgcctaaggtcactatcagctagcaaatatttcttgtcaaaaatgctccactgacgttccataaattcccctcggtatccaattagagtctcatattcactcccatggcggccaatgcgggcggcggtggagcgggaggaggcagcggcagcggcagcgtggctgcgccggcggtgtgccgccccagcggctcgcggtggacgccgacgccggagcagatcaggatgctgaaggagctctactacggctgcggcatccggtcgcccagctcggagcagatccagcgcatcaccgccatgctgcggcagcacggcaagatcgagggcaagaacgtcttctactggttccagaaccacaaggcccgcgagcgccagaagcgccgcctcaccagcctcgacgtcaacgtgcccgccgccggcgcggccgacgccaccaccagccaactcggcgtcctctcgctgtcgtcgccgccgccttcaggcgcggcgcctccctcgcccaccctcggcttctacgccgccggcaatggcggcggatcggctgtgctgctggacacgagttccgactggggcagcagcggcgctgctatggccaccgagacatgcttcctgcaggactacatgggcgtgacggacacgggcagctcgtcgcagtggccacgcttctcgtcgtcggacacgataatggcggcggccgcggcgcgggcggcgacgacgcgggcgcccgagacgctccctctcttcccgacctgcggcgacgacggcggcagcggtagcagcagctacttgccgttctggggtgccgcgtccacaactgccggcgccacttcttccgttgcgatccaacagcaacaccagctgcaggagcagtacagcttttacagcaacagcaacagcacccagctggccggcaccggcaaccaagacgtatcggcaacagcagcagcagccgccgccctggagctgagcctcagctcatggtgctccccttaccctgctgcagggagtatgtgagagcaacgcgagctgccactgctcttcactgatgtctctggaatggaaggaggaggaagtgagaacagatcattcgacaaagcagcattagtccgttgatcggtggaagaccactcgtcagtgttgagttgaatgtttgatcaataaaatacggcaatgctgtaagggttgttttttatgccattgataatacactgtactgttcagttgttgaactctatttcttagccatgccaagtgcttttcttattttgaataacattacagcaaaaagttgaaagacaaaaaaaaaaacccccgaacagagtgctttgggtcccaagcttctttagactgtgttcggcgttccccctaaatttctccccctatatctcactcacttgtcacatcagcgttctctttccccctatatctccacgctctacagcagttccacctatatcaaacctctataccccaccacaacaatattatatactttcatcttcaactaactcatgtaccttccaatttttttctactaataattatttacgtgcacagaaacttagcaaggagagagagagcgggaatttaaatgctcggcgttaggcttttagtccgctaggtggctagaccgaggttaggacgctagttcactaggggcctagtggtgttttaagacgtcacggtcactacgaatcgaccgaagcttgcatgggccgcatcgagcagctggcttgtggggaccagacaaaaaaggaatggtgcagaattgttaggcgcacctaccaaaagcatctttgcctttattgcaaagataaagcagattcctctagtacaagtggggaacaaaataacgtggaaaagagctgtcctgacagcccactcactaatgcgtatgacgaacgcagtgacgaccacaaaactcgagcaacgagatcatgagccaatcaaagaggagtgatgtagacctaaagcaataatggagccatgacgtaagggcttacgcccatacgaaataattaaaggctgatgtgacctgtcggtctctcagaacctttactttttatgtttggcgtgtatttttaaatttccacggcaatgacgatgtgaccgtcgacccactaaaacattgctttgtcaaaagctaaaaaagatgatgcccgacagccacttgtgtgaagcatgagaagccggtccctccactaagaaaattagtgaagcatcttccagtggtccctccactcacagctcaatcagtgagcaacaggacgaaggaaatgacgtaagccatgacgtctaatcccagggccagcttgcatgcctgcagtgcagcgtgacccggtcgtgcccctctctagagataatgagcattgcatgtctaagttataaaaaattaccacatattttttttgtcacacttgtttgaagtgcagtttatctatctttatacatatatttaaactttactctacgaataatataatctatagtactacaataatatcagtgttttagagaatcatataaatgaacagttagacatggtctaaaggacaattgagtattttgacaacaggactctacagttttatctttttagtgtgcatgtgttctcctttttttttgcaaatagcttcacctatataatacttcatccattttattagtacatccatttagggtttagggttaatggtttttatagactaatttttttagtacatctattttattctattttagcctctaaattaagaaaactaaaactctattttagtttttttatttaataatttagatataaaatagaataaaataaagtgactaaaaattaaacaaataccctttaagaaattaaaaaaactaaggaaacatttttcttgtttcgagtagataatgccagcctgttaaacgccgtcgacgagtctaacggacaccaaccagcgaaccagcagcgtcgcgtcgggccaagcgaagcagacggcacggcatctctgtcgctgcctctggacccctctcgagagttccgctccaccgttggacttgctccgctgtcggcatccagaaattgcgtggcggagcggcagacgtgagccggcacggcaggcggcctcctcctcctctcacggcaccggcagctacgggggattcctttcccaccgctccttcgctttcccttcctcgcccgccgtaataaatagacaccccctccacaccctctttccccaacctcgtgttgttcggagcgcacacacacacaaccagatctcccccaaatccacccgtcggcacctccgcttcaaggtacgccgctcgtcctcccccccccccctctctaccttctctagatcggcgttccggtccatgcatggttagggcccggtagttctacttctgttcatgtttgtgttagatccgtgtttgtgttagatccgtgctgctagcgttcgtacacggatgcgacctgtacgtcagacacgttctgattgctaacttgccagtgtttctctttggggaatcctgggatggctctagccgttccgcagacgggatcgatttcatgattttttttgtttcgttgcatagggtttggtttgcccttttcctttatttcaatatatgccgtgcacttgtttgtcgggtcatcttttcatgcttttttttgtcttggttgtgatgatgtggtctggttgggcggtcgttctagatcggagtagaattctgtttcaaactacctggtggatttattaattttggatctgtatgtgtgtgccatacatattcatagttacgaattgaagatgatggatggaaatatcgatctaggataggtatacatgttgatgcgggttttactgatgcatatacagagatgctttttgttcgcttggttgtgatgatgtggtgtggttgggcggtcgttcattcgttctagatcggagtagaatactgtttcaaactacctggtgtatttattaattttggaactgtatgtgtgtgtcatacatcttcatagttacgagtttaagatggatggaaatatcgatctaggataggtatacatgttgatgtgggttttactgatgcatatacatgatggcatatgcagcatctattcatatgctctaaccttgagtacctatctattataataaacaagtatgttttataattattttgatcttgatatacttggatgatggcatatgcagcagctatatgtggatttttttagccctgccttcatacgctatttatttgcttggtactgtttcttttgtcgatgctcaccctgttgtttggtgttacttctgcaggtcgactttaacttagcctaggatccatggccactgtgaacaactggctcgctttctccctctccccgcaggagctgccgccctcccagacgacggactccacactcatctcggccgccaccgccgaccatgtctccggcgatgtctgcttcaacatcccccaagattggagcatgaggggatcagagctttcggcgctcgtcgcggagccgaagctggaggacttcctcggcggcatctccttctccgagcagcatcacaaggccaactgcaacatgatacccagcactagcagcacagtttgctacgcgagctcaggtgctagcaccggctaccatcaccagctgtaccaccagcccaccagctcagcgctccacttcgcggactccgtaatggtggcttcctcggccggtgtccacgacggcggtgccatgctcagcgcggccgccgctaacggtgtcgctggcgctgccagtgccaacggcggcggcatcgggctgtccatgattaagaactggctgcggagccaaccggcgcccatgcagccgagggtggcggcggctgagggcgcgcaggggctctctttgtccatgaacatggcggggacgacccaaggcgctgctggcatgccacttctcgctggagagcgcgcacgggcgcccgagagtgtatcgacgtcagcacagggtggagccgtcgtcgtcacggcgccgaaggaggatagcggtggcagcggtgttgccggcgctctagtagccgtgagcacggacacgggtggcagcggcggcgcgtcggctgacaacacggcaaggaagacggtggacacgttcgggcagcgcacgtcgatttaccgtggcgtgacaaggcatagatggactgggagatatgaggcacatctttgggataacagttgcagaagggaagggcaaactcgtaagggtcgtcaagtctatttaggtggctatgataaagaggagaaagctgctagggcttatgatcttgctgctctgaagtactggggtgccacaacaacaacaaattttccagtgagtaactacgaaaaggagctcgaggacatgaagcacatgacaaggcaggagtttgtagcgtctctgagaaggaagagcagtggtttctccagaggtgcatccatttacaggggagtgactaggcatcaccaacatggaagatggcaagcacggattggacgagttgcagggaacaaggatctttacttgggcaccttcagcacccaggaggaggcagcggaggcgtacgacatcgcggcgatcaagttccgcggcctcaacgccgtcaccaacttcgacatgagccgctacgacgtgaagagcatcctggacagcagcgccctccccatcggcagcgccgccaagcgcctcaaggaggccgaggccgcagcgtccgcgcagcaccaccacgccggcgtggtgagctacgacgtcggccgcatcgcctcgcagctcggcgacggcggagccctggcggcggcgtacggcgcgcactaccacggcgccgcctggccgaccatcgcgttccagccgggcgccgccagcacaggcctgtaccacccgtacgcgcagcagccaatgcgcggcggcgggtggtgcaagcaggagcaggaccacgcggtgatcgcggccgcgcacagcctgcaggacctccaccacctgaacctgggcgcggccggcgcgcacgactttttctcggcagggcagcaggccgccgccgctgcgatgcacggcctgggtagcatcgacagtgcgtcgctcgagcacagcaccggctccaactccgtcgtctacaacggcggggtcggcgacagcaacggcgccagcgccgtcggcggcagtggcggtggctacatgatgccgatgagcgctgccggagcaaccactacatcggcaatggtgagccacgagcaggtgcatgcacgggcctacgacgaagccaagcaggctgctcagatggggtacgagagctacctggtgaacgcggagaacaatggtggcggaaggatgtctgcatgggggactgtcgtgtctgcagccgcggcggcagcagcaagcagcaacgacaacatggccgccgacgtcgggcatggcggcgcgcagctcttcagtgtctggaacgacacttaagcgtacctagtggtacctgacatcttatagtctgcaacctctcgtgtctgaattcctatctttatcaagtgttattgcttccacgactataggacagctttcgtcgaaagcttttgctcatgtgatctcgaaggattcatctagtctgatttttcgtgacttgtatcggttttattggattcatccaacatatatcaataaaaaatgagttgtgtttcctttcttcctagttcagttaaaattatttccctcctgcgcttgtgctgtaattgtctgtgtacctgttgtttgtgactgtgttagttcccttggatatgatttcgtatttgatatgtacatggagatagcttagcttcattattggagtatgaagttagtatgacatagtcactctcctggaaaattgacactgcaaaccatatttttattctgaaccacaaatcctagtcagtccgctggcatatgccgtccgtttgctgaatccagaacgtgggtttggagatgtacggctgagatgcctctatgcgaaggggatttcgtggtgaaacgagatgggagtagagcaacgcccgtggaagatgcttcaaacttccacacttttgagcaacgatcggcagtagtaaggtagacgatttcaagatcaaagcatatgaagataaacaacatcaacaacaaaatttgttggggttctatagagagaaacagagctacatacatacactgttttgtatctaccatctgagatgatgaaaagatgaaaaactaaagaatgccccggcgccaacgccaggacacgccgcgcgcgcgtcacccgagccatctcttgacccagccggcgctgtatatttacacacgttgcagcatcgatcaccacctgttcgatcgcgtcgccgtcaccggcgcgccgcgacttattgaactagtctagggcgcggctaacaacctagcttagattgccttgtctaaacccttaggctaacgcgccacccataacttcgtatagcatacattatacgaagttatgcggttcaaagccaatgactgttgttaggtccagtttctaaggacgaatcatccaatcactggttctttctgaacaaaacaaagagctatagagttacgttactgtagccgagacagagcctgcaatctggttatgccacatactaggttctttcttaaagttgactcactctatcctaagttctacttacaaggagctacaacaaattggtcataaccggagagcgttcaaggaggtaatatcccatcttactctgtagcaaggctacaaaaggagagctaaagaactaggctacaaaaagagagctaaagaactaactatctagcaagactacagagctatagtgtagagatttcataaccggtgagcgttcaaggatactttgaagagaagaggtaatatctcaactagcaagactacaaaaaaatggagatataaaactaactgtctaacaagactacagagctatagtagagatagatacgttcgacacttaagcatgagaattcgagctcggtaccctggttcacaaactcaatacaacacacagtggagtagggtattacgctccggcggcccgaaccactctaaatccttgtgtcctcgtgtgctcttccaccattaatgactgtaattgcagggacacgaagagttgtagcgcttttgccaacaagatccgctatatgctagtagagtggaacctgcacagcaacaagcatccaataatctgagaataagaattatgtgtggtgatggttctcatctctgcaactcgccattttcgcgagagaaccaaatccaagttggtgaagatcatgatttgggctcatgggctggcatagtagctattacctttgcaattgtggttcgaatctatccgatattctccttttcagggagagctaatgcttatgcttattgggtattttggtttgacactgcttcacgcccaaaaaaaggcaactatgtctgagttggatatggcccaaaaaaaggcagctatgtctgagttggatatggaagtcttctttcgtttagggtgaagtaagaccaagctcatgagcttattatcttaggtcggaacaaattagttgataggcatggcacatttatcaaattataatgattttaacagaaaagcaacacctctttttcagcagcaccagctttgcaagctgcaattgacactccaagcatagtatttgctccaaactcagcctgcatttcgcacaatatcatatctatttccatttggataaaatatattttccagaaatatgggaacagaatcaagatacagaaaaaagttgtggtagtagtggtaagtggaaacacaagtacagtgaaaagatagcattatttctgaacagtcaaattaaccgaaataagtagtatcacatactgcccctaaattgactacacccaatgtaaagaattgcttgagcatattgagccatcagttgtttgtttgtgtaacggatttgacaatgcagagttcaggagcaaaaaaccgcaaaggagagaaagagggaaaggatctcctagtatcccaccttgtggcgcgccctgtcaagtgcatgatggcctggtcgatctgcgtctgctgctgcggttccatcccaacgagtgcctccgacaccttgtcgttgatcacccgcaccgcgtaggcgacccccctggcgaggaacttccgcctctcggaggccccggccgcgtcggcggcggcgccctcgagcgcgcccacgctagccgtagatgctcggtgcacggccttgttggtgtgcaactcgacctcaacggccggtgcgctacgcccgtcaaggatctggcgcgcccgcaccctcgtgatcacggtgggcgcctcccgcctcatgtggccgacgatgaaaagcgccgggttaggggccttggcgcgcaccgccgtattcagggcctcctcgctcttgcgcgagagcaggtgcttccccaggtactcctgcactgacaaggctgccacagcggtggaatttgtcctcacgacttcgccacgtcgtcctcacctccctggcttcccacgactccgccgtatcgaggtgctcggtgggtcgtcttaatccgaagtccgaactaggaagacgagacagagaggtctgaggaatgggcctcgtttgatgttgagctgaattatttttccagcataagcccaggtcttggtccatgaacaaaattactagaaacccagcccagtactacgatctaaaagagggactgccactggatagctctctctagcattctccacgctccaatacagcggcgtcgtgtctatccgggtctatccgcgaacacgtgagaactctccagaaactgctttctcctccacttcatctctctcgctttccctctataaaaagaccccttctaggaattgagggagacagcaagcaccaagcagcgatccgaagctcaatcaattcactcaaacctcttccccaaatcttcgattagatcttcgttgacaagaagactagaaccgaacctgacatgtccaacctgctcacggttcaccagaaccttccggctcttccagtggacgcgacgtccgatgaagtcaggaagaacctcatggacatgttccgcgacaggcaagcgttcagcgagcacacctggaagatgctgctctccgtctgccgctcctgggctgcatggtgcaagctgaacaacaggaagtggttccccgctgagcccgaggacgtgagggattaccttctgtacctgcaagcgcgaggtttgtttctgcttctacctttgatatatatataataattatcattaattagtagtaatataatatttcaaatatttttttcaaaataaaagaatgtagtatatagcaattgcttttctgtagtttataagtgtgtatattttaatttataacttttctaatatatgaccaaaacatggtgatgcctaggtctggcagtgaagaccatccagcaacaccttggacaactgaacatgcttcacaggcgctccggcctcccgcgccccagcgactcgaacgccgtgagcctcgtcatgcgccgcatcaggaaggaaaacgtcgatgccggcgaaagggcaaagcaggccctcgcgttcgagaggaccgatttcgaccaggtccgcagcctgatggagaacagcgacaggtgccaggacattaggaacctggcgttcctcggaattgcatacaacacgctcctcaggatcgcggaaattgcccgcattcgcgtgaaggacattagccgcaccgacggcggcaggatgcttatccacattggcaggaccaagacgctcgtttccaccgcaggcgtcgaaaaggccctcagcctcggagtgaccaagctcgtcgaacgctggatctccgtgtccggcgtcgcggacgacccaaacaactacctcttctgccgcgtccgcaagaacggggtggctgcccctagcgccaccagccaactcagcacgagggccttggaaggtattttcgaggccacccaccgcctgatctacggcgcgaaggatgacagcggtcaacgctacctcgcatggtccgggcactccgcccgcgttggagctgctagggacatggcccgcgccggtgtttccatccccgaaatcatgcaggcgggtggatggacgaacgtgaacattgtcatgaactacattcgcaaccttgacagcgagacgggcgcaatggttcgcctcctggaagatggtgactgaggtacccaacctagacttgtccatcttctggattggccaacttaattaatgtatgaaataaaaggatgcacacatagtgacatgctaatcactataatgtgggcatcaaagttgtgtgttatgtgtaattactagttatctgaataaaagagaaagagatcatccatatttcttatcctaaatgaatgtcacgtgtctttataattctttgatgaaccagatgcatttcattaaccaaatccatatacatataaatattaatcatatataattaatatcaattgggttagcaaaacaaatctagtctaggtgtgttttgcgatccgatatcgaattggccacggtaccagctgctgctgttctagggttcacaagtctgcctatttgtcttccccaatggagctatggttgtctggtctggtccttggtcgtgtcccgtttcattgtgtactatttacctgtaatgtgtatccttaagtctggtttgatggtgtctgaaacgttttgctgtggtagagcagcatggaagaactataatgaataagtgatccctaatcattgtgtccaaattttgcttctgctatacccttttgtgctgtttcttatgttttgcttaaaaatttgatctgacaaacaaatttgtctaaattatgctcttgttctgactgtgtactgtacacatttgtattgctaccggtttggcacatagttttctctttgattgcagatcaaacccttctgattgcagattgcttggctatggctgatgtgctcactgttcttctttagcttgtatattgctgatggtggcttggctacggctgaaaaagttgctgctgcgccgacttggcaactgttgctccagtaatgctttgtcctctcttcctagccgccgacttggcacttggcagctgttgctcctgtaatgcgttgttatctcttatctcttgagatgtactatgattttgaggctgtttgacttgtgccagattgccagtgctgatgctatattatctcaggtttttatgctagtatatgttttactgtgtgctgcctgtgtcgagttacgtaatctattgaaccgctatgcgtgttgatgccctgttgttgcttgccagattgatgcccctgttgcttgcagcttgcaagctgtagtgaaatcctaaaattccaaaccaaatctattctgaacttttgaagatctgtgatgtccggaagaaaagattcaaacagataaacgggactctccagaatctataaaataaatgatcgacaaacgctttgctttggtaggcttcaagcttttaattaagtcatctagttgaaggatcgctatcaactttgtatagaaaagttgggccgaattcgagctcggtacggccagaatggcccggaccgacctgcagtgcagcgtgacccggtcgtgcccctctctagagataatgagcattgcatgtctaagttataaaaaattaccacatattttttttgtcacacttgtttgaagtgcagtttatctatctttatacatatatttaaactttactctacgaataatataatctatagtactacaataatatcagtgttttagagaatcatataaatgaacagttagacatggtctaaaggacaattgagtattttgacaacaggactctacagttttatctttttagtgtgcatgtgttctcctttttttttgcaaatagcttcacctatataatacttcatccattttattagtacatccatttagggtttagggttaatggtttttatagactaatttttttagtacatctattttattctattttagcctctaaattaagaaaactaaaactctattttagtttttttatttaataatttagatataaaatagaataaaataaagtgactaaaaattaaacaaataccctttaagaaattaaaaaaactaaggaaacatttttcttgtttcgagtagataatgccagcctgttaaacgccgtcgacgagtctaacggacaccaaccagcgaaccagcagcgtcgcgtcgggccaagcgaagcagacggcacggcatctctgtcgctgcctctggacccctctcgagagttccgctccaccgttggacttgctccgctgtcggcatccagaaattgcgtggcggagcggcagacgtgagccggcacggcaggcggcctcctcctcctctcacggcaccggcagctacgggggattcctttcccaccgctccttcgctttcccttcctcgcccgccgtaataaatagacaccccctccacaccctctttccccaacctcgtgttgttcggagcgcacacacacacaaccagatctcccccaaatccacccgtcggcacctccgcttcaaggtacgccgctcgtcctcccccccccccctctctaccttctctagatcggcgttccggtccatgcatggttagggcccggtagttctacttctgttcatgtttgtgttagatccgtgtttgtgttagatccgtgctgctagcgttcgtacacggatgcgacctgtacgtcagacacgttctgattgctaacttgccagtgtttctctttggggaatcctgggatggctctagccgttccgcagacgggatcgatttcatgattttttttgtttcgttgcatagggtttggtttgcccttttcctttatttcaatatatgccgtgcacttgtttgtcgggtcatcttttcatgcttttttttgtcttggttgtgatgatgtggtctggttgggcggtcgttctagatcggagtagaattctgtttcaaactacctggtggatttattaattttggatctgtatgtgtgtgccatacatattcatagttacgaattgaagatgatggatggaaatatcgatctaggataggtatacatgttgatgcgggttttactgatgcatatacagagatgctttttgttcgcttggttgtgatgatgtggtgtggttgggcggtcgttcattcgttctagatcggagtagaatactgtttcaaactacctggtgtatttattaattttggaactgtatgtgtgtgtcatacatcttcatagttacgagtttaagatggatggaaatatcgatctaggataggtatacatgttgatgtgggttttactgatgcatatacatgatggcatatgcagcatctattcatatgctctaaccttgagtacctatctattataataaacaagtatgttttataattattttgatcttgatatacttggatgatggcatatgcagcagctatatgtggatttttttagccctgccttcatacgctatttatttgcttggtactgtttcttttgtcgatgctcaccctgttgtttggtgttacttctgcaggtcgactctagaggatccaccggtcgccaccatggcaccgaagaagaagcgcaaggtgatggacaagaagtacagcatcggcctcgacatcggcaccaactcggtgggctgggccgtcatcacggacgaatataaggtcccgtcgaagaagttcaaggtcctcggcaatacagaccgccacagcatcaagaaaaacttgatcggcgccctcctgttcgatagcggcgagaccgcggaggcgaccaggctcaagaggaccgccaggagacggtacactaggcgcaagaacaggatctgctacctgcaggagatcttcagcaacgagatggcgaaggtggacgactccttcttccaccgcctggaggaatcattcctggtggaggaggacaagaagcatgagcggcacccaatcttcggcaacatcgtcgacgaggtaagtttctgcttctacctttgatatatatataataattatcattaattagtagtaatataatatttcaaatatttttttcaaaataaaagaatgtagtatatagcaattgcttttctgtagtttataagtgtgtatattttaatttataacttttctaatatatgaccaaaacatggtgatgtgcaggtggcctaccacgagaagtacccgacaatctaccacctccggaagaaactggtggacagcacagacaaggcggacctccggctcatctaccttgccctcgcgcatatgatcaagttccgcggccacttcctcatcgagggcgacctgaacccggacaactccgacgtggacaagctgttcatccagctcgtgcagacgtacaatcaactgttcgaggagaaccccataaacgctagcggcgtggacgccaaggccatcctctcggccaggctctcgaaatcaagaaggctggagaaccttatcgcgcagttgccaggcgaaaagaagaacggcctcttcggcaaccttattgcgctcagcctcggcctgacgccgaacttcaaatcaaacttcgacctcgcggaggacgccaagctccagctctcaaaggacacctacgacgacgacctcgacaacctcctggcccagataggagaccagtacgcggacctcttcctcgccgccaagaacctctccgacgctatcctgctcagcgacatccttcgggtcaacaccgaaattaccaaggcaccgctgtccgccagcatgattaaacgctacgacgagcaccatcaggacctcacgctgctcaaggcactcgtccgccagcagctccccgagaagtacaaggagatcttcttcgaccaatcaaaaaacggctacgcgggatatatcgacggcggtgccagccaggaagagttctacaagttcatcaaaccaatcctggagaagatggacggcaccgaggagttgctggtcaagctcaacagggaggacctcctcaggaagcagaggaccttcgacaacggctccatcccgcatcagatccacctgggcgaactgcatgccatcctgcggcgccaggaggacttctacccgttcctgaaggataaccgggagaagatcgagaagatcttgacgttccgcatcccatactacgtgggcccgctggctcgcggcaactcccggttcgcctggatgacccggaagtcggaggagaccatcacaccctggaactttgaggaggtggtcgataagggcgctagcgctcagagcttcatcgagcgcatgaccaacttcgataaaaacctgcccaatgaaaaagtcctccccaagcactcgctgctctacgagtacttcaccgtgtacaacgagctcaccaaggtcaaatacgtcaccgagggcatgcggaagccggcgttcctgagcggcgagcagaagaaggcgatagtggacctcctcttcaagaccaacaggaaggtgaccgtgaagcaattaaaagaggactacttcaagaaaatagagtgcttcgactccgtggagatctcgggcgtggaggatcggttcaacgcctcactcggcacgtatcacgacctcctcaagatcattaaagacaaggacttcctcgacaacgaggagaacgaggacatcctcgaggacatcgtcctcaccctgaccctgttcgaggaccgcgaaatgatcgaggagaggctgaagacctacgcgcacctgttcgacgacaaggtcatgaaacagctcaagaggcgccgctacactggttggggaaggctgtcccgcaagctcattaatggcatcagggacaagcagagcggcaagaccatcctggacttcctcaagtccgacgggttcgccaaccgcaacttcatgcagctcattcacgacgactcgctcacgttcaaggaagacatccagaaggcacaggtgagcgggcagggtgactccctccacgaacacatcgccaacctggccggctcgccggccattaaaaagggcatcctgcagacggtcaaggtcgtcgacgagctcgtgaaggtgatgggccggcacaagcccgaaaatatcgtcatagagatggccagggagaaccagaccacccaaaaagggcagaagaactcgcgcgagcggatgaaacggatcgaggagggcattaaagagctcgggtcccagatcctgaaggagcaccccgtggaaaatacccagctccagaatgaaaagctctacctctactacctgcagaacggccgcgacatgtacgtggaccaggagctggacattaatcggctatcggactacgacgtcgaccacatcgtgccgcagtcgttcctcaaggacgatagcatcgacaacaaggtgctcacccggtcggataaaaatcggggcaagagcgacaacgtgcccagcgaggaggtcgtgaagaagatgaaaaactactggcgccagctcctcaacgcgaaactgatcacccagcgcaagttcgacaacctgacgaaggcggaacgcggtggcttgagcgaactcgataaggcgggcttcataaaaaggcagctggtcgagacgcgccagatcacgaagcatgtcgcccagatcctggacagccgcatgaatactaagtacgatgaaaacgacaagctgatccgggaggtgaaggtgatcacgctgaagtccaagctcgtgtcggacttccgcaaggacttccagttctacaaggtccgcgagatcaacaactaccaccacgcccacgacgcctacctgaatgcggtggtcgggaccgccctgatcaagaagtacccgaagctggagtcggagttcgtgtacggcgactacaaggtctacgacgtgcgcaaaatgatcgccaagtccgagcaggagatcggcaaggccacggcaaaatacttcttctactcgaacatcatgaacttcttcaagaccgagatcaccctcgcgaacggcgagatccgcaagcgcccgctcatcgaaaccaacggcgagacgggcgagatcgtctgggataagggccgggatttcgcgacggtccgcaaggtgctctccatgccgcaagtcaatatcgtgaaaaagacggaggtccagacgggcgggttcagcaaggagtccatcctcccgaagcgcaactccgacaagctcatcgcgaggaagaaggattgggacccgaaaaaatatggcggcttcgacagcccgaccgtcgcatacagcgtcctcgtcgtggcgaaggtggagaagggcaagtcaaagaagctcaagtccgtgaaggagctgctcgggatcacgattatggagcggtcctccttcgagaagaacccgatcgacttcctagaggccaagggatataaggaggtcaagaaggacctgattattaaactgccgaagtactcgctcttcgagctggaaaacggccgcaagaggatgctcgcctccgcaggcgagttgcagaagggcaacgagctcgccctcccgagcaaatacgtcaatttcctgtacctcgctagccactatgaaaagctcaagggcagcccggaggacaacgagcagaagcagctcttcgtggagcagcacaagcattacctggacgagatcatcgagcagatcagcgagttctcgaagcgggtgatcctcgccgacgcgaacctggacaaggtgctgtcggcatataacaagcaccgcgacaaaccaatacgcgagcaggccgaaaatatcatccacctcttcaccctcaccaacctcggcgctccggcagccttcaagtacttcgacaccacgattgaccggaagcggtacacgagcacgaaggaggtgctcgatgcgacgctgatccaccagagcatcacagggctctatgaaacacgcatcgacctgagccagctgggcggagacaagagaccacgggaccgccacgatggcgagctgggaggccgcaagcgggcaaggtaggtaccgtcatgggtcgtttaagctgccgatgtgcctgcgtcgtctggtgccctctctccatatggaggttgtcaaagtatctgctgttcgtgtcatgagtcgtgtcagtgttggtttaataatggaccggttgtgttgtgtgtgcgtactacccagaactatgacaaatcatgaataagtttgatgtttgaaattaaagcctgtgctcattatgttctgtctttcagttgtctcctaatatttgcctgcaggtactggctatctaccgtttcttacttaggaggtgtttgaatgcactaaaactaatagttagtggctaaaattagttaaaacatccaaacaccatagctaatagttgaactattagctatttttggaaaattagttaatagtgaggtagttatttgttagctagctaattcaactaacaatttttagccaactaacaattagtttcagtgcattcaaacacccccttaatgttaacgtggttctatctaccgtctcctaatatatggttgattgttcggtttgttgctatgctattgggttctgattgctgctagttcttgctgaatccagaagttctcgtagtatagctcagattcatattatttatttgagtgataagtgatccaggttattactatgttagctaggttttttttacaaggataaattatctgtgatcataattcttatgaaagctttatgtttcctggaggcagtggcatgcaatgcatgacagcaacttgatcacaccagctgaggtagatacggtaacaaggttcttaaatctgttcaccaaatcattggagaacacacatacacattcttgccagtcttggttagagaaatttcatgacaaaatgccaaagctgtcttgactcttcacttttggccatgagtcgtgacttaacggcaaacgctaattagtcactaggcccaggaaacactaactaagccctagcttatcctagcgcaacctagttaggtcttccccaagtttgtacaaaaaagcaggctggatcggccagaatggccccggaccggagctttgagagtacaatgatgaacctagattaatcaatgccaaagtctgaaaaatgcaccctcagtctatgatccagaaaatcaagattgcttgaggccctgttcggttgttccggattagagccccggattaattcctagccggattacttctctaatttatatagattttgatgagctggaatgaatcctggcttattccggtacaaccgaacaggccctgaaggataccagtaatcgctgagctaaattggcatgctgtcagagtgtcagtattgcagcaaggtagtgagataaccggcatcatggtgccagtttgatggcaccattagggttagagatggtggccatgggcgcatgtcctggccaactttgtatgatatatggcagggtgaataggaaagtaaaattgtattgtaaaaagggatttcttctgtttgttagcgcatgtacaaggaatgcaagttttgagcgagggggcatcaaagatctggctgtgtttccagctgtttttgttagccccatcgaatccttgacataatgatcccgcttaaataagcaacctcgcttgtatagttccttgtgctctaacacacgatgatgataagtcgtaaaatagtggtgtccaaagaatttccaggcccagttgtaaaagctaaaatgctattcgaatttctactagcagtaagtcgtgtttagaaattatttttttatataccttttttccttctatgtacagtaggacacagtgtcagcgccgcgttgacggagaatatttgcaaaaaagtaaaagagaaagtcatagcggcgtatgtgccaaaaacttcgtcacagagagggccataagaaacatggcccacggcccaatacgaagcaccgcgacgaagcccaaacagcagtccgtaggtggagcaaagcgctgggtaatacgcaaacgttttgtcccaccttgactaatcacaagagtggagcgtaccttataaaccgagccgcaagcaccgaattgcataatgaggatcgaggatggttttagagctagaaatagcaagttaaaataaggctagtccgttatcaacttgaaaaagtggcaccgagtcggtgctttttttttgcggccgcgtctaaaaacggcccctaactaacgcttagttgcccgctagattagtcccccgttagtgcctagttagacacacgacgaactaggggctagaattcctgcaaattgggttagcaaaacaaatctagtctaggtgtgttttgcgatccgatcgatggggatttatccccgtggggaacggggatggggaagaaatgtctctcgcaagagttcgtgggaatccccgcgggaaatttttttgtcgcggggacggatacggggagccaaagggtgccatccctaacaccgacaccgggcctgacgctgtcgccgcagctgctcatcttgtggttgtgggctgtgcccggtttccctgttgcggattgcgggtggcagcctggcaggtgggtgcgacccgtttggattcccttgtctgggccccttgtgtcagtaccgtctgtactccgatgacatgcaccgtcgtccacagtcaagtccaaaatctcccctctttttttaacggaacagttcaaaacctccttgacgcacgctgtcgtgtaccagcactcggtggacaccacgtttgtaatccaggccgacacgtcggtcccacgtcgacaggccccaccgtccggtctgtagcgtgtacgtattcgggcgacggacgtgtcgtcgtcgtcttgcgagtcccattcccatcaccatctgagccacacatcctctgaacaaaagcagggaggcctccacgcacatccccctttctcccactccgtgtccgtggcacccaccccaaaccctcgcgccgcctccgagacagccgccgcaaccatggccaccgccgccgccgcgtctaccgcgctcactggcgccactaccgctgcgcccaaggcgaggcgccgggcgcacctcctggccacccgccgcgccctcgccgcgcccatcaggtgctcagcggcgtcacccgccatgccgatggctcccccggccaccccgctccggccgtggggccccaccgagccccgcaagggtgctgacatcctcgtcgagtccctcgagcgctgcggcgtccgcgacgtcttcgcctaccccggcggcgcgtcgatggagatccaccaggcactcacccgctcccccgtcatcgccaaccacctcttccgccacgagcaaggggaggcctttgccgcctccggctacgcgcgctcctcgggccgcgtcggcgtctgcatcgccacctccggccccggcgccaccaacctagtctccgcgctcgccgacgcgctgctcgattccgtcccgatggtcgccatcacgggacaggtggcgcgacgcatgattggcaccgacgccttccaggagacgcccatcgtcgaggtcacgcgctccatcaccaagcacaactacctggtcctcgacgtcgacgacatcccccgcgtcgtgcaggaggctttcttcctcgcctcctctggtcgaccagggccggtgcttgtcgacatccccaaggacatccagcagcagatggcggtgcctgtctgggacaagcccatgagtctgcctgggtacattgcgcgccttcccaagccccctgcgactgagttgcttgagcaggtgctgcgtcttgttggtgaatcgcggcgccctgttctttatgtgggcggtggctgcgcagcatctggtgaggagttgcgacgctttgtggagctgactggaatcccggtcacaactactcttatgggcctcggcaacttccccagcgacgacccactgtctctgcgcatgctaggtatgcatgggacggtgtatgcaaattatgcagtggataaggccgatctgttgcttgcacttggtgtgcggtttgatgatcgcgtgacagggaagattgaggcttttgcaagcagggctaagattgtgcacgttgatattgatccggctgagattggcaagaacaagcagccacatgtgtccatctgtgcagatgttaagcttgctttgcagggcatgaatgctcttcttgaaggaagcacatcaaagaagagctttgactttggctcatggaacgatgagttggatcagcagaagagggaattcccccttgggtataaaacatctaatgaggagatccagccacaatatgctattcaggttcttgatgagctgacgaaaggcgaggccatcatcggcacaggtgttgggcagcaccagatgtgggcggcacagtactacacttacaagcggccaaggcagtggttgtcttcagctggtcttggggctatgggatttggtttgccggctgctgctggtgcttctgtggcaaacccaggtgtcactgttgttgacatcgatggagatggtagctttctcatgaacgttcaggagctagctatgatccgaattgagaacctcccagtgaaggtctttgtgctaaacaaccagcacctggggatggtggtgcagttggaggacaggttctataaggccaacagagcgcacacatacttgggaaacccagagaatgaaagtgagatatatccagatttcgtgacgatcgccaaagggttcaacattccagccgtccgtgtgacaaagaagaacgaagtccgcgcagcgataaagaagatgctcgagactccagggccgtacctcttggatataatcgtcccacaccaggagcatgtgttgcctatgatccctagtggtggggctttcaaggatatgatcctggatggtgatggcaggactgtgtactgacttcgaataggtacccggggatcctctagtgccgtgggtcgtttaagctgccgctgtacctgtgtcgtctggtgccttctggtgtacctgggaggttgtcgtctatcaagtatctgtggttggtgtcatgagtcagtgagtcccaatactgttcgtgtcctgtgtgcattatacccaaaactgttatgggcaaatcatgaataagcttgatgttcgaacttaaaagtctctgctcaatatggtattatggttgtttttgttcgtctcctaatatttgcctgggatcaaattttattggctggtgttcatttgacctccatgttcttgctaggctccattttttactctacagccataatatgtttgattgtttggtttgttctttgttgtacacctggttctgtcgagcttagttttcgacactggcttacagcttaacatgttgctattttattgggttctgattgctattttattgggttctgattgctagtttttgctgaatccaaaaaccatgttatttatttaagcgatccaggttattattatgatggtggctaagtttttttttttccaagggtaaattttctggattctccagtgtttctgtggccgaattcaatcactagagtcgacctgcagtcacccggtccgggcctagaaggccacccggggtcggaggagactagccgttagttagtgcagaccgtctctaatcagtgactagcgacgtcccgacccacccagctttcttgtacaaagtggccgttaacggatcggccagaatggcccggaccgggttaccccggaatcggacctcgggacgtcgccaaagttagctaggtgtccttagcgtttcttaggttctaggcgttaggggtcaataggttagcctagaagtcccgcactaacagcctagcttaacagttccaagctaagccactagactagccctatccgactaacctagtctaagccgaacggggatctaatctaagctaggcacccattagactagttcactagcgcgaccgcactaaactaggctaaaggttaatagcaactagttagctaggggacgttagctgcccaagcttggttaccgcataatgaggatcgaggatgaggagcatgcacggatagatggcgtctagcatatcgataggacatgacaagtggtacgatccccgtcacatgtccatggaggcatctgatatggacacggcgtgtatctatcgcggctggaacagaaccagcgctcgcgcggcggtcggcgggagggacagaccttggctccgtgcgttcaggttgtgcttgtgccgcgcgccacgcacggtctccgccgcctgcagctgaaattttagatttacatcctatccctttattttttttatttgtcacaattcagttcaaaaatgaagaacggaggtagtgcatcctttgtgagactaatgaaaatcacatctggatcctgaaatcggcgtcgtaacctacaaggccacggactggattagatagtggtccatggtgcataatgaggatcgaggggtaccagtctaattacaaaactaattgcacaaccgctaagctgaatcgcgagatggatctattaaccttaattagtccatgatttgacaatgtggtgctacaataaccatttgctaatgatggattacttaggtttaatagattcgtctcgtgatttagcctatgggttctgctattaattttgtaattagctcatatttagttcttataattagtatccgaacatccaatgtgacatgctaaagtttaaccctggtatccaaatgaagtcttatgagagtttcatcactccggtggtatatgtacttaggctccgttttcttccaccgacttatttttagcacccgtcacattgaatgtttagatactaattagaagtattaaacgtagactatttacaaaatccattacataagacgaatctaaacggcgagacgaatctattaaacctaattagtccatgatttgacaatgtgttgctacagtaaacatttgctaatgatggattaattaggcttaatagattcgtctcgccgtttagcctccacttatgtaatgggttttctaaacaatctacgtttaatactcctaattagtatctaaatattcaatgtgacacgtgctaaaaataagtcagtggaaggaagagaacgtccccttagttttccatcttattaattgtacgatgaaactgtgcagccagatgattgacaatcgcaatacttcaactagtgggccatgcacatcagcgacgtgtaacgtcgtgagttgctgttcccgtagagaaatatcaactggtgggccacgcacatcagcgtcgtgtaacgtggacggaggagccccgtgacggcgtcgacatcgaacggccaccaaccacggaaccacccgtccccacctctcggaagctccgctccacggcgtcgacatctaacggctaccagcaggcgtacgggttggagtggactccttgcctctttgcgctggcggcttccggaaattgcgtggcggagacgaggcgggctcgtctcacacggcacggaagacgtcacgggttccttccccacctctcctcttccccaccgccataaatagccgaccccctcgcctttctccccaatctcatctcgtctcgtgttgttcggagcacaccacccgccccaaatcgttcttcccgcaagcctcggcgatccttcacccgcttcaaggtacggcgatcgtcttcctcctctagatcggcgtgatctgcaagtagttgatttggtagatggttaggatctgtgcactgaagaaatcatgttagatccgcgatgtttctgttcgtagatggctgggaggtggaatttttgtgtagatctgatatgttctcctgtttatcttgtcacgctcctgcgatttgtggggattttaggtcgttgatctgggaatcgtggggttgcttctaggctgttcgtagatgaggtcgttctcacggtttactggatcattgcctagtagatcagctcgggctttcgtctttgtatatggtgcccatacttgcatctatgatctggttccgtggtgttacctaggtttctgcgcctgattcgtccgatcgattttgttagcatgtggtaaacgtttggtcatggtctgatttagattagagtcgaataggatgatctcgatctagctcttgggattaatatgcatgtgtcaccaatctgttccgtggttaagatgatgaatctatgcttagttaatgggtgtagatatatatgctgctgttcctcaatgatgccgtagcttttacctgagcagcatggttcctcctgttacttaggtagatgcacatgcttatagatcaagatatgtactgctactgttggaattgtttagtatacctgatgatcatccatgctcttgttacttgttttggtatacttggatgatggcatgctgctgctttttgttgatttgagcccatccatatctgcatatgtcacatgattaagatgattacgctgtttctgtatgatgccatagcttttatgtgagcaacatgcatcctcctggttatatgcattaatagatggaagatatctattgctacaatttgatgattattttgtacatacgatgatcaagcatgctcttcatactttgttgatatacttggataatgaaatgctgctgcacgttcattctatagcactaatgatgtgatgaacacgcacgacctgtttgtggcatctgtttgaatgtgttgttgctgttcactagagactgttttattaacctactgctagatacttacccttctgtctgtttattcttttgcaggtcgaccgccggggatccatggttgaacaagatggattgcacgcaggttctccggccgcttgggtggagaggctattcggctatgactgggcacaacagacaatcggctgctctgatgccgccgtgttccggctgtcagcgcaggggcgcccggttctttttgtcaagaccgacctgtccggtgccctgaatgaactgcaggacgaggcagcgcggctatcgtggctggccacgacgggcgttccttgcgcagctgtgctcgacgttgtcactgaagcgggaagggactggctgctattgggcgaagtgccggggcaggatctcctgtcatctcaccttgctcctgccgagaaagtatccatcatggctgatgcaatgcggcggctgcatacgcttgatccggctacctgcccattcgaccaccaagcgaaacatcgcatcgagcgagcacgtactcggatggaagccggtcttgtcgatcaggatgatctggacgaagagcatcaggggctcgcgccagccgaactgttcgccaggctcaaggcgcgcatgcccgacggcgatgatctcgtcgtgacccatggcgatgcctgcttgccgaatatcatggtggaaaatggccgcttttctggattcatcgactgtggccggctgggtgtggcggaccgctatcaggacatagcgttggctacccgtgatattgctgaagagcttggcggcgaatgggctgaccgcttcctcgtgctttacggtatcgccgctcccgattcgcagcgcatcgccttctatcgccttcttgacgagttcttctgagcccatcggtcatggatgcttctactgtacctgggtcgtctggtctctgcctgtgtcacctttgaagtacctgtgtcgggattgtgtttggtctagaactgcagtttgtctttgatgttcttttgtctggtcttatgaactggttgtatctgtatgtttactgtaaactgttgttgcggtgcagcagtatggcatccgaatgaataaatgatgtttggacttaaatctgtactctgtttgttttcggttatgccagttctatattgcctgagatcagaatgtttagcttttgagttctgtttggcttgtggtcgactcctgtttcttacttgaggcgtaactctgttctggcaaactcaaatgtctaactgaatgttttaggacttaattgttggacagattaacgtgtttggtttgtttctagattgtgattcggaaggcttgttagttgtggaatcaaggagagcagctaggtctgtgcagaacgttattttggatttaagccttctcagattatgccattactctaaacctaatgatatcatatttcactcggggatgttggagtagtcttttctttctcctgcagacaaaatgattttgctttcgtgtgtgtacatgattttgtgcaactgttgcaacaactgaagtagacaagttttgacctcaccagaagaatgaaaaagattttggaatttgttacatcgacaaaccattgtaacttggcccatcagaatgcacagagaagcggctacaaattgacatgcgttgcaaactttgcaatagttgatgcacatgtttgccattgcctgccagtcttaggaaaagtgtgtggttcgagaaatctaagcatatgtgctctgctcacattgcgtggaacccacacagctttgtcacactcttgtccactccagaagtcattcctggcgctgtttacccctggtaaagagtaaccgaaaacttctcaaggctgtacccaaaactggaaggaaatttggaggcggccgcatgaggagcaatcattgttcaagacatgatgcaaagctagaaaactttgattgtggccgtccttgtgaagtttaggccggggggaacttcatgaaccctatcgaagcttaattagttcttttttgttgttagccatgtttgtattgtagttaaggtgaacaacatgacgccgcacccgcgatctcagggctcgtccccacacaggagggcacgtcgtcgtcttcgccgccgagcatcagagattcagagcacatacacgcacatctcaagcaaacggagtagtacgtcctactcctacgtacatacctagccgacgacctttatgtgcacaccaccactgctctgctgcccggcctctccgtcgtccgttcatcaccagcataatgaggatcgaggatgaggggcgcgccgacgtcccgaggtccgattccgggctaattaacacctagctcgccactcgactaattagggactaagcctagcgcttagccgttaaaacctagcacaccctaagcacccttagttaggttcccctcttaattaagccctagtgagcccctaagttaaggggacgctaagagccccctaacctagtattcggctagaggcgaactaggctaaacacctaagcgcacctctttaagctagatcgctagggggctaggctagagcttcgctagattagtctaagggcagcctgcagggccctcttgtcggaccagttgcccaccacgttggtgaggggcaactttattatacaaagttgatagatcctcatgtcttcctgcccttaaggccaattgttcaagattcattcaacaattgaaacatctcccatgattaaatcagtataaggttgctatggtcttgcttgacaaagtttttttttgagggaatttcaactaaatttttgagtgaaactatcaaatactgattttaaaaaatttttataaaaggaagcgcagagataaaaggccatctatgctacaaaagtacccaaaaatgtaatcctaaagtatgaattgcattttttttttgtttggacgaaaggaaaggagtattaccacaagaatgatatcatcttcatatttagatcttttttgggtaaagcttgagattctctaaatatagagaaatcagaagaaaaaaaaaccgtgttttggtggttttgatttctagcctccacaataactttgacggcgtcgacaagtctaacggacaccaagcagcgaaccaccagcgccgagccaagcgaagcagacggccgagacgttgacaccttcggcgcggcatctctcgagagttccgctccggcgctccacctccaccgctggcggtttcttattccgttccgttccgcctcctgctctgctcctctccacaccacacggcacgaaaccgttacggcaccggcagcacccagcacgggagaggggattcctttcccaccgttccttccctttccgccccgccgctataaatagccagccccatccccagcttttttccccaatctcatctcctctctcctgttgttcggagcacacgcacaatccgatcgatccccaaatccccttcgtctctcctcgcgagcctcgtggatcccagcttcaaggtacggcgatcgatcatcccccctccttctctctaccttcttttctctagactacatcggatggcgatccatggttagggcctgctagtttcccttcctgttttgtcgatggctgcgaggcacaatagatctgatggcgttatgacggctaacttgtcatgttgttgcgatttatagtccctttaggagatcagtttaatttctcggatggttcgagatcggtggtccatggttagtaccctaagatccgcgctgttagggttcgtagatggaggcgacctgttctgattgttaacttgtcagtacctgggaaatcctgggatggttctagctcgtccgcagatgagatcgatttcatgatcctctgtatcttgtttcgttgcctaggttccgtctaatctatccgtggtatgatgtagatgttttgatcgtgctaactacgtcttgtaaagttaattgtcaggtcataatttttagcatgcctttttttttgtttggttttgtctaattgggctgtcgttctagatcagagtagaagactgttccaaactacctgctggatttattgaacttggatctgtatgtgtgtcacatatcttcataaattcatgattaagatggattgaaatatcttttatctttttggtatggatagttctatatgttggtgtggctttgttagatgtatacatgcttagatacatgaagcaacgtgctgctactgtttagtaattgctgttcatttgtctaataaacagataaggatatgtatttatgttgctgttggttttgctggtactttgttggatacaaatgcttcaatacagaaaacagcatgctgctacgatttaccatttatctaatcttatcatatgtctaatctaataaacaaacatgcttttaaattatcttcatatgcttggatgatggcatacacagcggctatgtgtggttttttaaatacccagcatcatgggcatgcatgacactgctttaatatgctttttatttgcttgagactgtttcttttgtttatactgaccctttagttcggtgactcttctgcaggtcgactttaacttagcctaggatccatggcccagtccaagcacggcctgaccaaggagatgaccatgaagtaccgcatggagggctgcgtggacggccacaagttcgtgatcaccggcgagggcatcggctaccccttcaagggcaagcaggccatcaacctgtgcgtggtggagggcggccccttgcccttcgccgaggacatcttgtccgccgccttcatgtacggcaaccgcgtgttcaccgagtacccccaggacatcgtcgactacttcaagaactcctgccccgccggctacacctgggaccgctccttcctgttcgaggacggcgccgtgtgcatctgcaacgccgacatcaccgtgagcgtggaggagaactgcatgtaccacgagtccaagttctacggcgtgaacttccccgccgacggccccgtgatgaagaagatgaccgacaactgggagccctcctgcgagaagatcatccccgtgcccaagcagggcatcttgaagggcgacgtgagcatgtacctgctgctgaaggacggtggccgcttgcgctgccagttcgacaccgtgtacaaggccaagtccgtgccccgcaagatgcccgactggcacttcatccagcacaagctgacccgcgaggaccgcagcgacgccaagaaccagaagtggcacctgaccgagcacgccatcgcctccggctccgccttgccctccggactcagatctcgatagggtaccaatggccagttaacagatccagctgctgctgttctagggttcacaagtctgcctatttgtcttccccaatggagctatggttgtctggtctggtccttggtcgtgtcccgtttcattgtgtactatttacctgtaatgtgtatccttaagtctggtttgatggtgtctgaaacgttttgctgtggtagagcagcatggaagaactataatgaataagtgatccctaatcattgtgtccaaattttgcttctgctatacccttttgtgctgtttcttatgttttgcttaaaaatttgatctgacaaacaaatttgtctaaattatgctcttgttctgactgtgtactgtacacatttgtattgctaccggtttggcacatagttttctctttgattgcagatcaaacccttctgattgcagattgcttggctatggctgatgtgctcactgttcttctttagcttgtatattgctgatggtggcttggctacggctgaaaaagttgctgctgcgccgacttggcaactgttgctccagtaatgctttgtcctctcttcctagccgccgacttggcacttggcagctgttgctcctgtaatgcgttgttatctcttatctcttgagatgtactatgattttgaggctgtttgacttgtgccagattgccagtgctgatgctatattatctcaggtttttatgctagtatatgttttactgtgtgctgcctgtgtcgagttacgtaatctattgaaccgctatgcgtgttgatgccctgttgttgcttgccagattgatgcccctgttgcttgcagcttgcaagctgtagtgaaatcctaaaattcgaaaccaaatctattctgaacttttgaagatctgtgatgtccggaagaaaagattcaaacagataaacgggactctccagaatctataaaataaatgatcgacaaacgctttgctttggtaggcttcctagttagttagcggaccgaagcttcggttgtttctgtggccgaattcaatcactagagtcgacctgcatgattccgatgacttcgtaggttcctagctcaagccgctcgtgtccaagcgtcacttacgattagctaatgattacggcatctaggaccgactagctagctagctaagagctcggtaccgagctcgaattcattccgattaatcgtggcctcttgctcttcaggatgaagagctatgtttaaacgtgcaagcgctactagacaattcagtacattaaaaacgtccgcaatgtgttattaagttgtctaagcgtcaatttgtttacaccacaatatatcctgcca

SEQ ID NO: 237 - DNA, 18676 bp, synthetic construct
  misc_feature 1..18676: note = PHP70298
  source 1..18676: mol_type = other DNA
atgttacgcagcagcaacgatgttacgcagcagggcagtcgccctaaaacaaagttaggtggctcaagtatgggcatcattcgcacatgtaggctcggccctgaccaagtcaaatccatgcgggctgctcttgatcttttcggtcgtgagttcggagacgtagccacctactcccaacatcagccggactccgattacctcgggaacttgctccgtagtaagacattcatcgcgcttgctgccttcgaccaagaagcggttgttggcgctctcgcggcttacgttctgcccaagtttgagcagccgcgtagtgagatctatatctatgatctcgcagtctccggcgagcaccggaggcagggcattgccaccgcgctcatcaatctcctcaagcatgaggccaacgcgcttggtgcttatgtgatctacgtgcaagcagattacggtgacgatcccgcagtggctctctatacaaagttgggcatacgggaagaagtgatgcactttgatatcgacccaagtaccgccacctaataatgtctaacaattcgttcaagccgacgccgcttcgcggcgcggcttaactcaagcgttagatgcactatacgtaccaatccaaatcggatccccctgcagggctgagataggtgcctcactgattaagcattggtaactgtcagaccaagtttactcatatatactttagattgatttaaaacttcatttttaatttaaaaggatctaggtgaagatcctttttgataatctcatgaccaaaatcccttaacgtgagttttcgttccactgagcgtcagaccccgtagaaaagatcaaaggatcttcttgagatcctttttttctgcgcgtaatctgctgcttgcaaacaaaaaaaccaccgctaccagcggtggtttgtttgccggatcaagagctaccaactctttttccgaaggtaactggcttcagcagagcgcagataccaaatactgtccttctagtgtagccgtagttaggccaccacttcaagaactctgtagcaccgcctacatacctcgctctgctaatcctgttaccagtggctgctgccagtggcgataagtcgtgtcttaccgggttggactcaagacgatagttaccggataaggcgcagcggtcgggctgaacggggggttcgtgcacacagcccagcttggagcgaacgacctacaccgaactgagatacctacagcgtgagctatgagaaagcgccacgcttcccgaagggagaaaggcggacaggtatccggtaagcggcagggtcggaacaggagagcgcacgagggagcttccagggggaaacgcctggtatctttatagtcctgtcgggtttcgccacctctgacttgagcgtcgatttttgtgatgctcgtcaggggggcggagcctatggaaaaacgccagcaacgcggcctttttacggttcctggccttttgctggccttttgctcacatgttctttcctgcgttatcccctgattctgtggataaccgtattaccgcctttgagtgagctgataccgctcgccgcagccgaacgaccgagcgcagcgagtcagtgagcgaggaagcggaagagcgcctgatgcggtattttctccttacgcatctgtgcggtatttcacaccgcatatggtgcactctcagtacaatctgctctgatgccgcatagttaagccagtatacactccgctatcgctacgtgactgggtcatggctgcgccccgacacccgccaacacccgctgacgcgccctgacgggcttgtctgctcccggcatccgcttacagacaagctgtgaccgtctccgggagctgcatgtgtcagaggttttcaccgtcatcaccgaaacgcgcgaggcagcagatctatcgatggtacctatctgcagacggaagggattcctgttaattaaaacagcttgcgtcatgcggtcgctgcgtatatgatgcgatgagtaaataaacaaatacgcaaggggaacgcatgaaggttatcgctgtacttaaccagaaaggcgggtcaggcaagacgaccatcgcaacccatctagcccgcgccctgcaactcgccggggccgatgttctgttagtcgattccgatccccagggcagtgcccgcgattgggcggccgtgcgggaagatcaaccgctaaccgttgtcggcatcgaccgcccgacgattgaccgcgacgtgaaggccatcggccggcgcgacttcgtagtgatcgacggagcgccccaggcggcggacttggctgtgtccgcgatcaaggcagccgacttcgtgctgattccggtgcagccaagcccttacgacatatgggccaccgccgacctggtggagctggttaagcagcgcattgaggtcacggatggaaggctacaagcggcctttgtcgtgtcgcgggcgatcaaaggcacgcgcatcggcggtgaggttgccgaggcgctggccgggtacgagctgcccattcttgagtcccgtatcacgcagcgcgtgagctacccaggcactgccgccgccggcacaaccgttcttgaatcagaacccgagggcgacgctgcccgcgaggtccaggcgctggccgctgaaattaaatcaaaactcatttgagttaatgaggtaaagagaaaatgagcaaaagcacaaacacgctaagtgccggccgtccgagcgcacgcagcagcaaggctgcaacgttggccagcctcgcagacacgccagccatgaagcgggtcaactttcagttgccggcggaggatcacaccaagctgaagatgtacgcggtacgccaaggcaagaccattaccgagctgctatctgaatacatcgcgcagctaccagagtaaatgagcaaatgaataaatgagtagatgaattttagcggctaaaggaggcggcatggaaaatcaagaacaaccaggcaccgacgccgtggaatgccccatgtgtggaggaacgggcggttggccaggcgtaagcggctgggttgcctgccggccctgcaatggcactggaacccccaagcccgaggaatcggcgtgagcggtcgcaaaccatccggcccggtacaaatcggcgcggcgctgggtgatgacctggtggagaagttgaaggcagcgcaggccgcccagcggcaacgcatcgaggcagaagcacgccccggtgaatcgtggcaagcagccgctgatcgaatccgcaaagaatcccggcaaccgccggcagccggtgcgccgtcgattaggaagccgcccaagggcgacgagcaaccagattttttcgttccgatgctctatgacgtgggcacccgcgatagtcgcagcatcatggacgtggccgttttccgtctgtcgaagcgtgaccgacgagctggcgaggtgatccgctacgagcttccagacgggcacgtagaggtttccgcagggccggcaggcatggccagtgtgtgggattacgacctggtactgatggcggtttcccatctaaccgaatccatgaaccgataccgggaagggaagggagacaagcccggccgcgtgttccgtccacacgttgcggacgtactcaagttctgccggcgagccgatggcggaaagcagaaagacgacctggtagaaacctgcattcggttaaacaccacgcacgttgccatgcagcgtacgaagaaggccaagaacggccgcctggtgacggtatccgagggtgaagccttgattagccgctacaagatcgtaaagagcgaaaccgggcggccggagtacatcgagatcgagctagctgattggatgtaccgcgagatcacagaaggcaagaacccggacgtgctgacggttcaccccgattactttttgatcgatcccggcatcggccgttttctctaccgcctggcacgccgcgccgcaggcaaggcagaagccagatggttgttcaagacgatctacgaacgcagtggcagcgccggagagttcaagaagttctgtttcaccgtgcgcaagctgatcgggtcaaatgacctgccggagtacgatttgaaggaggaggcggggcaggctggcccgatcctagtcatgcgctaccgcaacctgatcgagggcgaagcatccgccggttcctaatgtacggagcagatgctagggcaaattgccctagcaggggaaaaaggtcgaaaaggtctctttcctgtggatagcacgtacattgggaacccaaagccgtacattgggaaccggaacccgtacattgggaacccaaagccgtacattgggaaccggtcacacatgtaagtgactgatataaaagagaaaaaaggcgatttttccgcctaaaactctttaaaacttattaaaactcttaaaacccgcctggcctgtgcataactgtctggccagcgcacagccgaagagctgcaaaaagcgcctacccttcggtcgctgcgctccctacgccccgccgcttcgcgtcggcctatgcatataattgtggtttcaaaatcggctccgtcgatactatgttatacgccaactctgaaaacaactttgaaaaagctgttttctggtatttgacccgcgaggtttctcgcttcaattgaaatcataaagaagcaattgaaaattttcgagtaaccgaccctcccgataatcttcaacataaaacaacgcacttcttccaacgggagaggcggtgttagttgcgagctaaggagataaggtatgcttaagagatcggggtcgctttctcttgccttgatggtctccttctgttcgtcgagccttgccacgccactctcatctgctgagtttgaccatgttgctcgcaagtgtgccccatcagttgcgacatctacgcttgcggcgatagctaaggtggagagtcgctttgatcctttagcgattcatgacaacacgaccggcgaaacgcttcactggcaagatcacagccaagcaacccaagtcgtcaggcaccgtctcgatgcacggcattcgctggatgttggcctcatgcaaataaactctcgaaatttttctatgctcggtctgacacctgacggtgcgctccaggcgtgcacatcattatctgccgctgcaaacatgctgaaaagtcgttatgcaggcggcgaaacgattgacgagaagcaatttgcgcttcgtcgggcgatctccgcttacaacaccggtaatttcatcggcggttttgcaaacggctacgtgcgaaaagttgaaacagctgctcaatcgctggtgcccgcgttaatcgagcctccaaaagacgatcacgaggcgctaaaatccgaagagacgtgggatgtttgggggtcatatcagcgccgctcgcaggaggatggcgctggcggtttaatcgctccgccaccgccacaccaggacaacggcaaatccgcagacgacaatcaagtcttattcgacttatactaaggaggtgcgcattgatgcgatgctttgagagataccgtttacatctaaatcgcctctcgctctcgaatgcgatgatgcgcgtgatatcgagctgcgccccaagcttgtgcggtgcaattgcatggagcatttcctcatccggacccgccgcagcgcaatctgcgggtggcggcactgaccccgccacaatggttaacaatatatgcacgtttatccttggtccgttcggccagtcactcgctgttctcggcattgtcgctatcgggatctcctggatgttcgggcgggcttcgcttgggctggttgccggcgtcgtcggcggcattgttatcatgtttggggcgagcttcctcggccaaacgctcactggcggtagttgatggctgatcgtttggaagaatcgaccctttacctcgcagccacacggcccgcattgtttcttggggtgccactgacattggcagggttattcatgatgttcgccggctttgtcatcgttatcgttcagaacccgctctacgaagtcgttctcgtgccgttatggtttgcagcccggctcatcgtggagcgagactacaatgcggcgagcgtcgtcctgctatttttgcggaccgcgggaagaagcattgatagtgcagtttgggggggcgctactgttagcccaaatccaattagggttcccccacgagggagaggaatggtgtgatgctcggcgcgagtggaacgaccgaaagatccggtgagatctatctcccttatattggccacctcagcgaccatatcgtccttcttgaagacggatcgatcatgaccattgcgagaattgatggcgttgcattcgagcttgaggaaactgaaatgcgcaatgcgcgttgtcgtgcgttcaacacgctgttgcgcaatatcgctgatgatcatgtgtcaatatatgctcacctcgtacgtcatgccgacgtgccatcatcggcgccgcgacacttccgtagtgttttcgccgctagcctgaacgaagcttttgaacagcgcgtgctctccggccaactcctccgcaatgaacacttccttacgttgattgtctacccacaggcggctttagggaaggtaaagaggaggttcaccaagctaagcggaaaaagggaaaacgatctcacgggccagatcaggaacatggaagatctttggcatgttgtcgctggctctcttaaagcgtatggcctgcatcgtcttggcatccgcgagaagcagggtgtgctcttcaccgaaattggcgaagcgctacggttgatcatgactggtcggttcacaccggttccggtcgtcagcggctcactcggcgcttcgatttataccgacagagtcatttgcggcaagcgaggactcgagatcagaacgccaaaagacagttacgttggatccatctattcgtttcgcgaataccctgcaaaaacacggccgggcatgctcaacgcgctgctatccctcgattttccacttgttctcacgcagagtttttcgttcctgactcgcccgcaagcgcacgcgaaacttagcctcaaatcgagccagatgctgagttccggcgataaagccgtgactcaaatcggcaaattatccgaggctgaggacgcacttgcgagcaacgaattcgttatgggctcacatcatttgagcctttgcgtctatgcagacgatctcaatagtcttggggacaggggcgcgcgggctcggacacgaatggcggatgcaggtgccgtggttgtccaagaaggtattggtatggaagcggcctattggtcccaattgccggggaattttaagtggcgcacacgccctggcgcaatcacttcacgcaatttcgcagggtttgtctctttcgaaaactttccagagggcgccagctcaggccactggggcaacgcgattgcccgatttcgtaccaatggcggaacgcctttcgactatatcccgcatgagcacgatgttggcatgacggcaatattcgggcctatcgggaggggtaagacgacgctcatgatgtttgttctagccatgctcgaacagagcatggtcgaccgtgcaggtacggtcgtgttctttgacaaggaccggggtggcgaattgctggttcgcgccacaggaggaacatatttggcacttcacagaggcacacccagcgggttggcgccgttgcgtggcctagaaaacacagcagcctcacacgattttctgcgcgaatggatcgtggctctcatcgagagtgatggtcggggtgggatttctccggaagagaaccgccgtctggtccgtggtatccatcgtcagctctcgtttgatccacaaatgcgttcaatcgcggggttacgtgaatttttgttgcatgggcccgccgaaggcgcaggagcgcggctccaacgctggtgccggggccatgcgcttggctgggcatttgacggcgaagttgacgaagtaaagttagatccgtcgattaccggcttcgacatgacgcatcttctcgaatacgaggaagtatgcgctcccgctgcagcatatctcctgcatcggattggagccatgatcgacggccgccgttttgtgatgagctgcgatgagtttcgcgcctatttgttaaaccctaaattttcgactgtcgtcgacaaattcctcctgaccgttcgaaaaaacaacgggatgctaatactggcaacgcagcaaccagagcatgttctggaatcgccgctaggagccagcttggttgcgcaatgtatgacgaagattttctatccatcaccaaccgcagatcgatcggcttatgtcgatggactgaaatgtaccgaaaaggaatttcaggcgatccgtgaagacatgacggtcggcagccgtaagtttcttcttaaacgagaaagtggaagcgtcatctgcgaatttgatctgcgggatatgcgtgaatatgtcgccgtgctttcggggcgtgccaacacggtgcgctttgcaactcgactacgcgaggcacaagaaggcaactcatctggctggctcagcgaattcatggcccgtcaccacgaggcagaagattgataaggtaggaaacgatgaagacgacgcaacttattgcaacagttttgacctgcagctttctatatattcagcccgcgcgggcgcagtttgttgttagcgacccggcaacggaggctgagacgctcgcgactgcgctcgcgactgcggagaatctcactcagactatagcgatggttacgatgttgacgtcggcctacggcgttactggactactgacttcgctcaaccagaaaaatcagtatccttcgacgaaggacctagacaatgaaatgttttcgccgcgaatgccaatgtcgaccacggcacgtgcgatcaccagcgatacagatcgtgcagtcgtgggtagtgatgctgaagcggacctgttgcgatcgcagatcaccggttccgcaaacagcgctggcattgcggctgacaatctggaaacgatggacaaacgcttgacggcgaatgctgatacgtctgctcagctttcccgatctcgcaatatcatgcaggcaaccgtgaccaatggtttgcttctcaagcagatccatgacgcaatgattcaaaatgtacaggcgacaagcctattaacgatgactaccgcgcaggccggccttcacgaggcggaagaggcggccgctcaacgcaaggagcatcaaaagaccgctgtcatctttggtgccctcccctaaggctgggcgatttgttcatccgcccgcatcctcgccgaatgcgagctcattttatccaacattatgcgacaaaccagtcaagttcaggtccaatcgatgaatttcacgattccggcgccgtttacggccattcatacgatcttcgatgtagccttcacgacaggcttggactcgatgcttgagactatccaggaggcggtgagtgcgccattgatcgcctgtgtcactctttggattattgttcagggtattttagtcatacgcggcgaagtcgatacccgtagcggtatcactcgggtgatcacggtcaccatcgttgttgctctaattgttgggcaggctaactaccaagactatgtggtttccatcttcgaaaagacggtcccaaactttgttcagcagtttagtgtaaccggcttgcctctgcagactgttccggcacagttggatacaatgttcgccgtgacccaggccgtttttcagaaaatcgcatccgaaatcggtccgatgaacgaccaggacatccttgctttccaaggggcacagtgggtcctttacggcacgctctggtctgccttcggagtttacgacgccgttggaattctcacgaaagtgcttctcgcgatcgggcctctgatcctcgtcggatatatttttgatcgcacgcgggacatcgcagctaagtggatcgggcaacttatcacctacggtctcttgcttctcctcttaaacctcgtggcaacgatcgtcatcctaaccgaagcgactgcgctcacccttatgcttggtgtaatcaccttcgccggtacgaccgcggccaagatcattggtctttacgaactcgatatgttttttctgacaggggatgcgctcattgtcgctttgccggcgatcgccggcaacattggaggcagttactggagcggcgcaacccaatctgccagcagcttgtaccgtcgcttcgctcaggttgagcgaggctaggtcgcgcaaaaattcgcctcaatggagaattctatgaagtattgcctgctgtgcctagttgtcgctttgagcggctgccagacaaacgacacattagcgagctgcaaaggcccgatcttcccgctgaatgtggggcgatggcagcctactccgtcagatcttcagctcggcaattcgggtggacgctatgacggggcctgaatatgccatgctagtggcgcgcgaaagccttgccgagcactataaggaagtagaagcctttcaaaccgcgcgagcgaaatcggcgcgacgtctctccaaactcattgcagctgtcgcagctatcgcgattttgggaaatgttgctcaagcgttcgctatagccacaatggtgccgttgagcaggcttgtgcccgtatatctatggatacggccggacggcaccgttgacagcgaggtgtctgtctcgcgattgcctgcaactcaagaggaggccgtcgttaacgcctcattgtgggagtacgttcgcctgcgcgagagttatgatgccgacaccgctcagtacgcctacgacctggtatcgaacttcagtgccccaacagtgcgccaggattaccagcaattcttcaactatcccaatcccagttcgcctcaagtcattcttggcaaacgcggcagggtggaggtcgagcacatcgcttcaaatgatgtaactccaagcacgcagcaaattcgctataaaaggaccctcgtcgttgacggcaaaatgcctgtggtgagtacgtggaccgcgacagttcgctacgaaaaggtgaccagcttgcccggcagattgagactaaccaacccggcaggtctggttgtcacctcctatcagacatcggaagataccgtttcaaacgtaggccacagcgaaccatgatcagaaaagcacttttcattttagcatgtttatttgccgctgcgactggtgcggaggctgaagacactccaatggcgggcaagctagatccgcgcatgcgttatttggcttacaatcccgatcaagtggtgcgcctctcgacggcggttggagctactttggtcgtaacattcgccacgaacgaaacggtgacagcggttgccgtttcaaatagcaaagatctagcagccctaccgcggggaaattatctatttttcaaggcaagccaggtcctcacgcctcagccagtaatcgtgctaaccgcaagcgactccgggatgcgccgttatgttttcagtataagttccaagactctgtcccacctcgataaagagcagcccgatctctattacagcgtccaattcgcctaccccgccgacgatgcggcggctcggcgaagggaggcacaacagaaggctgttgtggacagactacacgcggaagcacaatatcaacggaaagctgagaatttattggatcagcctgtcacagcccttggtgcggcggacagtaattggcactacgtcgcccaaggcgatcgttcgctgttgccactcgaagtcttcgacaatggatttacgacggtattccactttccgggcaatgtacgcataccctccatctacaccatcaatcctgatggcaaggaagctgttgccaactattcagttaaagggagcgatgtcgagatttcttcggtttcccgaggttggcgtctgagggatggccacacagtactatgtatctggaacaccgcttacgatcccgttggccaaaggccgcaaacgggcacggtgaggcccgatgtgaaacgcgtcctgaagggggcgaagggatgaataacgatagtcagcaagcggcacatgaggttgatgcatctggatccctggtctccgacaaacatcgccggcgtctttcggggtctcagaaattgatcgtcggaggtgtcgttctcgcgttatcattaagcctcatttggctaggtgggcgccaaaagaaggtgaatgagaacgcatcgccgtcaactttgatcgcaacaaacaccaagccatttcatccagctccgattgaggtgccgccggatcctccagcggttcaagaggctgttcagcctgctgctcctctaccgccgaggggcgaaccggagcggcatgagccacggccggaagaaacaccgatttttgcatatagcagcggcgatcaaggggtcagcaaacgcgccattcagggcgacacgggccgaagacaagaaggcaagcgtgacgacaactccttgccgaatggcgaagtgtccggcgagaacgatttgtcgatacgtatgaaacccaccgagctgcagcccagcagcgccacgctcttgccgcaccccgattttatggtaacgcaagggacaataattccgtgcatcttgcaaaccgcaatcgacacaaatttggcaggctatgtaaagtgtgtcttgcctcaggatattcgtggaacaacgaacaatatcgtgcttcttgatcgtggcaccaccgttgttggcgaaatacagcgtggcttgcaacagggagatgggcgcgtttttgtgttgtgggatcgcgccgagacacctgaccatgcgatgatctcgttaacatcgccaagcgcggacgaactcggtcgctcaggattgccgggctcggtcgacagccacttctggcagcgttttagcggagctatgctcttgagtgttgttcaaggcgccttccaggcagctagcacctacgccggcagctcgggtggcgggatgagcttcaacagctttcaaaataacggtgagcagacaactgagacagcccttaaggcaaccatcaacataccgccaaccctgaagaagaatcagggtgacaccgtttccattttcgtagcacgggacctcgatttctttggtgtttaccagctccgcctgactggcggcgccacgcgggggaggaaccgccgctcttaatgaattcaaatttccgcttagagataggatacattgtaaatggaagtggatccgcaactacgctttcttctgaagccgattttggaatggctcgatgacccgaagactgaagaaattgcgatcaatcgacctggagaggcatttgtgcgccaagccggcatttttaccaagatgcctttgcccgtctcttatgatgatcttgaagatatcgctattttagcgggcgcgctgagaaagcaggatgtcggaccacgtaaccccctctgcgccactgaacttcctggtggtgaacgactacaaatctgtctgccgccgaccgttccctcgggcaccgtcagcttgaccattcgacggccaagctcgcgtgtttctggtcttaaagaagtctcctcccgttatgatgcttcgaggtggaaccagtggcagacacgaaggaaacgccaaaatcaggatgatgaagctatccttcagcattttgacaacggggatttggaagcgtttctgcacgcatgcgtcgtcagccgactgacgatgttgctatgtggccctaccggaagcggcaagacaacaatgagcaagaccttgatcagcgccatccccccccaggaaaggctaatcaccatagaagatacgctcgaactcgtcattccacacgataatcatgttagactactctactccaagaacggtgctgggctgggtgctgtgagcgccgagcacttgctccaagcaagtctgcgtatgcggccggaccggatattgcttggcgagatgcgcgacgatgcagcatgggcttatctgagtgaagtcgtctcgggacatccgggatcgatttcaacaatacacggcgcgaatccaatccaaggattcaagaaactgttttcccttgtcaaaagtagcgcccaaggtgctagcttggaagatcgcacactgattgacatgctctctacggcgatcgatgtcatcattccattccgtgcctatgaggacgtttatgaagtaggcgagatctggctcgcggcggacgcacgacgccggggcgagaccataggcgatctccttaatcaatagtagctgtaacctcgaagcgtttcacttgtaacaacgattgagaacttttgtcataaaattgaaatacttggttcgcattttcgtcatccgcggtcagccgcaattctgacgaactgcccatttagctggagatgattgtacatccttcacgtgaaaatttctcaagcgctgtgaacaagggttcagattttagattgagaggtgagccgttgaaacacgttcttcttatcgatgacgatgtcgctatgcggcatcttattatcgaataccttacgatccacgccttcaaagtgaccgcggtagccgacagcacccagttcactagagtactctcttccgcgacggtcgatgtcgtggttgttgatctaaatttaggtcgtgaagatgggcttgagatcgttcgaaatctggcggcaaagtctgatattccaatcataattatcagtggcgaccgccttgaggagacggataaagttgttgcactcgagctaggagcaagtgattttatcgctaagccgtttagtacgagagagtttcttgcacgcattcgggttgccttgcgcgtgcgccccaacgttgtccgctccaaagaccgacggtctttttgttttactgactggacacttaatctcaggcaacgtcgcttgatgtccgaagctggcggtgaggtgaaacttacggcaggtgagttcaatcttctcctcgcgtttttagagaaaccccgcgacgttctatcgcgcgagcaacttctcattgccagtcgagtacgcgacgaggaggtttacgacaggagtatagatgttctcattttgcggctgcgccgcaaacttgaggcggatccgtcaagccctcaactgataaaaacagcaagaggtgccggttatttctttgacgcggacgtgcaggtttcgcacggggggacgatggcagcctgagccaattgcatttgattaatttaggtgactgaggacgcggccagcggcctcaaacctacactcaatatttggtgaggggttccgataggtccctcttcaccaattgctcgatggcttctctccagcaaagaatgacgcgagcgcggcggtagccagcttgtggccgaaagctcgagcggtctccaaccccaacggatcaaaatgacttcgagcgacctcgagcaacgcaaccgggaacatgcgtgaggtctgaacgagaacggatttttctgtagttgaagggatcggataacttttcggggccacgcgaaatgatccatctgccagcatgctttcgaaatcgtccaacgcgcgccttaaaatcatttgtagcgacttcgagggactgtattgccgaacgaggttgtcatatgttttcgacacttgaggcgcgggcggtcgcgctgaaagaaaaacctggagctttttcggggacggaggtggactaagggcatccacagttagcttaagttgtcgatcgggactgtaaatgtgatcggcgacgagaggctcacgttgctggtctttctcgtcggctttttcaggcaagtgctggaggtccagcttctggggaacaagtgtcgggttgggatggtggatctcgggtcgagcaccagcaagccgccgtgcttcgccgaccgacaatgcgggcttgcgaattgccatcttcaagcctccaagattttgctgatcagtttcgaaatgaccacgacttcctccatcgcaatccgaagattcctctctatgaggcgcatcgtcggatcagttcccgtgtttagtaatgtaagatgcaacatgccgcgttctttcatcgcggcaaatgcatctctttcatgcatgggagacggtacaactggaaggctctctagcgtctctgacatcctgcgttgcgatgttgtcaatcggccgaccgggacgcgttggcgcaaaacagctgtaggaattgccaaattttcactcaacagcagctcgatgacgtagcggtaggtagatagtgcctcatcgatgtcgagcggcgttagcatggtggggatcagaagcaggtttgagctagcgatgattgtgttgttgagctcgctcgagccgccacgcgtatcggccaacgcataatcaaatccttcgagctcggcattttcataggctgcttcaagaaggggcatttcgtcggcggaatagacttcacagcgaggatcccaggtactgctttgtaaggcgttttctctccatcgcgtcagaggccggttttcgtcggcatcaaagagggccactcgtttaccgtcatttgccaaagcagcgcaaaggcccatgagtgcggtggttttgccagcaccccctttgaaagaacaaaacgtcaaaagttgcatattctgatcccgcctatcctgtgaaaccggagtgcatttgtatttttgttcgtataaatgtttttgtgattatcgatgagtaaaagcgttgttacactatttttatttcacattcgttataagacaattgcaaatgtagcaagtatattcagtattgactgtaaatgtactgttgatttcatattgagcagggctagacttccatccgtctacccgggcacatttcgtgctggagtatccagaccttccgctttctttggaggaagctatgtcaaaacacaccagagccacgtcgagtgagactaccatcaaccagcatcgatccctgaaagttgaagggttcaaggtcgtgagtgcccgtctgcgatcggccgagtatgaaaccttttcctatcaagcgcgcctgctgggactttcggatagtatggcaattcgcgttgcggtgcgccgcatcgggggctttctcgaaatagatgcagacacacgagaaaagatggaagccatacttcagtccatcggaatactctcaagcaatgtatccatgcttctatctgcctacgccgaagaccctcgatcggatctggaggctgtgcgagatgaacgtattgcttttggcgaggctttcgccgccctcgatggactactgcgctccattttgtccgtatcccggcgacggatcgacggtcgctcgttactgaaaggtgccttgtagcacttgaccacgcacctgacgggagaaaattggatgcccgatcgcgctcaagtaatcattcgcattgtgccaggaggtggaaccaagacccttcagcagataatcaatcagctggagtacctgtcccgaaagggaaagctggaactgcagcgttcagcccggcatctcgatattcccgttccgccggatcaaatccgtgagcttgcccaaagctgggttacggaggccgggatttatgacgaaagtcagtcagacgatgacaggcaacaagacttaacaacacacattattgtaagcttccccgcaggtaccgaccaaaccgcagcttatgaagcaagccgggaatgggcagccgagatgtttgggtcaggatacgggggtggccgctataactatctgacagcctaccacgtcgaccgcgatcatccacatttacatgtcgtggtcaatcgtcgggaacttctggggcaggggtggctgaaaatatccaggcgccatccccagctgaattatgacggcttacggaaaaagatggcagagatttcacttcgtcacggcatagtcctggatgcgacttcgcgagcagaaaggggaatagcagagcgaccaatcacatatgctgaatatcgacgccttgagcggatgcaggctcaaaagattcaattcgaagatacagattttgatgagacctcgcctgaggaagatcgtcgggacctcagtcaatcgttcgatccatttcgatcggacgcatctgccggcgaaccggaccgtgcaacccgacatgacaaacaaccgcttgaaccgcacgcccgtttccaggagcccgccggctccagcatcaaagccgacgcacggatccgcgtaccattggagagcgagcggggtgcccaaccatccgcgtccaaaatccctgtaactgggcatttcgggattgagacttcgtatgtcgctgaagccagcgtgcccaaacaaagcggcaattccgatacttctcgcccggtgactgacgttgccatgcacacagtcgagcgccagcagcgatcaaaacgacgtcatgacgaggaggcaggtccgagcggagcaaaccgtaaaagattgaaggccgcgcaagttgattccgaggcaaatgtcggtgagcccgacggtcgcgatgacagcaacaaggcggctgatccggtgtctgcttccatccgtaccgagcaaccggaagcttctccaacgtgtccgcgtgaccgtcacgatggagaattgggagaacgcaaacgtgcaagaggtaatcgtcgcgacgatgggcgcggggggacctagactagtgtacctcgcgaatgcatctagatccaatccaatatgcatggcatgccgaatccatgtgggagtttattcttgacacagatatttatgatataataactgagtaagcttaacataaggaggaaaaacat

SEQ ID NO: 238 - DNA, 45770 bp, synthetic construct
  misc_feature 1..45770: note = RV005393
  source 1..45770: mol_type = other DNA
atggatggtactttggagatatgagcacttgccagacttcccggtcggagacttaaaaattccgataagaggttacggacgacggaccttataagtggatcgtctagtggtggcgccgatcaaaacagttccgcccccggctttgctcaaagtagcaaagcagctttatctcgggttgcggaggattttctagaaaaccgcaattttgcaggagagaacatatggccatcatcaagccgcatgtgaacaaaaataggacaacctcgccgatagagagaccggagtctctcatagaggaaatgagcggcagtcatccgccgagtggttttaccaacctggatctcgctatgatcgagctggaggactttgtccatcggtgcccgctcccagaagacaatcttgctggtcagaaggagtgagacgatggatccgtctagcaatgagaatgtctatgtgggtcgcggtcacaacatcgaaaatgatgatgacactgaccccaggcgttggaagaaggcgaatatcagttccaacaccatctccgatattcagatgacgaatggcgaagacgtacaatcagggagccctacccgaacggaagttgtaagcccacgtctggattatggatcggtcgactcctcctccagcctttattctggcagcgagcacggaaatcaagctgagattcaaaaagagctgtccgtcttgttctcgaacatgtctttgccaggcaacgatcggcgcccggacgaatacattctcgtgcatcaaacgggacaagatgcttttactggtattgccaaaggcaacctcgaccaaatgcccaccaaggcggaatttaacgcgtgctgccgtctctacagggacggagccggtaattactacccgccacctctcgcattcgacaagattagcgttccagagcaactggaggaaaaatgggggatgatggaggcgaaggaacgtaacaaactgcggtttcagtacaagttggacgtatggaatcatgcgcacgctgatatggggatcacgggcacagagatcttttatcaaacagataagaacataaagctcgaccggaattataaactaagacctgaagaccgatacgtacaaacagaaaaatacgggcgccgggaaattcaaaagcgatatcaacacgaactccaggctggttcgctgctgcccgatattatgatcaaaactccccaaaatgacatccacttcgtgtacaggtttgccggcgacaattacgccaacaaacagttcagcgagtttgaacacaccgtcaagcgcaggtatggcgacgagactgagatcaaattgaagtcaaagtcaggcattatgcatgactcgaaatatctggaatcctgggaacggggcagtgcggatattcgcttcgcggaattcgttggggaaaatagagctcacaatcggcagtttccaactgcgacagtaaatatgggacagcagccagacgggcagggcggtttgacccgcgaccgtcatgtgagcgttgacttcctaatgcaaagcgcacccaattcgccttgggcgcaagctttgaaaaagggagaactgtgggatcgcgttcagttgcttgctcgcgacggcaaccgctatctgtcgccgcccagattggaatattctgaccctgcacatttcaccgagttgatgaaccgggttggtttacccgcatcgatgggtcggcaaagccatgcggctagtatcaaattcgaaaagtttgacgcgcaggcagcggttattgtcttaaatggcccagagttacgtgacattcatgacttgtctcctgaaaaactgcaaaatttgtccaccaaagatgtcatcgtcgccgatcgcaatgagaatggtcagagaactggcacgtacaccagcgtcgcggaatatgagcgcttgcagttaaggctgccacccgatgcagcgggggtgcttggtgaagcaactgacaaatattcacgtgatttcgttcggccagagccggcgtcgcgtccaatcagtgacagccgcaggatatacgaaagtcgaccgcgtagccaaagcgtcaacagcttttgacgttcctgctgccgcgtcaacgaggaagctcgtttgacccgggtttgccaatgaaagggctcaatcatggtgaacactacaaagaaaagttttgcgaagtcgcttacggcagatatgcgccgttctgctcagcgcgttgtcgagcaaatgcgaaaagcattgattaccgaagaagaggcgctcaagcggcaagccagactggagagtcccgataggaagcgaaagtatgctgctgatatggcgatagtcgacaaactcgacgtagggtttcgaggcgaaataggctataaaattcttggaaataaccggcttcgagtagacaaccataaagaattaacgcgtgagcacggtagacttcgcaaaaccaaaacggttctgaagcgtaacccggtgacgcaggaagtctatttgggtttatatgaaaggaagtcctggttaagtgtcagcagccatttgtatgctgcggacggcacactccgcatgaagcacgtgaaatacaaagacggacgttttgaggaaaaatgggagcgcgacgaaaatggcgacctgatccgcacaaggtacgccaaccgtggcaggctctttcaacctgtatccgagaaaatgggcgcgccgtatcggagcggccctgacgaccggctctatcgcgatctaacccgtcgaaacggtttcagacgggagacattcgaacgggacgatcacggaaacctcgagcgtatcggcagcaaccatgtcggcttttccaagatttcagtgaaggcacccaatcgtcaaacctcccagacgaagattcaaaaacttggtggcgctttcaacaaatcttttaggtcccttctggacaaggagggcaatgaaatgggccgcgatattttgagccatcgacggctctataacaagcggtctgctgtctacgatgaagctaccggacaattgaagagtgccaagcataccttcggcaagatctacaggagcgaaaccgaatatctcagcgcgggcctcaagaaggtttcaaaaaagatactcggggtgacggtctaccggaaatttgcggcgctcagcgagcgagaatccgaggctgagagactgcgtagttttgaatccggtgcgcatcgccagatctggcaggagcgggcagcgattcccggttcgcccctcccggagactgatgacattcatttcgcacagcagtcgcacctagccaaagccaaccctgatcacgtcgaagctgacgtcacgcgtgtgacagatcaacatgttgatgttgctggacaaacatcatcgtctccccaacggaacttggaaggatggttagattctcaatcacgatacaagccagcaaacatgctgttgtcaaatccagaccttcaagcgaacggacctcgcccatacgaagggttagctcatctcaccctccggcgcgataatgaatctgacgggcacaaggagaatgatcagcggctgcgacatttctcccagccagagccgttggtgttaccgcatcccgggtcgccggaaataactaaggtgtttggctcgcggggagagccggcacacccgagtggaaatctgcacacggcggttggagaaacggcttgcgaaggaccggtgatgtcttcatcctcggacaatcatcagccagctccaggacagcaagaacttttaagtttccttcataatgcgccagccccagtttctgtggcaatacatgatgatcaagagcgacttgcgggggaggcgcccggcggctctttcagaggtagctcagggcgaacgagttcaatgtcggagagtatcttcgacgaagatgtacaagggcatttggtacgggattattcgatcaatactactaacgggtttattgacccgcaatcgttgttcggtgaaccggacttatcgagaggtccaaaatcggggccagaaattccatcggaagattaccatttgtcagcttcggaacaggaaaatttgctgaatcaattgcttagtgtgccactgccggttccttcaccgaagcccgaatgcgcgaggtctatgattttcgaaggttcacgttcaagagagcgttccacctccagagggttctaaggtggaacgcgtctaggcttgcctatcatcaccacctcatgatggtcgcggagaccttcgaagagatatccgacatcattggagaagctgggccggaaactagtgtacctcgcgaatgcatctagatccaatccaatatgcatggcatgccgaatccatgtgggagtttattcttgacacagatatttatgatataataactgagtaagcttaacataaggaggaaaaacatatgttacgcagcagcaacgatgttacgcagcagggcagtcgccctaaaacaaagttaggtggctcaagtatgggcatcattcgcacatgtaggctcggccctgaccaagtcaaatccatgcgggctgctcttgatcttttcggtcgtgagttcggagacgtagccacctactcccaacatcagccggactccgattacctcgggaacttgctccgtagtaagacattcatcgcgcttgctgccttcgaccaagaagcggttgttggcgctctcgcggcttacgttctgcccaagtttgagcagccgcgtagtgagatctatatctatgatctcgcagtctccggcgagcaccggaggcagggcattgccaccgcgctcatcaatctcctcaagcatgaggccaacgcgcttggtgcttatgtgatctacgtgcaagcagattacggtgacgatcccgcagtggctctctatacaaagttgggcatacgggaagaagtgatgcactttgatatcgacccaagtaccgccacctaataatgtctaacaattcgttcaagccgacgccgcttcgcggcgcggcttaactcaagcgttagatgcactatacgtaccaatccaaatcggatccccctgcatattttcctcctcgagttggatgaactcgccgagttcatcgtcaactgaaacagacacggccggattctgtgagacaggttgaaccgcagctctcttccattgataataggtctgaacggaaatacccacgatcttaacggcgtccttcaaggttgcgccgccagcgacctgagcttcgatttgaccgatcttctccagtttttctcggttgctgaggccgcgggttttcggcttcacggatttgaacgatcccgtgcgggctgtttcggctggtgctttctttgctcttctacctctaggagcagccggctcaacttcggcagcagcagtaccgtccggcggattctggatctcttcgtcagccattaatcgtcctctgtgtgggttattgctttgtctgccagctcgatccaagagtcaacgtttgtgcctagagtcgagcaagacgtttcccgttgaatatggctcataacaccccttgtattactgtttatgtaagcagacagttttattgttcatgatgatatatttttatcttgtgcaatgtaacatcagagattttgagacacaacgtggctttgttgaataaatcgaacttttgctgagttgaaggatcagatcacgcatcttcccgacaacgcagaccgttccgtggcaaagcaaaagttcaaaatcaccaactggtccacctacaacaaagctctcatctagcgtggactcaaggctctcgcgaatggctcgcgttggaaactttcattgacacttgaggggcaccgcagggaaattctcgtccttgcgagaaccggctatgtcgtgctgcgcatcgagcctgcgcccttggcttgtctcgcccctctccgcgtcgctacggggcttccagcgcctttccgacgctcaccgggctggttgccctcgccgctgggctggcggccgtctatggccctgcaaacgcgccagaaacgccgtcgaagccgtgtgcgagacaccgcggccgccggcgttgtggatacctcgcggaaaacttggccctcactgacagatgaggggcggacgttgacacttgaggggccgactcacccggcgcggcgttgacagatgaggggcaggctcgatttcggccggcgacgtggagctggccagcctcgcaaatcggcgaaaacgcctgattttacgcgagtttcccacagatgatgtggacaagcctggggataagtgccctgcggtattgacacttgaggggcgcgactactgacagatgaggggcgcgatccttgacacttgaggggcagagtgctgacagatgaggggcgcacctattgacatttgaggggctgtccacaggcagaaaatccagcatttgcaagggtttccgcccgtttttcggccaccgctaacctgtcttttaacctgcttttaaaccaatatttataaaccttgtttttaaccagggctgcgccctgtgcgcgtgaccgcgcacgccgaaggggggtgcccccccttctcgaaccctcccggcccgctaacgcgggcctcccatccccccaggggctgcgcccctcggccgcgaacggcctcaccccaaaaatggcagcgctggcagtccttgccattgccgggatcggggcagtaacgggatgggcgatcagcccgagcgcgacgcccggaagcattgacgtgccgcaggtgctggcatcgacattcagcgaccaggtgccgggcagtgagggcggcggcctgggtggcggcctgcccttcacttcggccgtcggggcattcacggacttcatggcggggccggcaatttttaccttgggcattcttggcatagtggtcgcgggtgccgtgctcgtgttcaattcagcgggttcgtgcgatccgtctgcatgatggtgatagccgtcagcatgattttcgtgtcgtcgaacttggtgaagggcattctcggcggcgatcacgacgccggccctgcggagccttcgccgcgtgcgcgattcatggcggccgtggaggccaaggatttcgcgcgagtgcaagagctgatcgaggcgcgtggagccaagtcggcggctgattatgtccttgcgcagctcgccgtggccgaaggtctggaccgcaagcctggtgcgcgcgtcgtggtcgggaaagcggcgggcagcatggcaatgccgcctgcggcgctgggttttacgccaaggggagaagcggcatacgccatcgagcggtcagcctatggtgagccgaggtccagcattgcgaagcagtaccagcaggaatggaaccggaaggcggcgacctggtgggcgatggccggtgtggccggcatcatcggcgcgatcctggcggcggcggcaaccggctttgttgggctggcagtgtcgatccgcaaccgagtgaagcgcgtgcgcgacctgttggtgatggagccgggtgcagagccataagcggcaagagacgaaagcccggtttccgggcttttgttttgttacgccaaggacgagttttagcggctaaaggtgttgacgtgcgagaaatgtttagctaaacttctctcatgtgctggcggctgtcaccgctatgttcaaccaaggcgcggagcaaattatgggtgttatccatgaagaaacggcttaccgaaagccagttccaggaggcgatccaggggctggaagtggggcagcagaccatcgagatagcgcggggcgtcttagtcgatgggaagccacaggcgacgttcgcaacgtcgctgggactgaccaggggcgcagtgtcgcaagcggtgcatcgcgtgtgggccgcgttcgaggacaagaacttgcccgaggggtacgcgcgggtaacggcggttctgccggaacatcaggcgtacatcgtccggaagtgggaagcggacgccaagaaaaaacaggaaaccaaacgatgaaaactttggtcacggccaaccagaaaggcggcgtcggcaagacttcgacccttgtgcatcttgccttcgactttttcgagcgcggcttgcgggttgccgtgatcgacctggacccccagggcaatgcgtcctacacgctcaaggactttgctaccggcctgcatgcaagcaagctgttcggcgctgtccctgccggcggctggaccgaaaccgcacccgcagccggcgacggccaggccgcgcgcctcgccctcatcgagtccaacccggtactggcgaacgccgaacggctgtcgctggacgacgcccgcgagctgttcggggcgaacatcaaggccctggcgaaccaaggcttcgacgtgtgcctgatcgacacggccccgacccttggcgtcggcctggcggccgccctcttcgcggccgactatgtgctgtcccccatcgagcttgaggcgtacagcatccagggcatcaagaagatggtcacgaccattgcgaacgtgcgccagaagaacgccaagctgcaattccttggcatggtgcccagcaaggtcgatgcgcggaatccgcgccacgcgcgccaccaagccgagctgctggccgcgtaccccaagatgatgattccggccaccgttggcctgcgcagcagcatcgccgatgccctcgcatccggtgtgccggtctggaagatcaagaaaacggccgcgcgcaaggcatcgaaagaggttcgcgccctggctgattacgtgttcacgaagatggagatttcccaatgactgcggctcaagccaagaccaccaagaaaaacaccgctgcggccgctcaggaagccgcaggcgcggcgcagccgtccggcctggggttggatagcatcggcgacctgtcgagcctcctggacgctcctgcggcgtctcagggcggttccggccctatcgagctggacctggacctgatcgacgaagatccgcatcagccgcggacggccgacaaccccggcttttccccggagagcatcgcggaaatcggtgccacgatcaaagagcgcggggtgaagtcacccatttcggtgcgcgagaaccaggagcagccgggccgctatatcatcaatcacggcgcccgccgctaccgtggctcgaagtgggccggcaagaagtccatcccggcgttcatcgacaacgactacaacgaagccgaccaggttatcgagaacctgcaacgcaacgagctgaccccgcgcgaaattgccgacttcattggccgcgagctggcgaagggcaagaagaaaggcgatatcgccaaggaaatcggcaagtcgccggcgttcatcacccagcacgtcacgctgctggacctgccggagaagatcgccgatgcgttcaacaccggccgcgtgcgcgacgtgaccgtggtgaacgagctggtgacggccttcaagaagcgcccggaggaagtcgaggcgtggcttgacgacgacacccaggaaatcacgcgcggcacggtcaagctgctgcgcgagttcctggacgagaagggccgcgatcccaacaccgtcgatgccttcaacggccagactgatgccgagcgtgacgcggaggccggcgacggccaggacggcgaggacggcgaccaggacggtaaggacgccaaggaaaagggcgcgaaggagccggacccggacaagctgaaaaaggccatcgtccaggtcgagcacgacgagcgccctgcccgccttatcctcaaccgtcggccgccggcggaaggctatgcctggttgaagtacgaggacgacggccaggagttcgaggcgaaccttgccgacgtgaaactggtcgcgctcatcgagggctgatccccaaagacagcggcgcgggccacccgcgccgcacagacaacggttccgctacaaggaggaccgaagaatgaatccgatgctgttctacatcgcgggaggcgtaggcgcggcgttgctgctggtttccgcgatcatgctgttcaagctgcgcgagccgaagaaggaacaccgaccgcagcgcaaggcggcggccccgacgccgcagccggtcgataacgagctgctgcgcacctttcgccggccgtcgcaggccagccaacccgagccatccacgacgccgccggcgcggcgcactgccccgccgagcagcgaacaatccagagggaatgacggcgatttcgtcacgtcggccctggtggccggggcgaccaacagcaccatgctgggctacctggccggcggctcgctgaccggggccatgctgggcgatgcgctgcggccggatacgccgtctgcggcgttcgcggacccctcgccgtgcttcggcagcagcgacacggacagcggctggaccgataccggcagctcttgcgatttcagttcgtccgacaccgatacgaacaactggtgagggcggaccatgactgacgaacaaaagaaacggctcctgatgttgcaagctatccggcgcagcatccaggcaatgcgcaggggtgtttcggggccggatagtttcaagggctggttgaccggcatcggcatcatcgcggcggggttcctggttggcgagctgctgccatcccctgcccccggcgtcggcctggttgtgccaggggcctgcattgccggcttcgtcgtcggctgctggctcaacaggaaaggccgctcatggccgacagccatttacgaccaattggcccgttaccagccgctcaacgagcgggcgtaccgcgacctgcaagagacggtgaaggaacgcggcctcgactgcgatgcggtcatggagtggacctacatcgagcaggccgagttcatgcccctggtgcccaccagggaggacctagcgcgcgacaagttcctgaccgcgacgcgggccgatagggccgaggacgatgcgcgtgcgcgcttcgtcgtgctccatcccaagaagcgcggccccgacgcatgaagaagcccgacgcccgctaatccccttcccgctgaccctttgcccccgccgaccgtgcggggctttttttgcctgcccttcagccgctaaaaaacctgccgttaagtcgagaactgttcagctaaactcttgcgctgataaggtaggtaagagtattattattcttaccaattaccggagccaacatggaactgaacaaagagacgcgcgaccgcatttttgcggctgcggacgagctgttcgagcaaggcgaccgggagaacttcccgaccgtggatgcagtgcgtaaggccgcccgcgtcaacatgaacgacgccagcgccggcatgcgcgaatggcgacgccagcgcacggcgcaggccgccccgctggcagtccaggtgccggacgcggtgcagcaggccggcaaccaggccgtggccgccctctggcaagccgcccaggcccttgccaatgaatcgttgcaggcagcgcaagccggctgggatcgtgagcgcaacgagttggaagccgtgcgcggggagctggccgacgccttcgaggcgcaggcccgcgagctggaagaagcccaggcgcgcgttacattgctagagcagcaggccgccgaggcggccgagctggccgcacgccagcggcaagccctggccgaagcacgcaccgccctggcaggagccgagcagcgggccgcgctggcgacgcagcgggccgacgaggtggagcgtcgagcgcaggagctgcgcgccgagctggactacgctcaccaggacgcccgcgcattcaaagaagagagccgcaagaccctggacgcggccaaccaggaaatgcaggcgcttcgcggcgagcgcgacgccaccaggcgcgaagcggagagtttgcgcacggagttggcagcggtgaaagcgaaggcgcaggccgacgccgaggcccaccaggagcaaaggaagttggcggcgcaagaggcggccaggcaggccgagcgctttacgacggtgcaagccgagcgtgacgaagcgcggcaagaggcaaaggcagcccaagaagaggccgctatgttgaggggtcggctagacgcggaaacgagtgggaggaaacacaaagcgggaggaaagtaactgataaatcgaacgcagttcactaaaatagatggaacaaccttgacgcgcccggctctagggaaagccggcctcgaactgccgaggtcggcttttttttagccggcaagcgaccaggacacgtttaacaccagaggcaaccgtcaggagtcacccaatgaaacaccgcctcctggtcatgaatgggcaaagaattgtccagaccgagaaccaaggcgcatggacgaaccagaaggtagataaagccggggccctgaaacctggcatttacaacatctatatggcccaaaaggccgataagtcgcagcgccacgacggcagcatcgtccacgcagatagcggcagcatttaccaacaggtggggaagaactttgtaatgcacgcccggtcagatttcgataaagtacctgaaatcgggagtgcgaaaagcatcacctatgacgcaagtggcaaggcacaggtaagtgccgaaagcgtcaagttgagtcgcgggcgcactcgttagagttttagcggctaaaaagggaggcgtcttgagcagctacagcagagccgagcgcgcaccgtggggagacttcccgaaggtggttcgcaacggcgaccttggttctttgaccaacgagcctgaataccaggctgcgaagcagggcgacgcggaagcggcgcttaatttggtcgagcgcctgatttcggacgacactgttgcccagctcaagacgctgatcggcgacgacaagccccgcatcgttccagtcctcgccgtcgaggcggcggggaacaacaagattccggccatgatggcggtcgttctggccgaccgccttggccttgaggtcgaaacggacattgtgcagcgggagaaggtcgcccgaaccggagccggttcagatcatcgcctggcgttcaacccgactttcgagggggaggtgatccccggccagaagtacatcgttgtcgatgacacgctgacgatgggcggcaccattgcctcattacgcggctacatcgagaacaacggcggcaaggtcatggcggcgtccgtcatgaccgcccatgaaggcgcgcttgacctggcggtcaagccgaagatgcttgcgggcatcaatgagaaacacggtccagcaatggacgcattttggaaggaaacctttggctatggcatcgaccgactcacccaaggagaagccggacacctccgcgctgccccgtccgttgacgcaatccgagatcgcatcgctgcggctcgaaatgaagcagtcaatcgagtgggggcaagccgaactgcgacgacggcgcgagcagggcaacagcagtccccggcagtaaagcagtccagcggcaacagcggcgaggatttgctacaggcggcccaggaggccgagacggaacagcaggccctcttagaatccgcgcccatcgagcagacctaccagcagacccttgcgctctacgtgcaggcaaagcatgaccaggtggagcgcatcgaggaccgcctagaacagctcgtagaccgtcagcaggcgcgtttgcagcagctacagtccaatgcccccggcttgctgtccctgccgcgtacaaaggccgcctggcagcagcagcaggcccaacagcaagcccgcttgcagaccctgcacacgcggctggacatggtgcgcgaaatcaaggaaggcatgggcattcacgcgcccaagatcgaggaactggcgacgcgcaagatgcgcgcggagcatcccgagctggccggcgactgggattcgatgcgtgaagcagcccgacggcaccaggccctgatgcgcaagcaggagcaggagaagaaacaggcccaggagcgcgagcgcgggcgcagtcagagcttgggcctgtcaaacaagcccagctaacgcaaaaacaaagcccggcaacgccgggctttttcatctgcgcctctgcgattcataacgaggcccacaccaccagggcggccgcgaacaacaccatgccgccggcgatcatgttcatcatcgccacgcgccgcgcgtccgcgaccttggccgcgagctggcggccaaggccgtcgtcgatttccctgcggatcgcttcggccgcctgcgcggcgctgtccttcattaccttcgccattgcgtccttgctggccgccagggccgcgttcagcatccgctccgctttggccttggcgtcctcgccccaacgatgggcgatcccttccagctcttccttgaacgcggcaaggatttcctcttgcttggccgcactgtcggccatgagccgggcgttgatggtatgcaggatcagcaccgggtcgtcgcggccgacggcgatgccgtgcttggccgcaatctcccggatcagctcttcaatctggtcgctcatagcacggccgccgcgtcgagctgttcaaacaggccgcgccgcacgatcttgaggcgttgccgcgtcatgatcgtgagcgattcatcggccagcgcctggtcgaacgtcagccgctcttgcagcatgtcgctgaaatcgcggccgtaggtttcttccttgagggccggaatctggatgatggacgacacgcgggccttgttggccgtgtacgccttcatctgctcaaagctcttgccctcatgctcgataggcccccaatacgggttcagccagaccacgaaaagcgcttcggccgggaactggctggcgagctgggcgaagccgctcaccgtgtccaggagagcctggccgccggtgacgacggtatggatgaccagctcatgccccatttcttgcagcagagccggcacctggttgctgatgaggtaatgcgacagaggcacgaacgagctggcaccgttgtcgatcaccacgtcatccttggtcggcgcaatcagctcgaccagggtgtcgaagttgcgcgagttaatttcgtcgccggccatgatgttcagccggcggacgttcagggccttgtagccctcgaacgtcgcgttcaccgggtcggtgtcgatgcacaagggtgtctgccccttgtccatcttgtactgcgcaatgatcgcggcgatggccgacttgccgaccccgcccttgccctgcaaaaccatgtgaattttcgccattacagtagatcctttttgtccggtgttgggttgaaggtgaagccggtcggggccgcagcgggggccggcttttcagccttgcccccctgcttcggccgccgtggctccggcgtcttgggtgccggcgcgggttccgcagccttggcctgcggtgcgggcacatcggcgggcttggccttgatgtgccgcctggcgtgcgagcggaacgtctcgtaggagaacttgaccttccccgtttcccgcatgtgctcccaaatggtgacgagcgcatagccggacgctaacgccgcctcgacatccgccctcaccgccaggaacgcaaccgcagcctcatcacgccggcgcttcttggccgcgcgggattcaacccactcggccagctcgtcggtgtagctctttggcatcgtctctcgcctgtcccctcagttcagtaatttcctgcatttgcctgtttccagtcggtagatattccacaaaacagcagggaagcagcgcttttccgctgcataaccctgcttcggggtcattatagcgattttttcggtatatccatcctttttcgcacgatatacaggattttgccaaagggttcgtgtagactttccttggtgtatccaacggcgtcagccgggcaggataggtgaagtaggcccacccgcgagcgggtgttccttcttcactgtcccttattcgcacctggcggtgctcaacgggaatcctgctctgcgaggctggccggctaccgccggcgtaacagatgagggcaagcggatggctgatgaaaccaagccaaccaggaagggcagcccacctatcaaggtgtactgccttccagacgaacgaagagcgattgaggaaaaggcggcggcggccggcatgagcctgtcggcctacctgctggccgtcggccagggctacaaaatcacgggcgtcgtggactatgagcacgtccgcgagctggcccgcatcaatggcgacctgggccgcctgggcggcctgctgaaactctggctcaccgacgacccgcgcacggcgcggttcggtgatgccacgatcctcgccctgctggcgaagatcgaagagaagcaggacgagcttggcaaggtcatgatgggcgtggtccgcccgagggcagagccatgacttttttagccgctaaaacggccggggggtgcgcgtgattgccaagcacgtccccatgcgctccatcaagaagagcgacttcgcggagctggtgaagtacatcaccgacgagcaaggcaagaccgagcgctcttcttcaatcgctgccgtcagacggtcagggaacgccgacaggccccgctccgcgtagttcggagcaggacgccgcacggcgtccacatggatcatccacccacttcccaggcccgcgagggcctggttgatgcgggcggacactacttcgcgctgctggtcggtgctgcttgcgttgtcatcgcccttgtacagccaggcagccataaagctgccgttcttgcccacgattacgccgtcatcgacgacagcggcgtagttgagcagatcggccaggccggcgtccttggaacgatgctttttcagtttcagttcggcatcgaccgcgcggatgcgggcaaagaggatgaacaacagaagcgcgccgaggcccgcgattgcaatcgcaattgcttggatcatcggtattgcttcccttggctattggtgttctcgcggaacggggtcgagcgggccgggtaatacggcttgtaccggcggtgacgcaggtacacgaaccgcatcttcggatcggccttcgccatgattcggaacgcatagagcgccccgaaccacaggatcagaccgaccacggtggcccgcagctcttgggcgctgaaaatcagcgcaaacgccatcaggcccgagaacatcaccagttcacgatcaccacccatgaacaggttttctcggttgcctgcgcgacggatggggatcgtgcgcagagccatgattaggcgagccgtccagccgctaccgcacgcacggcatccgccgccgcgacttgcacctggtgcagcgccccgttgccgagggccgcgatttcggcaccacgaccgaagaaggtgctcatcacgttctgcgcgccgaccagcagcgccatcaccagaaccaggaagatcagggttcggaagaaggcgttgagttcgccgccgaagatcagcacgccgccggcgacgacgatgccgatgatggacagcgcgaaggccaccgggccggttacggagttgcgcaggttcgtcagccagctctcatatggcaagctgccgccggtgccttccgaggccatcgccggatgcgcggataacgcgagagcgagaacgaagaacacggcaaggtagaacaaaatgccgcgattcatggtcagacggaacggaacagccgttgtcattggaaatactccttacagggttttggtgatgtactggccgttctcgtaaccaagaacttcgagaatttcttgcactcgacggccgctaggggtcctggcgatatggacgaccacatgaaccgcctcgccaatcagcggctcaatgggtttcggtgaatccgggtgcatgctgataagcatggcgagccggctcaggcccgctttggggttgtttgcgtgcagggtggcggcacctccttcatgcccggtgttccaggccatcaacagatcaagggcttcggggccacgtacctcaccgaccaggatgcggtcggggcgcatacgcagcgttgtcttgagcagcagcgtcatcgagacgtcgatgctggtgtggtattggacggcgttctctgcggcgcactggatttcgccggtgtcctcgatgatgacgacgcgctcagacgggttgaaggcgaccatttcattgatgatcgcgttgacgagcgtggtcttgcccgagccagtaccgccaatgacgaggatgtttcgatgcgccgcgacggcgcttttaatgacctcgtattgctcgcgggtcatgatgcccgcctcgacgtactgttccagcgtgaagatggcgaccgcgcgcttgcggatcgcaaaggttggcgcggccacgaccggcggcaattggccggcaaagcggctgccatccaaggggaactcgccttccaggatgggcgaatgccgcgtgacctctttgccgtggaatccggccaccgtttctataatcgcctgcgactggctgggccgcatgtcgcagatgtaccgcatcggctcgccaaggcgttcgtgccacaccttgccgtccgcgttgagcatgacttcaacggttttcgggtcgttgagcgcggccaacaggtccgcacccatgtcgcgttccagcttgcgcttggcccgctccttgatggtctgaaactcttctttcccgctcacttttcagtaacccctacgcaacaaatcattagcaacattatcgcacaggcaaacgatataccgaaagtgtttagcctgcaagacaaacagctaatcgaaccgcacgacgtaggggttctgatagaaaacaactgtcaaagcgcacccgcccgatgccattcgcggcacggcttccgttgaggatgtcgatatgatgcgcgagccgacggcccgcagagaaggggccgttttagcggctaaagaaggaagtgcaagccctaacccttggcgtcagagccttccacgcagcttttttcgggtgtcgtcgccccatttctttacgataaacgccttatgtgacggcaaaaccacactgatgcgttcgtatccgggcggcacgctgctcttgaaaggatgacccgcaatctccgcgagtgcctcgcggtcaaggtcggtggactccaggagaagaggtaggggagtttccagggcgtcggcaatggcctccatcaccttcaacgaggggttggccttaccgttggttaagtctgataaaaacgaaattgaaacccctgccctctccgacagctcatgtttcgtcatgccccgctcatcgagcagacgaaggatgttggtgaaaaatatctggttgtacacagcggaagccgcccctcgcacctttggtcgcggcccgcaaaattttagccgctaaagttcttgacagcggaaccaatgtttagctaaactagagtctcctttctcaaggagactttcgatatgagccataatcagttccagtttatcggtaatcttacccgtgacaccgaggtacgtcatggcaattctaacaagccgcaagcaattttcgatatagcggttaatgaagagtggcgcaacgatgccggcgacaagcaggagcgcaccgacttcttccgcatcaagtgttttggctctcaggccgaggcccacggcaagtatttgggcaaggggtcgctggtattcgtgcagggcaagattcggaataccaagtacgagaaggacggccagacggtctacgggaccgacttcattgccgataaggtggattatctggacaccaaggcaccaggcgggtcaaatcaggaataagggcacattgccccggcgtgagtcggggcaatcccgcaaggagggtgaatgaatcggacgtttgaccggaaggcatacaggcaagaactgatcgacgcggggttttccgccgaggatgccgaaaccatcgcaagccgcaccgtcatgcgtgcgccccgcgaaaccttccagtccgtcggctcgatggtccagcaagctacggccaagatcgagcgcgacagcgtgcaactggctccccctgccctgcccgcgccatcggccgccgtggagcgttcgcgtcgtctcgaacaggaggcggcaggtttggcgaagtcgatgaccatcgacacgcgaggaactatgacgaccaagaagcgaaaaaccgccggcgaggacctggcaaaacaggtcagcgaggccaagcaggccgcgttgctgaaacacacgaagcagcagatcaaggaaatgcagctttccttgttcgatattgcgccgtggccggacacgatgcgagcgatgccaaacgacacggcccgctctgccctgttcaccacgcgcaacaagaaaatcccgcgcgaggcgctgcaaaacaaggtcattttccacgtcaacaaggacgtgaagatcacctacaccggcgtcgagctgcgggccgacgatgacgaactggtgtggcagcaggtgttggagtacgcgaagcgcacccctatcggcgagccgatcaccttcacgttctacgagctttgccaggacctgggctggtcgatcaatggccggtattacacgaaggccgaggaatgcctgtcgcgcctacaggcgacggcgatgggcttcacgtccgaccgcgttgggcacctggaatcggtgtcgctgctgcaccgcttccgcgtcctggaccgtggcaagaaaacgtcccgttgccaggtcctgatcgacgaggaaatcgtcgtgctgtttgctggcgaccactacacgaaattcatatgggagaagtaccgcaagctgtcgccgacggcccgacggatgttcgactatttcagctcgcaccgggagccgtacccgctcaagctggaaaccttccgcctcatgtgcggatcggattccacccgcgtgaagaagtggcgcgagcaggtcggcgaagcctgcgaagagttgcgaggcagcggcctggtggaacacgcctgggtcaatgatgacctggtgcattgcaaacgctagggccttgtggggtcagttccggctgggggttcagcagccagcgctttactggcatttcaggaacaagcgggcactgctcgacgcacttgcttcgctcagtatcgctcgggacgcacggcgcgctctacgaactgccgataaacagaggattaaaattgacaattgtgattaaggctcagattcgacggcttggagcggccgacgtgcaggatttccgcgagatccgattgtcggccctgaagaaagctccagagatgttcgggtccgtttacgagcacgaggagaaaaagcccatggaggcgttcgctgaacggttgcgagatgccgtggcattcggcgcctacatcgacggcgagatcattgggctgtcggtcttcaaacaggaggacggccccaaggacgctcacaaggcgcatctgtccggcgttttcgtggagcccgaacagcgaggccgaggggtcgccggtatgctgctgcgggcgttgccggcgggtttattgctcgtgatgatcgtccgacagattccaacgggaatctggtggatgcgcatcttcatcctcggcgcacttaatatttcgctattctggagcttgttgtttatttcggtctaccgcctgccgggcggggtcgcggcgacggtaggcgctgtgcagccgctgatggtcgtgttcatctctgccgctctgctaggtagcccgatacgattgatggcggtcctgggggctatttgcggaactgcgggcgtggcgctgttggtgttgacaccaaacgcagcgctagatcctgtcggcgtcgcagcgggcctggcgggggcggtttccatggcgttcggaaccgtgctgacccgcaagtggcaacctcccgtgcctctgctcacctttaccgcctggcaactggcggccggaggacttctgctcgttccagtagctttagtgtttgatccgccaatcccgatgcctacaggaaccaatgttctcggcctggcgtggctcggcctgatcggagcgggtttaacctacttcctttggttccgggggatctcgcgactcgaacctacagttgtttccttactgggctttctcagcccggggaccgccgtgttgctaggatggttgttcttggatcagacgctgagtgcgcttcaaatcatcggcgtcctgctcgtgatcgggagtatctggctgggccaacgttccaaccgcactcctagattgcgcgtcccccttggtcaaattgggtatacccatttgggcctagtctagccggcatggcgcattacagcaatacgcaatttaaatgcgcctagcgcattttcccgaccttaatgcgcctcgcgctgtagcctcacgcccacatatgtgctaatgtggttacgtgtattttatggaggttatccaatgagccgcctgacaatcgacatgacggaccagcagcaccagagcctgaaagccctggccgccttgcagggcaagaccattaagcaatacgccctcgaacgtctgttccccggtgacgctgatgccgatcaggcatggcaggaactgaaaaccatgctggggaaccgcatcaacgatgggcttgccggcaaggtgtccaccaagagcgtcggcgaaattcttgatgaagaactcagcggggatcgcgcttgacggcctacatcctcacggctgaggccgaagccgatctacgcggcatcatccgctacacgcgccgggagtggggcgcggcgcaggtgcgccgctatatcgctaagctggaacagggcatagccaggcttgccgccggcgaaggcccgtttaaggacatgagcgaactctttcccgcgctgcggatggcccgctgcgaacaccactacgttttttgcctgccgcgtgcgggcgaacccgcgttggtcgtggcgatcctgcatgagcgcatggacctcatgacgcgacttgccgacaggctcaagggctgatttcagccgctaaaaatcgcgccactcacaacgtcctgatggcgtactaagctgggcctaggaaatatcagccgcttgtgtgttcaattcttctctgtttcacttgaaacaaattgaatagatattcccgctttcaaagccatttacaaatcctctcgtgcagcctaacgccattggcgtggaacaagcgttggcacgaggaagtaagtgcgatgaacggaaggtattcaccgacgcggcaggattttaagacaggcgcgaagccttggtctatattagcccttatcgttgccgcaatgattttcgcgttcatggcggttgcgtcctggcaggacaatgggactacccaggcaatccttagccaaatacgatcgattaacgctgacagcgcctcactgcagcgcgatgtactccgcgctcacacgggcaccgtggcgaactaccgccccattatctccaggctgggagctctgcggaagaatctggaagatttgaagcaattatttaggcaatctcatattgtaagtgagagcaatgctgctcaactgctacgccggctagaagtgtctctaaattcggctgacgcggcggtcgccgcctttggtgcgcaaaatgtccgcctgcaagattcgctggccagtttcactcgtgctttaagcaatcttccaggaaaggcctcaggcgatcagactttagaaaaaccaacagaattggctagcatgatgctccaatttcttcggcaaccaagcccggctatttcattcgagatcagccttgaactagagaggctccaaaaacaacgcggtcttgatgaagctcccgtgcgcatactttcgcgtgaaggtcccattatcttatcgcttttgccacaggtgaacgatctggtgaacatgattcagacgtctgacaccgcagaaattgcggaaatgttgcagcgtgagtgtttggaggtctatagcttgaaaaatgtggaggagcggagcgcacgtatctttcttgggtccgcttcagtgggtctttgcctgtacatcatcaccttagtctataggctacgcaaaaaaaccgattggttagcgcggcgtttagattacgaagagctaatcaaagagatcggagtatgttttgaaggtgaggcggccactacgtcgtccgcgcaagctgcacttggtattattcagcgcttctttgatgccgatacgtgcgcgttagctctagtggaccatgaccgtaggtgggctgtcgaaacattcggtgcgaagcacccaaaacccgtgtgggacgacagggtgctacgcgaaatagtctctcgtaccaaagcgaacgaacgggcgacggtattccgcatcgtatcgacgcaaaaaatcgtacatttgcctcccgaaattccaggtctttcgatactactggctcacaaatccacagataaactaattgcggtttgttcactgggttaccaaagctatcgccctcgaccttgccaaggcgaaattcagcttcttgaactcgccaccgcctgcctctgtcactatatcgatgttcggcgtaagcagaccgaatgcgacgttttggccagacgattggagcatgcgcaacgccttgaggcagttggtacacttgccggcggaatagcacatgaatttaataacattttggggtcaatcctcgggcacgcagaattggcccaaaactcggtgtctcgaacatctgtcacccgaagatacattgactatatcatttcgtcaggcgacagagccatgctcattatcgatcagatcttgacgctgagccgaaaacaagagcgcgtgatcaagccatttagtgtctcagagcttgtgaccgaaatcgctcccttgctacgtatggctcttcccccaaccatcgagcttagtttcagatttgatcaaatgcagagcgtgatcgaaggaagcccgcttgaacttcaacaggtactaattaacctctgcaagaatgcttcccaagccatgactgcaaatggtcaaatcgacatcttcgtcggccaagcttatttaccagctaagaaaattctggcgcatggtgttatgccacctggcgactatgttctactatctgtcagcgacaatggtggaggcatttcagaggctgtgctaccctacatttttgaacccttctttacgacacgtgctcgcaacggtggaacgggtctcggcctcgcttctgtgcatggtcatatcagcgcgtttgcaggttacatcgacgttagttcaactgttgggcatgggacgcgctttgacatttatctccctccgtcttctaaggagcccgtcaatcccgacagctttttcggccgcaataaggcaccgcgtggaaacggggagattgtggcacttgttgagcccgatgacctcctgcgggaggcgtatgaagacaagatcgccgctctgggatatgagccggtcggttttcgtacctttagtgaaattcgcgattggatttcaaaaggcaatgaagccgatctggtcatggtcgaccaagcgtctcttcctgaagatcaaagtcctaattccgtggatttagtgctcaagaccgcctccatcatcattggcggaaatgatctcaaaatgcccctttcaagggagaatgcgaccagggacctttatctgccgaagccgatatcgtccagaactatggcgcatgcaatcctaaccaaaatcaagacgtagagttgcgacgtatcaggactgggcaatcgcggccgccgggcttacgtgtcttttgtaacaaattgcgacgcagttgatatccacttgaaacattagtccgaaattatcgagatctccgctgataaggtatcgaaatggcgataaaattggtattgatactcgtattcacactctttcccgcggcagacgctgcatatgcgaatgaccgcgccaacggtttcatgtggtcaaacgggggcgaaactggagtgaggcttcctcttcgggtgttcaatgccaagccagccaagaacacggtggcgatcatttattccggagacgctggatggcaaaatatcgatgaggcgattggtacctatctgcagacggaagggattcctgtcattggcgtcagttcacttcggtatttctggtcggagcggtccccaagcgaaactgctaaggatcttggtcacataatcgatgtctacaccaagcatttcggtgtgcagaatgttttacttgtaggatattctttcggcgcggacgtcatgccggcaagcttcaataggcttacgcttgagcaaaaaaatcgggttaagcaaatctctctcttggcattgtcacatcaagtcgactatgtcgtctcatttaggggctggctccaactcgaaacggaaggtaagggcggcaatcctctggatgatctcagatccattgaccctgcaatcgtccaatgcatgtacgggcgcgaagaccgtaataatgcttgcccatctctccgacagaccggcgcagaggtgataggcttcagcggaggccatcactttgataatgatttcaaaaaactgtctacgcgcgtcgtctcaggcctcgtggcacgcctaagtcatcagtaatctttagttcctgcaccgcgggacccgcgaggtttctcgcttcaattgaaatcataaagaagcaattgaaaattttcgagtaaccgaccctcccgataatcttcaacataaaacaacgcacttcttccaacgggagaggcggtgttagttgcgagctaaggagataaggtatgcttaagagatcggggtcgctttctcttgccttgatggtctccttctgttcgtcgagccttgccacgccactctcatctgctgagtttgaccatgttgctcgcaagtgtgccccatcagttgcgacatctacgcttgcggcgatagctaaggtggagagtcgctttgatcctttagcgattcatgacaacacgaccggcgaaacgcttcactggcaagatcacagccaagcaacccaagtcgtcaggcaccgtctcgatgcacggcattcgctggatgttggcctcatgcaaataaactctcgaaatttttctatgctcggtctgacacctgacggtgcgctccaggcgtgcacatcattatctgccgctgcaaacatgctgaaaagtcgttatgcaggcggcgaaacgattgacgagaagcaatttgcgcttcgtcgggcgatctccgcttacaacaccggtaatttcatcggcggttttgcaaacggctacgtgcgaaaagttgaaacagctgctcaatcgctggtgcccgcgttaatcgagcctccaaaagacgatcacgaggcgctaaaatccgaagagacgtgggatgtttgggggtcatatcagcgccgctcgcaggaggatggcgctggcggtttaatcgctccgccaccgccacaccaggacaacggcaaatccgcagacgacaatcaagtcttattcgacttatactaaggaggtgcgcattgatgcgatgctttgagagataccgtttacatctaaatcgcctctcgctctcgaatgcgatgatgcgcgtgatatcgagctgcgccccaagcttgtgcggtgcaattgcatggagcatttcctcatccggacccgccgcagcgcaatctgcgggtggcggcactgaccccgccacaatggttaacaatatatgcacgtttatccttggtccgttcggccagtcactcgctgttctcggcattgtcgctatcgggatctcctggatgttcgggcgggcttcgcttgggctggttgccggcgtcgtcggcggcattgttatcatgtttggggcgagcttcctcggccaaacgctcactggcggtagttgatggctgatcgtttggaagaatcgaccctttacctcgcagccacacggcccgcattgtttcttggggtgccactgacattggcagggttattcatgatgttcgccggctttgtcatcgttatcgttcagaacccgctctacgaagtcgttctcgtgccgttatggtttgcagcccggctcatcgtggagcgagactacaatgcggcgagcgtcgtcctgctatttttgcggaccgcgggaagaagcattgatagtgcagtttgggggggcgctactgttagcccaaatccaattagggttcccccacgagggagaggaatggtgtgatgctcggcgcgagtggaacgaccgaaagatccggtgagatctatctcccttatattggccacctcagcgaccatatcgtccttcttgaagacggatcgatcatgaccattgcgagaattgatggcgttgcattcgagcttgaggaaactgaaatgcgcaatgcgcgttgtcgtgcgttcaacacgctgttgcgcaatatcgctgatgatcatgtgtcaatatatgctcacctcgtacgtcatgccgacgtgccatcatcggcgccgcgacacttccgtagtgttttcgccgctagcctgaacgaagcttttgaacagcgcgtgctctccggccaactcctccgcaatgaacacttccttacgttgattgtctacccacaggcggctttagggaaggtaaagaggaggttcaccaagctaagcggaaaaagggaaaacgatctcacgggccagatcaggaacatggaagatctttggcatgttgtcgctggctctcttaaagcgtatggcctgcatcgtcttggcatccgcgagaagcagggtgtgctcttcaccgaaattggcgaagcgctacggttgatcatgactggtcggttcacaccggttccggtcgtcagcggctcactcggcgcttcgatttataccgacagagtcatttgcggcaagcgaggactcgagatcagaacgccaaaagacagttacgttggatccatctattcgtttcgcgaataccctgcaaaaacacggccgggcatgctcaacgcgctgctatccctcgattttccacttgttctcacgcagagtttttcgttcctgactcgcccgcaagcgcacgcgaaacttagcctcaaatcgagccagatgctgagttccggcgataaagccgtgactcaaatcggcaaattatccgaggctgaggacgcacttgcgagcaacgaattcgttatgggctcacatcatttgagcctttgcgtctatgcagacgatctcaatagtcttggggacaggggcgcgcgggctcggacacgaatggcggatgcaggtgccgtggttgtccaagaaggtattggtatggaagcggcctattggtcccaattgccggggaattttaagtggcgcacacgccctggcgcaatcacttcacgcaatttcgcagggtttgtctctttcgaaaactttccagagggcgccagctcaggccactggggcaacgcgattgcccgatttcgtaccaatggcggaacgcctttcgactatatcccgcatgagcacgatgttggcatgacggcaatattcgggcctatcgggaggggtaagacgacgctcatgatgtttgttctagccatgctcgaacagagcatggtcgaccgtgcaggtacggtcgtgttctttgacaaggaccggggtggcgaattgctggttcgcgccacaggaggaacatatttggcacttcacagaggcacacccagcgggttggcgccgttgcgtggcctagaaaacacagcagcctcacacgattttctgcgcgaatggatcgtggctctcatcgagagtgatggtcggggtgggatttctccggaagagaaccgccgtctggtccgtggtatccatcgtcagctctcgtttgatccacaaatgcgttcaatcgcggggttacgtgaatttttgttgcatgggcccgccgaaggcgcaggagcgcggctccaacgctggtgccggggccatgcgcttggctgggcatttgacggcgaagttgacgaagtaaagttagatccgtcgattaccggcttcgacatgacgcatcttctcgaatacgaggaagtatgcgctcccgctgcagcatatctcctgcatcggattggagccatgatcgacggccgccgttttgtgatgagctgcgatgagtttcgcgcctatttgttaaaccctaaattttcgactgtcgtcgacaaattcctcctgaccgttcgaaaaaacaacgggatgctaatactggcaacgcagcaaccagagcatgttctggaatcgccgctaggagccagcttggttgcgcaatgtatgacgaagattttctatccatcaccaaccgcagatcgatcggcttatgtcgatggactgaaatgtaccgaaaaggaatttcaggcgatccgtgaagacatgacggtcggcagccgtaagtttcttcttaaacgagaaagtggaagcgtcatctgcgaatttgatctgcgggatatgcgtgaatatgtcgccgtgctttcggggcgtgccaacacggtgcgctttgcaactcgactacgcgaggcacaagaaggcaactcatctggctggctcagcgaattcatggcccgtcaccacgaggcagaagattgataaggtaggaaacgatgaagacgacgcaacttattgcaacagttttgacctgcagctttctatatattcagcccgcgcgggcgcagtttgttgttagcgacccggcaacggaggctgagacgctcgcgactgcgctcgcgactgcggagaatctcactcagactatagcgatggttacgatgttgacgtcggcctacggcgttactggactactgacttcgctcaaccagaaaaatcagtatccttcgacgaaggacctagacaatgaaatgttttcgccgcgaatgccaatgtcgaccacggcacgtgcgatcaccagcgatacagatcgtgcagtcgtgggtagtgatgctgaagcggacctgttgcgatcgcagatcaccggttccgcaaacagcgctggcattgcggctgacaatctggaaacgatggacaaacgcttgacggcgaatgctgatacgtctgctcagctttcccgatctcgcaatatcatgcaggcaaccgtgaccaatggtttgcttctcaagcagatccatgacgcaatgattcaaaatgtacaggcgacaagcctattaacgatgactaccgcgcaggccggccttcacgaggcggaagaggcggccgctcaacgcaaggagcatcaaaagaccgctgtcatctttggtgccctcccctaaggctgggcgatttgttcatccgcccgcatcctcgccgaatgcgagctcattttatccaacattatgcgacaaaccagtcaagttcaggtccaatcgatgaatttcacgattccggcgccgtttacggccattcatacgatcttcgatgtagccttcacgacaggcttggactcgatgcttgagactatccaggaggcggtgagtgcgccattgatcgcctgtgtcactctttggattattgttcagggtattttagtcatacgcggcgaagtcgatacccgtagcggtatcactcgggtgatcacggtcaccatcgttgttgctctaattgttgggcaggctaactaccaagactatgtggtttccatcttcgaaaagacggtcccaaactttgttcagcagtttagtgtaaccggcttgcctctgcagactgttccggcacagttggatacaatgttcgccgtgacccaggccgtttttcagaaaatcgcatccgaaatcggtccgatgaacgaccaggacatccttgctttccaaggggcacagtgggtcctttacggcacgctctggtctgccttcggagtttacgacgccgttggaattctcacgaaagtgcttctcgcgatcgggcctctgatcctcgtcggatatatttttgatcgcacgcgggacatcgcagctaagtggatcgggcaacttatcacctacggtctcttgcttctcctcttaaacctcgtggcaacgatcgtcatcctaaccgaagcgactgcgctcacccttatgcttggtgtaatcaccttcgccggtacgaccgcggccaagatcattggtctttacgaactcgatatgttttttctgacaggggatgcgctcattgtcgctttgccggcgatcgccggcaacattggaggcagttactggagcggcgcaacccaatctgccagcagcttgtaccgtcgcttcgctcaggttgagcgaggctaggtcgcgcaaaaattcgcctcaatggagaattctatgaagtattgcctgctgtgcctagttgtcgctttgagcggctgccagacaaacgacacattagcgagctgcaaaggcccgatcttcccgctgaatgtggggcgatggcagcctactccgtcagatcttcagctcggcaattcgggtggacgctatgacggggcctgaatatgccatgctagtggcgcgcgaaagccttgccgagcactataaggaagtagaagcctttcaaaccgcgcgagcgaaatcggcgcgacgtctctccaaactcattgcagctgtcgcagctatcgcgattttgggaaatgttgctcaagcgttcgctatagccacaatggtgccgttgagcaggcttgtgcccgtatatctatggatacggccggacggcaccgttgacagcgaggtgtctgtctcgcgattgcctgcaactcaagaggaggccgtcgttaacgcctcattgtgggagtacgttcgcctgcgcgagagttatgatgccgacaccgctcagtacgcctacgacctggtatcgaacttcagtgccccaacagtgcgccaggattaccagcaattcttcaactatcccaatcccagttcgcctcaagtcattcttggcaaacgcggcagggtggaggtcgagcacatcgcttcaaatgatgtaactccaagcacgcagcaaattcgctataaaaggaccctcgtcgttgacggcaaaatgcctgtggtgagtacgtggaccgcgacagttcgctacgaaaaggtgaccagcttgcccggcagattgagactaaccaacccggcaggtctggttgtcacctcctatcagacatcggaagataccgtttcaaacgtaggccacagcgaaccatgatcagaaaagcacttttcattttagcatgtttatttgccgctgcgactggtgcggaggctgaagacactccaatggcgggcaagctagatccgcgcatgcgttatttggcttacaatcccgatcaagtggtgcgcctctcgacggcggttggagctactttggtcgtaacattcgccacgaacgaaacggtgacagcggttgccgtttcaaatagcaaagatctagcagccctaccgcggggaaattatctatttttcaaggcaagccaggtcctcacgcctcagccagtaatcgtgctaaccgcaagcgactccgggatgcgccgttatgttttcagtataagttccaagactctgtcccacctcgataaagagcagcccgatctctattacagcgtccaattcgcctaccccgccgacgatgcggcggctcggcgaagggaggcacaacagaaggctgttgtggacagactacacgcggaagcacaatatcaacggaaagctgagaatttattggatcagcctgtcacagcccttggtgcggcggacagtaattggcactacgtcgcccaaggcgatcgttcgctgttgccactcgaagtcttcgacaatggatttacgacggtattccactttccgggcaatgtacgcataccctccatctacaccatcaatcctgatggcaaggaagctgttgccaactattcagttaaagggagcgatgtcgagatttcttcggtttcccgaggttggcgtctgagggatggccacacagtactatgtatctggaacaccgcttacgatcccgttggccaaaggccgcaaacgggcacggtgaggcccgatgtgaaacgcgtcctgaagggggcgaagggatgaataacgatagtcagcaagcggcacatgaggttgatgcatctggatccctggtctccgacaaacatcgccggcgtctttcggggtctcagaaattgatcgtcggaggtgtcgttctcgcgttatcattaagcctcatttggctaggtgggcgccaaaagaaggtgaatgagaacgcatcgccgtcaactttgatcgcaacaaacaccaagccatttcatccagctccgattgaggtgccgccggatcctccagcggttcaagaggctgttcagcctgctgctcctctaccgccgaggggcgaaccggagcggcatgagccacggccggaagaaacaccgatttttgcatatagcagcggcgatcaaggggtcagcaaacgcgccattcagggcgacacgggccgaagacaagaaggcaagcgtgacgacaactccttgccgaatggcgaagtgtccggcgagaacgatttgtcgatacgtatgaaacccaccgagctgcagcccagcagcgccacgctcttgccgcaccccgattttatggtaacgcaagggacaataattccgtgcatcttgcaaaccgcaatcgacacaaatttggcaggctatgtaaagtgtgtcttgcctcaggatattcgtggaacaacgaacaatatcgtgcttcttgatcgtggcaccaccgttgttggcgaaatacagcgtggcttgcaacagggagatgggcgcgtttttgtgttgtgggatcgcgccgagacacctgaccatgcgatgatctcgttaacatcgccaagcgcggacgaactcggtcgctcaggattgccgggctcggtcgacagccacttctggcagcgttttagcggagctatgctcttgagtgttgttcaaggcgccttccaggcagctagcacctacgccggcagctcgggtggcgggatgagcttcaacagctttcaaaataacggtgagcagacaactgagacagcccttaaggcaaccatcaacataccgccaaccctgaagaagaatcagggtgacaccgtttccattttcgtagcacgggacctcgatttctttggtgtttaccagctccgcctgactggcggcgccacgcgggggaggaaccgccgctcttaatgaattcaaatttccgcttagagataggatacattgtaaatggaagtggatccgcaactacgctttcttctgaagccgattttggaatggctcgatgacccgaagactgaagaaattgcgatcaatcgacctggagaggcatttgtgcgccaagccggcatttttaccaagatgcctttgcccgtctcttatgatgatcttgaagatatcgctattttagcgggcgcgctgagaaagcaggatgtcggaccacgtaaccccctctgcgccactgaacttcctggtggtgaacgactacaaatctgtctgccgccgaccgttccctcgggcaccgtcagcttgaccattcgacggccaagctcgcgtgtttctggtcttaaagaagtctcctcccgttatgatgcttcgaggtggaaccagtggcagacacgaaggaaacgccaaaatcaggatgatgaagctatccttcagcattttgacaacggggatttggaagcgtttctgcacgcatgcgtcgtcagccgactgacgatgttgctatgtggccctaccggaagcggcaagacaacaatgagcaagaccttgatcagcgccatccccccccaggaaaggctaatcaccatagaagatacgctcgaactcgtcattccacacgataatcatgttagactactctactccaagaacggtgctgggctgggtgctgtgagcgccgagcacttgctccaagcaagtctgcgtatgcggccggaccggatattgcttggcgagatgcgcgacgatgcagcatgggcttatctgagtgaagtcgtctcgggacatccgggatcgatttcaacaatacacggcgcgaatccaatccaaggattcaagaaactgttttcccttgtcaaaagtagcgcccaaggtgctagcttggaagatcgcacactgattgacatgctctctacggcgatcgatgtcatcattccattccgtgcctatgaggacgtttatgaagtaggcgagatctggctcgcggcggacgcacgacgccggggcgagaccataggcgatctccttaatcaatagtagctgtaacctcgaagcgtttcacttgtaacaacgattgagaacttttgtcataaaattgaaatacttggttcgcattttcgtcatccgcggtcagccgcaattctgacgaactgcccatttagctggagatgattgtacatccttcacgtgaaaatttctcaagcgctgtgaacaagggttcagattttagattgagaggtgagccgttgaaacacgttcttcttatcgatgacgatgtcgctatgcggcatcttattatcgaataccttacgatccacgccttcaaagtgaccgcggtagccgacagcacccagttcactagagtactctcttccgcgacggtcgatgtcgtggttgttgatctaaatttaggtcgtgaagatgggcttgagatcgttcgaaatctggcggcaaagtctgatattccaatcataattatcagtggcgaccgccttgaggagacggataaagttgttgcactcgagctaggagcaagtgattttatcgctaagccgtttagtacgagagagtttcttgcacgcattcgggttgccttgcgcgtgcgccccaacgttgtccgctccaaagaccgacggtctttttgttttactgactggacacttaatctcaggcaacgtcgcttgatgtccgaagctggcggtgaggtgaaacttacggcaggtgagttcaatcttctcctcgcgtttttagagaaaccccgcgacgttctatcgcgcgagcaacttctcattgccagtcgagtacgcgacgaggaggtttacgacaggagtatagatgttctcattttgcggctgcgccgcaaacttgaggcggatccgtcaagccctcaactgataaaaacagcaagaggtgccggttatttctttgacgcggacgtgcaggtttcgcacggggggacgatggcagcctgagccaattgcatttgattaatttaggtgactgaggacgcggccagcggcctcaaacctacactcaatatttggtgaggggttccgataggtccctcttcaccaattgctcgatggcttctctccagcaaagaatgacgcgagcgcggcggtagccagcttgtggccgaaagctcgagcggtctccaaccccaacggatcaaaatgacttcgagcgacctcgagcaacgcaaccgggaacatgcgtgaggtctgaacgagaacggatttttctgtagttgaagggatcggataacttttcggggccacgcgaaatgatccatctgccagcatgctttcgaaatcgtccaacgcgcgccttaaaatcatttgtagcgacttcgagggactgtattgccgaacgaggttgtcatatgttttcgacacttgaggcgcgggcggtcgcgctgaaagaaaaacctggagctttttcggggacggaggtggactaagggcatccacagttagcttaagttgtcgatcgggactgtaaatgtgatcggcgacgagaggctcacgttgctggtctttctcgtcggctttttcaggcaagtgctggaggtccagcttctggggaacaagtgtcgggttgggatggtggatctcgggtcgagcaccagcaagccgccgtgcttcgccgaccgacaatgcgggcttgcgaattgccatcttcaagcctccaagattttgctgatcagtttcgaaatgaccacgacttcctccatcgcaatccgaagattcctctctatgaggcgcatcgtcggatcagttcccgtgtttagtaatgtaagatgcaacatgccgcgttctttcatcgcggcaaatgcatctctttcatgcatgggagacggtacaactggaaggctctctagcgtctctgacatcctgcgttgcgatgttgtcaatcggccgaccgggacgcgttggcgcaaaacagctgtaggaattgccaaattttcactcaacagcagctcgatgacgtagcggtaggtagatagtgcctcatcgatgtcgagcggcgttagcatggtggggatcagaagcaggtttgagctagcgatgattgtgttgttgagctcgctcgagccgccacgcgtatcggccaacgcataatcaaatccttcgagctcggcattttcataggctgcttcaagaaggggcatttcgtcggcggaatagacttcacagcgaggatcccaggtactgctttgtaaggcgttttctctccatcgcgtcagaggccggttttcgtcggcatcaaagagggccactcgtttaccgtcatttgccaaagcagcgcaaaggcccatgagtgcggtggttttgccagcaccccctttgaaagaacaaaacgtcaaaagttgcatattctgatcccgcctatcctgtgaaaccggagtgcatttgtatttttgttcgtataaatgtttttgtgattatcgatgagtaaaagcgttgttacactatttttatttcacattcgttataagacaattgcaaatgtagcaagtatattcagtattgactgtaaatgtactgttgatttcatattgagcagggctagacttccatccgtctacccgggcacatttcgtgctggagtatccagaccttccgctttctttggaggaagctatgtcaaaacacaccagagccacgtcgagtgagactaccatcaaccagcatcgatccctgaaagttgaagggttcaaggtcgtgagtgcccgtctgcgatcggccgagtatgaaaccttttcctatcaagcgcgcctgctgggactttcggatagtatggcaattcgcgttgcggtgcgccgcatcgggggctttctcgaaatagatgcagacacacgagaaaagatggaagccatacttcagtccatcggaatactctcaagcaatgtatccatgcttctatctgcctacgccgaagaccctcgatcggatctggaggctgtgcgagatgaacgtattgcttttggcgaggctttcgccgccctcgatggactactgcgctccattttgtccgtatcccggcgacggatcgacggtcgctcgttactgaaaggtgccttgtagcacttgaccacgcacctgacgggagaaaattggatgcccgatcgcgctcaagtaatcattcgcattgtgccaggaggtggaaccaagacccttcagcagataatcaatcagctggagtacctgtcccgaaagggaaagctggaactgcagcgttcagcccggcatctcgatattcccgttccgccggatcaaatccgtgagcttgcccaaagctgggttacggaggccgggatttatgacgaaagtcagtcagacgatgacaggcaacaagacttaacaacacacattattgtaagcttccccgcaggtaccgaccaaaccgcagcttatgaagcaagccgggaatgggcagccgagatgtttgggtcaggatacgggggtggccgctataactatctgacagcctaccacgtcgaccgcgatcatccacatttacatgtcgtggtcaatcgtcgggaacttctggggcaggggtggctgaaaatatccaggcgccatccccagctgaattatgacggcttacggaaaaagatggcagagatttcacttcgtcacggcatagtcctggatgcgacttcgcgagcagaaaggggaatagcagagcgaccaatcacatatgctgaatatcgacgccttgagcggatgcaggctcaaaagattcaattcgaagatacagattttgatgagacctcgcctgaggaagatcgtcgggacctcagtcaatcgttcgatccatttcgatcggacgcatctgccggcgaaccggaccgtgcaacccgacatgacaaacaaccgcttgaaccgcacgcccgtttccaggagcccgccggctccagcatcaaagccgacgcacggatccgcgtaccattggagagcgagcggggtgcccaaccatccgcgtccaaaatccctgtaactgggcatttcgggattgagacttcgtatgtcgctgaagccagcgtgcccaaacaaagcggcaattccgatacttctcgcccggtgactgacgttgccatgcacacagtcgagcgccagcagcgatcaaaacgacgtcatgacgaggaggcaggtccgagcggagcaaaccgtaaaagattgaaggccgcgcaagttgattccgaggcaaatgtcggtgagcccgacggtcgcgatgacagcaacaaggcggctgatccggtgtctgcttccatccgtaccgagcaaccggaagcttctccaacgtgtccgcgtgaccgtcacgatggagaattgggagaacgcaaacgtgcaagaggtaatcgtcgcgacgatgggcgcggggggacctagactagtagacaggaaggaccgaataatggcaaatggtcagttcacgatacgctctgctcgcccggcctccgtcggactgacaggcgaacggcgtggagccgcatccgcctctagctctgcactgtccaatgttcaaagagatgttagggataggctgattccaactagctcaccaagattaccaaatgcagccatattgcgtgattcctcgggaagagcgtcgactggtctgcggtacatggcggctactcttcattggtctgcgatcgcgccattatcgctaataaacagcaacgacctggctccggccgcttatgactttgagacgcgaaataacgcaagaaatgtgactgccaaagtcggcagggcagtccctgttcccaagcaaggcgggctcggcaaaacgctcgcacccgtaccccttagtacacgtatatcaagggtcaattccgaccgaagactgcccgctgacgcagaagaccgccctgaaacgcgcgacccccagaaaggacgtggcagtcatggtgcgacgccaaccttacatgaaaagattggaaccgcgtttgctcgaagattgcgaaagcatacgtactatattgtttgcagttgctgccagacccggagcgcgttgacgatgggtgcaaagatttcggtgaagtcatgaactccagcaagacttcgccccagcgtatgaccctgagcatcgtatgttcgctggcagccggtttttgtgcggccagctgctatgtaacgttccgccggggcttcaacggcgaagcgatgatgacgttcgacgttttcgctttttggtatgagaccccgctttacttgggttatgccagcaccgtcttctggcgtggtttatctgttgtcatctttacctcgctgatcgttctttcaagtcagctcatcatatcgctgcgcaatcagaagcatcatgggacagctcgttgggcagaaattggcgaaatgcggcatgctggttatctgcagcgttacagtcgcatcaaggggccgatctttggaaagacatgtggtcccctttggttcggcagttatttgaccaatggcgaacagccacacagtcttgtcgtcgcgccaacgcgtgctggcaaaggcgtcggcatcgtcattccaacgctgttgaccttcaagggctcggtaatcgcccttgacgtcaagggagaattgtttgaactgacgtccagagcacgcaaagcgagcggcgacgcagttttcaagttctcccccctagatcctgagcggaagactcattgttacaatccggtcctggatattgccgcacttccgcccgaacgccagttcactgaaacacgccgtctagctgcgaaccttattacggctaagggaaagggagcagaaggctttattgacggcgcacgtgacctgttcgtcgcgggaatccttacctgcattgagcgtggcacaccaacgattggcgcggtatatgacctatttgcgcagcctggcgaaaagtataagctttttgcgcaactcgcggaggaaagcctaaacaaagaggctcagcgtatcttcgataatatggcgggcaacgacacgaaaattctgacatcgtacacctctgtgctgggcgacggtggactgaacctgtgggctgatccgcttatcaaagcagcgacaagccggtcagacttttccgtttacgatctccggaggaagaagacctgcatttatctttgtgtcagtcccaacgatctggaggtcttggcaccacttatgcgcctgatgtttcagcagctcgtgtcaatcttgcagagatcgctgccaggtgaagacgagtgccatgaagttttatttctcctcgacgaattcaaacacctgggcaagcttgaggccatagagaccgcgatcacaaccatcgccggttacagaggccgctttatgtttattattcaaagtctttcggccttgtcgggcacatacgatgacgcaggaaaacaaaactttctgagcaatactggcgtacaagtatttatggccacggctgatgacgaaactccaacctacatctcaaaagctatcggcgaatatacgtttaaagcgcgttcgacctcttacagtcaagccagaatgttcgaccacaacatccagatttctgatcaaggtgcagcccttttgcgccccgaacaagtgcgcctgctagacgatcagagtgaaatcgttctcatcaaagggcgacctccactcaaattacgaaaggtgcagtattattccgatcgtacgctgaaaggccttttcgaacgccagatgggctctctgcctgagcccgcacccttgatgctttccgactatagcaacgatcaagttcaataccacttggctccgatagcaaattttaatgaggatgctgcaccgcaaaacagaactgtggccgaggaccatggaagtgttaaagtcggtgctgatatccctgaacgcgtgatgggaataaatggtgacgaggaacaagccgatgcgggcgagataccgccggaatcggttgtgcctccagaattgacgctcgctctgaccgctcaacagcaattgttggaccagattattgcacttcagcaaagatcgaggtccgcaccggcatagcctgcgaaatgatcttaatggtgcaattcgtttcaggcggcatgttgcggttcaacaaagtgtacgccagatcccaattggccctttacgaggtgtcggtatgacaggaaagtcgaaagttcacataagaggttcggctgacgcgcttcctgacgttcctggcggaagtactaccgccccttttttaaccgaaccttctcgggatcaggttgatgcctcgtttgaggtccaaaccgactacagccagtctacttccgtgtcgtttacctatgatggtgttggacttggtcctgccgagcgtgcggcttacgagaactggtgcgaaccgggccggcccacttggaaagatcttataatcaaggcacgtgtcgatccgattgacgatgtgacctggctccgagatttagaagaggacaccccctcaaccttcagatacgaagggatgcctctgggcatcggggaacgacaggcctacgaaaattggcaagaggacgctcagccgacatgggaagaccttgttgtcagcgcacgcttgacggaacttggccgtccacacgggattaccggcgagtatacatccctcgcaggatcgaagaatacaagttcaatttcattgaagcgaaagcggagcaacttaattgatgatgagaattcatccggatcgttttcatatgacgggatgaagctcggggaagccgagcgttctgcatatggtgactgggccgaggcggagccacccacgtggaaagatttggtattgagggcacgcgtttcctcgatcaatgactctgcttggctttttgattcacaaacatcttcatcatcatttgaatacaacggtgttcccttgggcgagccggaacggcaggctctcagacaatggcaaggagacgctcagcctacctgggaagatctcgttgttaacgcgcgtatggcagaactttgccatgctggttggattgaaggtcaaaaaggttgctttgaagagcgcggggaggctctgcccgcgtcggaacgcggttcgcaacgccccattggtcaacggacagattcctccgattcttttgtgtatgatggcacaaggctcggagcacctgagcgaactgcttatgaacgctggagtaagagggaacgcccgacttgggaagatctcatcttagatgcacaccaggccaggactgaaagtgacgctgttacgacccaagcgattggtcagtcgtcctcaccggttttcttatatgaaggaaagtcgctcggagacagggaacgaaaggcttacgaaaaatggcggcagccagcccaaccgcgatggcaaaatcttgtagtgaacgctcgtctggcagaaatcgatccctcagcctggattgccgatgagcgcgatccgcttgatgatagcgacgcgcttggtcgcccgtcgtacacaagcttgacggatagatcagacgtccctttagacgatcaatcaatctatcgtcgttccgacctagtaagggagcaggtgccagaatcgtctcaaaggcaattcgcagcatgttcagaatctgaaacgaggcctgtgcaatggtttactgcttctgggtcagatgcaaacaatacggaaaatatcaccgccagcgatcccgtcgatcgcacgggtggagttaagcggctaggctccaaaagcgacagaaccgttacagcttctatccatgacgtgaattccagcacaaggcgactgttgcttaacgaatttggatcggaggctccgcgcccttcgccagaaaagactgttcgcttaagaagcgacaatattggcacctatgggagccggaaaaatgaacgagcgcggctcgcgaccgaaaccggtgcgtatgagtcggagcatattttcgggttcaaggctgtccacgatactgcgagagcgacgaaagagggccggcgtctcgaaaggcccatgcccgcctaccttgaggataaggggcttcatcgccaacatattggcaccgggagaggacggaccaaacttgtcgggcgcggatggccggatgacacaagctatcgctcggatcaaagggcaactctgtcggaccccgttgcgcgctcggaaggcgcgacggcctcaaatgggtatcaattgaaccaattgggttacgcgcaccaactcgctagcgatggcctgcaaagtgaatcgcccgatggtgttgccttgccaattcaagtggcaacaacgagctacaactatacagtgagccgcgatcctgtccttgttccgccggataaaaacgaagcccctcaattgctgcatcttggtccccgtggtcaaaccgaagctgttcttgcccgcgaaacagcattgactggaaaatggccgactctcgagcgtgagcagcaagtgtatcgcgagtttttggccttatatgacgtaaaaaaagatcttgaggccaaatcagtcggcgtaagacggaaaaaaaaagaagttatttctgcgttagaccgaactgcgcgcttgataagcacgtcgccttcgaaagctcgatccaaagcagagactgaaaaagccattgatgagctcgatgatcgacgagtttatgatccgcgtgatcgagctcaagacaaagcgtttaaacgctgataagtcgccaatatagtgatcatttgcagtattcgcatcgatcgctggttgatattctgccgctggtcgaccggctgctcgtcgccaaaaatgctcacagggatacgatggcctcggtcaggccgcgtgcgtcctgtctttccagttcctccctttcagctcgattgtggcatcatttattgcctgctcattgcagttgaaacgcgatatccgtttcaagacccgggt

SEQ ID NO: 239 - DNA, 38871 bp, synthetic construct
  misc_feature 1..38871: note = RV007497
  source 1..38871: mol_type = other DNA
cgcgccagcgagttgctttctctcgttggctgatgggaagaaagcgcataggagtcgccgccaaattcttgtcggaccagcttggtttgttcggtcggtgtttttcaccgtggatgcggagtaatgagaaactgggtcagaccactgggctccgttgattccgcgaaatctgcttagttggattggctgtcagaaggagaggtgaccgcatgatttgggatcatttatcaccttcccgaagggttctgcttgatatcaaatcgtggtctgtattggtactggtaattgcctcgatatcttttgcggttctggccataggatcttggcaagacaacgaaagcaacgaagcgatcctgacagagctgcaatcgatcgacgtggattgcgcgatgctgcagcggaatgtgttgcgtgctcacgccggccttcttcggaattaccatcctcttatcgtccctctggggcgactgcgcacgagcgtcgcagatttacagcagctttttaggcgggcgggcctcgacggggccggtgaattttctgaattgctggcgcgggtgaagagctcagtagatgcgaccgacgcagccgttgcagcgttcggtacgcaaaatgtaatgttccaggattcgttggcgacctttaaccagtcgatagcttcgcttccgaggtctttggatacgagggatttgaactcgctagaagtcgctgagttgggctatctgatgctccagttttcgtctcagccaaatttcgagtttgcacgggaaatcaaccaacgtctcgaccggcttcaggtttcggcgaacggggataaggcaggcgtcaaggagatcgttcgcagtgggaggattatcctgactctactgccgcgattgaaagacaccgttggagtgatccaaacttctgaaaccatcgacaacacgaagaagttgcagcgagcataccttgaagcttatagcttggccagcgcgggtgaacagcgggtacgggtcttcctcggcgcagtttcggttttcttttgcttttgcataatttccctagtccataggttacatctgcgaaccaaggtgttgacgagacgactggacttcgaagaagtgatcaaaaagattgggctttgcttcgaagatgcttcagaagcaaaaccgtcgttggaatcctcaacgaatgccgcgttgggaattatccaattattctttgaagctcatcaatgcgcgctgggactggtcaacatcaatgagaatgacgttggcgtcaccttttttggaagcactcctgcgccagagtggaacgaacaacgggtgcgcgaaattgtttccacggtaggggccgaggacggcgggcggattttccgagcctatcctcaacgaaaagcgagctgcttcggtgaggactctccatttctgtgggtgctgcttgcgttcaaggtatccgatcgaatagtcgctgtctttggcctgggatttgatcgagagcatctacagacgccgaccgcacgtgaaatgcagctgatggaactagcggctgcatgtgttagccactatgcggtcattcggcgcaagcagtcccagcgagatattctggaacgtcgtttgaaacatgcggaacggcttgaagcagttggtacgcttgccggcggcattgcgcatgaatttaacaacattttgggtgcagttctgggttacgcggaaatggcacacaacgttctgcgccgtcgtactcatgctcgagactacatcgatcacatcatttctgaaggcaatcgagcgcggttgattgtcaaccagatccttgcccttagtcgaaagcgggatcgaacaacaaaaccattcgatctttcggagttagtgaccgtgatcgcgccgtcgttacgtgttgcgttgcctccgggcgtcgagctcgatttcaaatatcagagcgctccaatggttatcgaaggaaactcacttgaggtcgagcaaatactgatgaatttgtgcaaaaactctgctgaagcatgccgagagttagggcgtgtggaggtcagcgttaggaggtctgtcgtacggaaacacaaggttcttacaaacggtactattcccaccggcgagtatatccttctttcagttgaggataacggcgcaggcataacagaggcggtattatcgcacattttcgagcctttttttactacccgcgcccgcagcggtggcacgggcctgggattatccacggttcacggtcacgttagcgcgatggctggttacatcgacgtggtatcaactgtcggcagaggtacgcgcttcgacgtctacttgccaccttcgtcgaagcagccggtaaattcagagagtttttttgaccctggaagaatcccgcttgggaacggcgagattgtcgcggtggtcgaacccgacttagccacgctggaaatgtacgaggaaaagatcgcggcgctgggctatgagccagtcggctttaacacgttggatggtttaatcgactgggtgttggaaggaaaagaacctgatcttgttctaattgatcaaccgtctttgctggatggagacggtgcagggtccttaatctcaaagctggcaaaagcgcccatcatcattattggcgaaaaccagaaaaatgttcccctttctgcggatcgcgagggatctgcccgttttttggaaaagccgatttcagcaaagactctcgcctatgtcgttcgtgcgaatatcagaactgaacgaatggtcggctcgaatagcagcggaatcgtgattgcgtcataaaccgatacgccctctgaacagaagccggccgcacaacgcgattgcttattaatttaatccccagtcgcggaatcagccggtcagtcccgacatccgcaacaacgcaactccggttgcggctgcaatcaccgccagtgatatacaggcaaaaaaccggtaaacctgctcttttgatgttaagaggagatggatcgaagcgatcatcagaaggaaaatcgtcgcaagtgcgccatacgcccaatactcgttcgaataaagccatgttcccaaagccaacagaccgcaaacaaaaaaaacgagttcgagcttttgcaagacaacacctcaaaaagatctcgttgtgatcctaggacatcggtctcgcaggtcaatactgcgatcgcgtttcatgcaacggacttgatgtatctgccgcgcggcactaggagacgtgaggaacggccccctgtctagggtgcagtcggtgccgatctccgcttcgggggcgctttgcgaaatctcctgcggctgcaccatcctccgcgccagcctgcgaaaattttcgaaaaccgccgctatggtgaattcgctctcatggcctagggatcaccgcttgggccgccgattccctcgattcaagaaatcaaacggcttcgcttcgatgcttcaaatgaaaccgagaggtaagataataaaatcagaaagtaacagacacctcccatagtcgcgactgttagcgatcgagtcatttcatgctgaccaagatcattgcgatacagtggggaataaacaatgcggaagacggcaggatctttcgggatcatttttctgatggtccagccaagcaaagctgcgccgctctcgttcgctgaatttaaccaactcgctcgcgaatgcgcaccttcagtcgctccatcgacgcttggagcgattgcgaaggttgaaagtcagtttgatccgctcgtgctgcatgacaataccaccggcgaaactttacatggcaagaatccggcggatgctacgcaaagcgtaaacaatcgcgtcgcagcagggcattcagtcgatgtaggcctaatgcaagtgaactcgaaaaatttcgcgaacttgggcttgactgccggcaatgcaatcaacccttgcgtgtccctgtcggcggcggcggacctgctcgtacggcattatagtggcggcgacacggtagagtcagaacaacttgccatccggcgagcaatttcggcttacaataccggcaacccgacacgcggcttcgcgaacggctatgtgcggagggtcgaagtggcggctcagctactcgtccccccgctggctcagtcggggaaaaaaggcgaccgtgatgagcggagtccagaagaaccctggaacgtctggggttcatacgaccgctcccactcagcagtcggttcgtccgcgccgccagaggcgcagcagccgaatgagcgcaaatcccccgaacaagatcaagttttcgaaccgaatgatggagatgcaccataatggcatggcttgaaggataccgcgcaccgtcgaaattccgtggcctctggcacagagctgtgcgcctgctggctccgcacgtgccgagcgtcaccggcgcgatcggctggagcttgtttttctgcgagccagctgccgcgcaggccgctgggggcactgaccccgccaccatggtcaacaatatctgcacgtttattctcggtccgtttggtcaatcgctcgccgttcttggtatcgtagccatcggggtatcgtggatgttcggccgagcttcccttggtctggtagcaggtgttgttggcgggatcgttatcatgtttggagccagctttctcggccaaacactgacagggggcgggggatgaatgccgatcttgaagaagccacactctacttggcggcaacgagacctgcattgttctttggggtaccgctgacgcttgctggagttttcatgatgttggcggggtttctcatcgttgttgtgcagaaccccctctatgaaattgttctcttgccgctgtggcttggagcgcggctcatcgtagagcgggactataacgcggcaagcgtggtcttgctgtttctccagacggcagggagaagcgttgacggccatgcgtggggcggcgcgagcgtcagtcccaaccccatcagagtggcgtcgcgaggaagaggaatgacgtaatgttcggagcaagcggacggaccgagagatctggggaaatctacctgccttacgtagggcacctcagcgaccatgtcgttcttctagaggacggttccatcttgaccatggcgcatatcagtggccttcccttcgaactggaggaagtagaggtccgaaatgcgcgctgccgtgcctttaacacgctctttcgcaatattgccgatgataacgtctcagtatatgcccatctcgtccgtcacaacgatgtgccagtaccgccggtacgccattttcgcagcaccttcgcgtcaagcctaagcgaaacgttcgagcggcgtgttctgtctggtaaactgtttcgaaacgaccacttcctcacgctcattgtctctcctcgcaccgctctcggtaaagtgggaagcagattcaccaggcgctatgggaagaacccaggcgatcttgcgcatcagatccgacatctggaggatctttggaacgttgtcgctggcgcgcttgatgggtatggacttcgtcgacttggcatccgagaaaaaaatcaggtgcttttcacggaaattggtgaagcccttcgcctgataatgacttgtcgttttttaccggtgccggtcgttagcggatccctcggcgcctcagtttataccgaccgggtcatctgcggcaagcgtgccctcgagattagagcgccgaaagatcgttacgttggatctatcttttcattccgcgagtacccggcaaagacgcggcccggaatgcttaacacactcctgtcatcaagttttccgctcgttttgagccagagtttctctttcctcacacgtgcacaggctcacgccaagctcagcctcaaatcgaaccagatgactagctccggtgacaaggcggtcacccagatcggtgaactcgcccaagcagaagattcattggccagtagcgaattcgtcatgggttcgcatcatctcagcctttgtgtctatggcgatgatctcgatacccttgccgactatggtgcgcgagcccgcacgagcttgtcggacgcgggcgcggttatcgtgcaggaaagcattggaatggaggctgcatactggtctcagcttccaggaaaccacagatggcgtacccgtcccggagcgatcacttcacgcaactttgccggcttggtttcattcgagaacttccctatcggaaggaagtcgggccattggggaggtgcggttgctcgtttccgtacaaacggcgggacgcccttcgattatattccgcacgaaaacgacgtgggcatgaccgcgatcttcgggccgattggcaggggaaaaacgacacttatgaccttcatcctggcgatgcttgagcagagcgtggttgaccgcagcgggacgatcgtttttttcgataaggatcgtggcggtgaactgcttgtgcgcgccaccgggggcacgtacctcacgttacgacgaggtgtcccaagcggccttgcacctttgcgcggcctagaggatacggcagcggcgcgggactttctccgcgagtggatcgtggcgctgattgaaagcgacggcagggggggaatttcgccggaggaaaatcgccgcttagagcgcggtatccaacggcaactttcgtttgagcctaacatgagatcccttgcgggcttaagggagttcttattgcacgggccctccgaaggtgcgggagctagattgcagcggtggtgccgaggcaacgctcttggctgggcgtttgacggcgaatcggacgaagtgaagttagatccttcgattacgggcttcgatatgacccatctcctcgaatatgaggaggtatgcgcgccggccgcagcataccttttgcatcgaataggagcgatggtagatggccgacgcttcgtcatgagctgcgatgagtttcgttcctacctgcttaatcagaaattcgcagcagtcgtcgacaagttcctgctgaccgtccggaagaacaacggaatgttagttcttgcgacgcagcaacccgagcacgtacttgattcaccattgggcgcaagcctcgtagcacaatgtatgaccaaaatcttctacccatcacccactgcagaccgctctgcttacatagacgggttgaagtgcaccgagcgagaatttcaggctattcgcgaggagatggcgattggcagccgcaaatttctgctgaagcgcgagagcggaagtgttgtgtgcgaattcgatctgcgcgacatgccggaatacgtcgccgtactatccgggcgtgccaatacggtgcgttttgcccagcagttgcgcgagacgcatggagaggaaccctctgcctggctggaaaaattcatgacgcgctaccatgaggcacaggattgatctggagttcgaagtcatgaatattacgaagctcgtaataaacgcacttttcatatgccttgttctgtcggggactgccaaggcgcagtttgttgtcagcgaccctgcaacggaggccgaaacgctgacgacagcgatcaatactgcggcgaacctcgagcaattgatcacgatggtgacaatgttgacctcgccctttggcgtcaccggcatgttatcagcgatcgaccagaaaaaccaatatccctctgccggccaactcgacaaggaaatgttttcgccgcagatgcctgcttcgacaactgcgcgtgcaattaccttagatgccgatcgcgcagtcgtgggcgacgacgctgaaggaaatcttttgcgacagcagattgcaggcgccgcaaatgctgccggtgtcgcggctgacaatctggatgcaatggacaagcgccttgcggcaaattctgagacatcgggccagctctcccgctcacgcaatatcatgcaggccaccgtcaccaacggtttgcttctcaaacagatccatgacgcaattattcaaaacattcaggcgaccagcctgttgacgatgaccaccgcacaggcggggctgcacgaggcggaggaggcggcgacccaacgaaaggaacatcaggcaactgcgcttatatttggcgccgctcaactacactgatccgctactgttcattcagggccctctttctccgtagaaaatcgaagctaaatccaggtaagggcaatgaattttagcattcctgcgccttttacggcgatacatacgatattcgacctcgccttcaccgtcgggctggacacgttgcttggggacattcaacgggcagtcagcgctcctctcgtggcctgcgtgacgctatggatcattgtccagggcatcctcgtaatgcgtggggaaatggacgcacggggcggaatcacccgggtaatcatggtatcggtagttgttgctcttatcgttgagcaggcggaatatcatgattacgttgtctcggttttcgaggatacgattccgaatttcattcaacagttcggtatcagtgggcttcctttgcagacgattcctgctcagctcgacacgatgttttcactcacgcaagtagcctttcagaagattgcttctgaaattgggccgatgaacgatcaagacatcctcgcctttcaaggcgcacaatggattttctatggaacgctttggactgcgtttggaatctacgatgccgtcggaatcctcaccaaggtgctattggcgatcggtccattgatgctcgttggctatctcttcgatcgcactagagacatggccgcgaaatggatcggccagctcgtcacttatggcatacttctgcttcttctaaacatagtggcaactatcgtggttctgacggaagcgacggcactcgtgctaatgctcggggttatcacttctgctggcacaacggcggccaagataataggcctctatgaactcgacatgttctttctgaccggcgacgccttgatcgtcgctcttccggcaatcgccgggaatattggagggagctattggagcggtgcgacgcaaacggccggtagcttaaatcgccatttcgcccggacaatccgccgttagtcccagcttcacaaatggaggatttccttgaagtactttctattgtttttgatcatcggcttggcgtcttgtcagacaagcgatcagttggcgacttgtaaggggcctatttttccgctgaacgtcgggcgatggcagcctgctcagtcggaccttcagcctaccaacgcaggagaggctaatgaacggctctgaatacgcgctgttagtagagcgggaagcattggcggaccactataaggaagtagaagcatttcagtctgcacgtgctagatcagctcggcgaatctctagagccttggctgctttggctgtcattgcagtcgcaggaaacgtggcgcaggccttcgctatcgccgtcatgcttccgctgaacaaacttgttccagtatatctgtgggtgcgcccagacggtacagttgacagtgaggtatctatttcgcggttgccggcgacgcaggagcaagcggtcgtgaatgcgtctctatgggagtatgttcgtctgcgggagagctactcggcggatacagcccaatacgcctatgatctggtctcgagcttcagtgccccaacggtgcgtcaagattatcagcagttcttcaattaccccagtcctagctccccccaaaccatcattggtaagcgcggaaagctggaagccgagcacatcggctcaaacgaacttatgactggcgtccagcagatccgctacaaacgcactctcatcatggaagggcaagctccaatagtaaccacctggaccgcaacggtacattatgaaacggtaactaacttgcccggccgattgaggctgacaaatccaggcggcttaatcgttacctcctatcaaacttcggaagataccgtttcgaacacgacgcggagccagcaatgatcaagaatttgtttctgggcctggtttgtatcctctttgtaaccagcggcgcgaacgcggaagacacgccagcggcaggcaaactggatccacgtatgcgctatctcgcctacaatcccgatgaggttgtgcacctttcaaccgctgttggagccacattggtcgtaacatttgggtccaatgaagcggtgacagccgtcgccgtttccaacagcaaagatctcgctgcgctcccacgcggcaattatctgtttttcaaggccagcaaagtgctgcagccgcagcctgtgatcgtccttaccgcaagcgacgcaggaatgcggcgctatgttttcagcctcgcgaccagaacgatgtctcggctcgataaagagcagcctgacctctactacagcgtacagttcacttatcctgccgacgttgccgctgctcgccgaaaagaagcggagcagagagatcttgcggatcggatgcgggcgcaagcacaatatcagcgtcgagccgaggacttgctcgagcgtccgccagcaggtggcagcacagatgcgaaaaattggagctatgtcgcgcaaggagaccgctcgctattaccgctcgaggttttcgacaacgggtattccacgacatttcgctttcccggaaacgtgcgtgtaccttcaatctacgtgattaacccagatggcaaggaagccacggccaactattcagttaagggagattacgttgaagtagcatcagtttccagggaatggcgtctgcgggacggccatacagtactttgcatctggaataaggcatatgacgccgtcggacggaagccgggcactggcacagtcagacccgatgtagtgcgcgtgctgaaggagacgaggtgatggaggacgtgaatgcccaatccagagaaggtatcgacgcgcccggatccctcgtcaccgatcctcatggccggcgcctctcggggtcgcaaaagctccttgttgcgggtttagtcctggtactgtcgttgagcctcatttggctcggggcgcgttcaaagaaaaggaccgagccgtctccaccaaacacaatgatcgatgccaacacgaagccctttcggccggccccgattgatattcccgccaaaccggcaatgacaccgccagctgcggaagcaacggttttgccgtcggatcaacatcagcgagaacacaacgaactgaggcccgaagaaacaccgatctttgcctacagcggaggtgatcagaatggtgtcaaatccgccccacacgctgatattcagaacggtggccaagacaatagaaacgccaactccctagccgcgtcggaggattctgctgagaacgatctctctgtgcgcttgaaaccgacagtgttgcagcctagcctcgctatacttttgccgcacccagatttcactgttacgcaaggaacgatcattccctgcatactgcaaaccgccattgatacaaatctggcagggtatgtgaaatgtgtacttcctcaagacatacgcggagcaaccggaaatgttgtgcttctggatcgcggaacgacagttgtcggcgaaatccagcgtggactgcagcagggagacgcccgcgttttcgttctctggaatcgcgcggagacgccctcacacgccgtcgtctctctttcctccccgggggccgacgaactcggccgttccggactgccgggtacggtcgacaatcatttctggaaacgctttagcggggccatgctcctgagtgtcgtccagggcgcagtccaggcggcaagtagctacgcagggaattcgaccggcgggaccagcttcaatagtttccaaaacaatggcgaacaagcggccgatacggccctaagggcggccataaacattcccccaaccttgaaaaaaaatcagggtgacacggtctcgatcttcgtcgcgcgggatttggatttctcaggaatctaccagcttcatatgactggtggatcggtgaaacgtcggcatctgcgctaatgcacagatagccaaagctgcgagatgcatccaatggaagtaaatccgcaattgcgcgcccttcttaacccagtcttgcaatggctcgatgacccgaggactgaagaagttgccataaacggaccgggagaagcctttgtacgccaaagtggcgtcttcacgaggttcgccgcaccgttctcttatgatgatctcgaagacatcgccattctagcaggggcattgcgaaaacaagatgtcggcccccgcaaccctctttgcgctaccgagctcccaggtggcgagcggatgcaaatctgcttgccgccaacggtaccctctggcaccgtgagcttgacaattcgacgaccgagcaatcgtgtctctgaattgggggaagtctcggctcgctacgatgttcgtcgatggaatcagtggcaaatccggacgcagcgacgagatcaactagacgaagcgattctgcgcgactacgacaatggcgatctggaatcatttttacgtgcatgtgttatcggtaagcggacgatgttgctttgtgggccgaccggaagcggcaagaccacgatgagcaagaccttgatcagtgctattccgcgggaagaaaggctgataaccattgaagatacgctcgaactcgtcattccacatgagaaccacgtcagactgctctactccaagagtggggcagggctaggtgcagtgactgcggaacagctgctccaggcaagccttcggatgcggcctgaccgaatattgctcggtgagatgcgcgacgacgcggcgtgggcgtacctgagtgaggtggtctcaggccaccccggatcgatttcaaccatacatggggcgaatcccgtccaaggcttcaaaaagctgttctcacttgtgaagagcagtgtgcagggggcatgcttggaagatcgcacactgattgacatgttggcaacggcaatcgatgtcattgttcccttccgtgcttacggcgatgtttacgaagtgggcgaagtatggctcgccgccgatgcccgccgacgcggtgagacgataggggatcttctaaaccagcaatagagccgcacggaggtctgctcgcgcagattttaaagcgttacaagtgtagcgcgctgcagcaactcctgtcatcaatctgaaaccttccgttagcatttttgtcatgcacggcttggccgaaattttgccgaactaccctcatagtgagagaaaatgatcaggttgaggctgagacgtacatcctctgcttgcacgaatctatcgattctgcagaatcccatacggaggcgaactggtgaaacatgttcttgtcatcgatgacgatgccgcgatgcgccatcttattaccgagtatttaacgattcatgccttaagggtcaccgcggtatcagatagccagcaattcaaccgggtacttgcatcagagacggtcgatgtcgtcgtcgtggatctcaatttagggcgtgaagacggacttgagatcgttcgcagtctcgccacaaaatccgatgttccaattataatcatcagcggtgatcgccttgaggaggcggataaagtggtggcgctcgagctgggagcaacggattttatcgcgaaacctttcggaacgcgcgagttcctagcacgcatccgtgtcgcattacgcgtgcgaccgaatgtcatgcgaaccaaagaccggcgttcattttgtttcgccggctggacacttagtctcagacagcggcgattggtatccgcacaaaatggcgaggtgaagcttacggcaggggaattcaatctgctcgtcgctttcctggaaaagccacgcgacgtgctttcccgagaacagctcctcatcgcgagccgagtgcgtgaggaggaagtatatgacagaagcattgatgttctcattttgaggctccgccgaaagcttgagcaggatgcagcgagcccaaacttgatcaaaactgccaggggtgccggctatttcttcgacgctgatgtggatgtttcctatggaggtctgatggcggcctgaagcagcgacgcatatgcctttttcgatctgatcctaggacgcggactcgttaattgaagcgatccagattctcgtcgcggcaagtttgagcccggcaaggtagttgaacaatctcctttccaggaaattgaatcacacaacgtcatcaacatgaaccccgttatggggacacagcctagagtgagctggctgtgttgtagctgggtaggggctgcctcattgcctgctgtcgaatacaataccgccgtcaagtgaccggcctcatcatattagcgttcttttcttatcttctcttcggcaaagaaagatgcaagtgcggccgtagccagtttgtggccaaaagccctggcggtctccaatctcaatggatcaaagtgattgcgtgcgacttctaacagcgataccgggaacatgcgagaagtcaggacaacgataggtttttcgactacttttgagatcgggtagctttgaggccccgtgctaaatgatccgtccgccaacatgttctcaaaatcggcgagcgcacggcgcaagatcatctgcagcgccttggtagcgctgtactgcagaatcaagttgtcatatatcttcgatacctcaggagcgggggggcgtgccgaaagaaagacctggactttttccggcggcgcagtcgaactcaaggcgtccgccgttagcattgattgccgatcgaagttgtcacgacgtttggcggcgataggaggcgctggtcgtttttcctttccggctctttcaggtaattgcgaaggcgccaagttttgcgaggaaagagctgggattgggtgaacgatcggtcgcgcggcagcaagccgtcttgcttcaccgacagacaaagcaggtttgcggatccccatcttcaattccccaaggtatcgccaatcaattctgaaattgttacgagttcctccatcgcaattctgaggttccgctcaaggaggcgcatcgtcggatcatttgtcgtgttcagcaatgtgagatgcaacatgccacgctctttcattgcagcgaacgcgtctcgttcatgcattggagattgtacgacaggcagattcaccagcatgtctgacatcgcgcgttgtgacgtggttaatcggccaaccgggactcgctggcgtaacacggcggtcggaatcactaagttctcgctcagcagcagctcgacaacataacgatatgtcgaaagtgcctcatcgatatccagcggcgttaacattgtcgggatcagaagcaggtttgagctagcgatgattgtgttattgagctcgctcgaaccaccatgcgtatcggccagcgcataatcaaattcctgaagctcggcgtcctcataagccgcttcaagaagcgacatttcttctgcagcgtacacctcgcaggatgtatcccaggtgttgctacgcatcgcgttttctttccatcgcgttaacggccggttctcgtccgcatcgaagagagccactcttttgccgtctcttgcaaacgcagcgcaaaggcccatgagcgccgtggttttgccggcgcctcctttaaatgagcaaaatgtcagaagtttcataagtttatcctggcgacgttgtgaacgaaagtgcgtctgtatcattgtttgtatgtgtgactgtctgtatagcgaaattatcaggagtatatttcaattgcattgaaggatagttgcaaatgtaactatatagatccgaatatgaacagtatattcttgaatttattctgttggcggctaggctccctcagtctcaactggagaatttcactccggaacaaatccagatcattccgttttctatggagcaagccatgtcgcaaagcgaaaaatccacttcaagtgacattgtcgaccggcgtgaaggcccgaagattgaaggtttcaaggtcgttagcactcgtttgcgatcgtcggaatatgagagcttctctcgccaagcccgtctgctggggctctccgacagcatggccataagagttgcggttcgccgcattgccggctttctcgaaatcgatgcagagactcgtcagatgatggaagccattcttcattcaataggagcactctcaaacaacattgccgcgctgctgtgtgcctatgctgaaaatccgacaacggatttgggcgctctgcaagctgaacgaaacgctttcggtaaatcgttcgctgatctcgacggtttgctccgttccattttgtccgtatcacggcgacggatcgacggttgctccatgctggcggacgccttgcagcattaacgtagcacttgggggaatctgttggatgcccgatcggtctcaagtcatcatccgcattgtgccgggaggtgggacgaagaccctccaacagattatcaaccagttggagtatctatctcggaagggcaagttggagctgcagcgttcggcccgacatctcgatactttcgtaccaccggatgaaatccgcgaactcgccctaagctgggttcaagaaaccgggacttatcacgaaagtcggccagacgaggaaaggcaacaggagttgacgacccacattattgtaagcttccctgccggtacaagtcaggtagcagcttatgcagcgagccgggagtgggcagccgagatgtttgggtcaggcgcagggggaggccgatacaactatcttacagcctttcacatcgatcgcgatcacccacatctgcatgtggtcgttaatcgtcgcgaacttttggggcacggctggctgaaaatatcccggcgccacccccaactgaattatgacgccttgcgcattacaatggccgagatttcacttcgtcatggcgtcgtcctcgaggcgacgagccgagctgagcgcggcatctcggagcggccgatgacttttgcccagtatcgacgcctggagcggcagcaggccaatcaaattcgtttcgaggatattgatttcgaagaattctcgcctgggggaaacgacggagaaccggatcaatcttttaattcttcgtacggttcgctgcctcaaaacgtgtcagaaaacttgcgacgaaacggcggtctgcaatcggtgtctgaagtacgttcccgggcactgatcggatcgaacggcaacggtgtcacgcccgatcgtgtatcatctggaaacgattcccgttctcaatccggcagcgataaagcctttgtggacgatggcaacttgaggaacggccctctcaccatcgccggagacggccaggatcttgaaggccgttctggcatgcatcgtttggcaaccgaacccgtcacgcacacaacaagcgaagatgatgttcggcaacggcctcatcgaaaacggcctcgcggtgatgaggaagagcagagcggcgcaaaactgaccagggtagacggaattcggacgggagtgacaatcagcgccgtaccggttgcccaggacgatccgattacatcgccgatccagccccctggatcaaatccgttggatgacccggggcagaccaacatcgctacggacgcattgcctccgacagccgatcgccggcagcagggagagccaaattctaagcgtcctcgtgatgatgacgccgagccgagcattcgtaagcggtcaagggacgggcgcagccaaggggatgagggaaacagaaggtagaaaaggatcgatcatggcagatgaagaatttcgtcgagacttcagccgctccgctacgttgaactcgaataacgaaggcgctacaggcgcaccaatcccggatacatcggtgtcgactgccttccgacaaaaccgcagagaacacttaacgaccagttccttacggccattaattactggtggggccggcgaccttccaggcacttcccccgaaaatcaacggccgacaacccatgccccgaatacagcagaaatactcccggtgagatcagccgaagctccggctggccaatcagcggtctttccgaggagcaaggggtattttcgtacggccatgcaatacctgcgggagattgaaatgcagtccactgccagggcggaccacgaggcgacgtcgtcgtcacgttttggcaagggggaaagaaagcagctgcgcgaacacgagcaaaccggtgatcaaagtgaatcaatggcgaagcggagtaccagctcgggaatgcaggtgggaactattgccgcgtctttggctatgaaagatagctcgaccgcgacgccggcttcgcaagggccgcaccggtctgggatggagctggataatatcgaagggactggagagagccgtacgcaatctcagcacgaaattgcgacacaacctattgccacaagcgcttttggttcaggtcatgatgtgatcattcctggagagggccagcctgaagaaacattcgacggcgcaccatattggatggtagaaagcggggatagcgagaccaatagccttccgtcgatccaacaaggcttatcttggccagggttagatgaccttgatttgctcgccgacagcagttcaccgctcagtactcaggttgttcctcctgacgtagccgctacgaatttaagcactgaggcagggtccgccagcgtcgaaagcacccaaatcctcgccgacagtgcctattccgacgacgcgaccgaaaccggtggccaaacagcttcaggatcgatccatgaaggttcagttcgttcgcttggctcaccggaggaacgcttcgacgcctttcccgagttgaccgacgaggacttggcgcagattgacgcattctcgcgagcccgctctccttcgaggcgagatgctgcgcacgctattcatgcggtcagcttggatgatgccttctcacgcaaggatcttgccgcgggccacgacggccggcttacgaatcctgcgttccgtcaggaggcttctctgcaggaatcgagcccatcagaaacgaagtccgacgacttcccggaattaaccgacgaggacctggcacggatcgacgcactctccgaagcccgctcaacttcgaggctggatgttgcacgcactattcatgcggtcaggttggaggcctctcggcaggacccgagcccatcagaaatgaagtccgacgacttccccgaattgaccaaagaggacttagcccggatcgacgcactctctggaccccgcccgactacggggcgggaaggtgcgaacactattcagccagtcaggttggacgatgctttctcagccgaagattataccgtgggccgcggcggccggcatacgaatcctgcgttccatgaggaagcttctcggcaggacccgagcccatcagagatgaagttcgatggcttgccggagttgaccgacgaggatctggtaaggattgacgcaatctctgaaccgcgctcgaagagatctcgctccgagcaggttgtcgggggaaaatctcataggctcaaactgaacgaggctatcgaggaggcgggctcgcccactaccgtttcgggaacaagcgccgccagggcggcacctatcacgctcgaaagcggagtacctaggttgccgcaggctacccatacggaacttcctggctcggacgttgcgggtccactgcggatcgggaaggcgtcgtgtgccgatatacggcgagatgtttcggataaagggaaacgaaaagtctcgtcagattatcagattcagcaaggtcctggcgcgtcctatgcttaccagccgcgacgcatgccgacggaagcgattttcgatgctgaacggcttggtgacgaagtgctcatcgggaatgagccagttccgcggtggccttacccctgggagcacgttgttcgttttgaaacaggcaagcagctcttcgaaagattgcagaagtggccgactgcggaggagttggaaaacagtgtgatcctcgtcaaagcggatagcgcgcaacgatcctatatgccccgaaatcagctgctcttgcatctcggatccgaaaagtattacgaacgaatgaaagcgctcggtctatccgataataccttcagcggattgaagtccgatagcaaatatttttatgatacacctgctggaccacgggtaagtgaacatgattatgagttcccgcggcaggcaggcgtgcataatccagaggtgatggttcagcatcatagcggaaccttcttcgcgttttggccaaaacttctcaggctggaaaagcttgcgacagtaacgaatacgtatggcgcggaaaatgtttggctcaaatcgccagccaatgcttacatgacgccggaaacctataattccaaggttgcgaacggcgccgaaaaccttttcatcgagttcctacgtcccgctcctgtccacgaccacctgcgggaacctggaacttcaaacgcaaaaactgttgacggacgaaacgaagatcgcgcgcaacaggccgaccggttagcagatcagtcgatgggccggaacggggacggccgtgacgcgcagggtggtaagagaaccttggaaccgcgcgtgcgcgaaaggtatgggctgtagatccagctgcccgtaaagcaaacagccgtccaataggataaacggagcgtggtcacgtgatgaattcaggcaagtacacgccaataggcctggctgcgagcatagcatgttcattggccgtggggttttgtgcggccagtctctatgtcacatttcgccatggctttacgggcgaaacgatgatgactttcaacgtttttgcgttcctgtacgagacaccgccttatttgggatacgcaagtcctacgttctatcgcggactagccatcatcgttgcgacgtcaacgctcgtgttgctatgccaactactgttatcgatgcgcgagcgcgaacatcacggcactgctcgctgggccggctccggcgagatgcggcacgccaggtacctccggcgctacagtcacgtcacgggtcccatcttcggcaagacatgtggaccacgttggtttggcagctacctaagtaacggagaacaacctcacagccttgttgtcgcgccaactcgcgctggtaagggtgtcggcgtcgttatcccgacgttgctaaccttcaagggctcagtaattgccttggatgtgaaaggcgagctatttgaactcacatcgagggcgcgtaaatcaagtggcgacgcggttttcaagttctcgcccttagatccagagcggcgaacgcattgttacaatcccgtgctggatattgccgcgttgccgcccgaacggcgctttacagaaacgcgccgcctcgctgcgaatctcatcacagccaaaggcaagggagccgaaggtttcatcgacggggcacgggatcttttcgtagcaggcatattgagttgcattgagcgcggcacaccaacgatcggtgccgtttacgatctgtttgctcagccgggtgaaaagtacaaactatttgcgcaactcgcggaggaaacacaaaacaaagaggctcagcgtatcttcgacaatatggcggggaatgacaccaaaatcctgacatcctacacatcggtgctcggcgacggcggactcaatctttgggccgatccactcgttaaagcggctacaagcacctcggatttttccgtctacgatctgcggcggaagaggacttgtatttatctttgtgtcagcccgaacgatctcgaagtcatagcgcccttgatgcgtcttctcttccagcaggttgtatcaatcctgcagcgatcgctgccacttggagatgaacggcacgaagttctgtttctcctcgatgagttcaagcacttgggcaagctggaagctgtggagacggcaattacgacgatcgccggctacaagggccgcttcatgtttattattcagagtctttcggctttgacaggaacttatgatgaagctggtaagcaaaattttctcagcaatacgggtgtgcaggtattcatggcgactgctgatgacgagacgcccaactacatttccaaagctatcggcgactacacattccaggctcgctcaacgtcgtacagccaagcgcgcatgtttgatcataacatccaaatctccgaccaaggagcaccgcttttgcgcgccgaacaagtccgcctactcgacgacgattatgaaatagtccttatcaaaggccaacctcccctcaaactgagaaaagtgcgatattattcggatttcatattgaagcgaattttcgaaagccaacacggttcccttcccgagcccgcatctttgatgttgccgggagacacaaacctcgttgaaggcaagctcgaccagggaacagccgatacaacttcgcaaaaaccggtgcagattgaagagaacgaccatggggaagtcgtttccccccaaaacagaactgtggctgatggagtaatgccaatagaagttcgcccccgttcaaacgaagttgatgacgagcgggaataccaaggcgcggacgccgcaacctctgagaagcttccggaaattgctccggctcttttggcgcagcgcgaactcctcgaccagatcatttcgctccagctacgaggtagaacagcctccggcacttgaagctcgatgtgataccgcttcggatcgagtcttgttagcgccgtcagatgtcccgtttcgggaatgcattaccaacgttgaaggttgccaattgatgagacatcgccatgaaaccgtcgggaagctcaaaaactggatacgccgggtcggctagatcctcgccccaggttcgcgcaggggttacgcctgtccttcatcccaaagagccttggaaccgttttgcttgctccccatctgacggccaaatggatcaccgggaaaatttatctgcgcaattcgcttacgatggaatgagactgggcgcagccgagcggtccgcgtacgagacatgggatagagcggaccggccgagttggaaagacctgatactgagcgctcgcctgaacgcgattgacagtttcgcttggaatgtcgatgtcggagaaagtacctcttcaacttttgtttatgatggtgttcctctggcggaaggggaacggcatgcctacgaggaatgggtggagccgggacagcccagttggcaacaactcgttgtgaacgcgcgtattgaagagctaaacacctctgctgcaattccgaatgagtgtagtccccttcaagaggaattccgatcggaggcgcctaagcgtaagcggacaagctccattggtcaaaagaacggtttccctgaaccattcgaatttgatgggatgagactcggctcgcctgagcgcgaagcatatgagaattggagtaaaccgcaaccgccatcctggaaagacctgatagttgacgcccgtcttgacgcaatcgacacctccacctggctcaacgaatcaaatgacacctcggtcttcgagtacgaaggcgtcccgcttggggagggggaacgcctagcatatgaaaaatggctcgagcccgcgcaaccaggatgggaagacctggttgtggacgcacgcgttgcggaattgcaccagtctgctccgacgtggtgcgaacaccaaccaggcaacgacgtttcttccaacgagtccgggcgcatctcgggcgtcccaattaacgccgagcaggtgtcgcgtgcgttcttcgtgtacgatggagtggcgctcggagcagccgagcgcgctgcgcatgatcgttggagcaggccggaccggcccacctgggaagatcttatcatagtcgcgcgccaagctgctatcgaaggcggtgccgtttcgaatgggatgatcgggaagacatcttcctcagtctttttatacgagggaatgttgcttggggatgcggagcgtcaggcgtacggacggtggaggcagctagcccagccgcggtggcaaaatctggtggtgaacgcgcgcctggcagagctcgacccggcggcctggattcccgatgaacatgatccgtctgaggatggcggggcgactggtcttctgtcgcaagcaagcacgaccaataagtcccgcctcagtttaggtgatcaaccggaagcgcgctcgcctagtctcgcacgtgagccagcacaacagccgactcacgtgcaaaacctgacgtgcgcacaattggaagcaagacgtgctctatatttcgggccctctgggagggatgcagaccaaaccgccagcatcgccgacagtaatcgcctcgacgaggtaagcaaagttaaacggctgggtgccaagagccgtcgaggcgctaaagcaacggcctatgacgtaatttcaagtgcggaaagactgtcgtctcacgagggttgtttgacggttcagtccactcagccagaaaaagccgcttgctcgagaagcgacaatatcggcacttatggaagtcgaaaaaacgaacgagctcggcttgcgaccgagaccgggaaatacgagtcggagcatattttcgggttcaaggttgtccacgataccctgcgctcgaccaaagagggccggcggctggaaaggcctatgcccgcctatctcgaatgcaaggaacttcatcgacaacatgttggtacgggaagggggcggacccgactggtggggcgcggctggccagatgacgcaagttaccgctcggatcaaagggcaactctatcggaccctgttgcgtccacggaaggtgcaacggcgtcaaacgggtatcaattaaaccagctaggctacgcacaccagctcgctaacgacgggctgcagagcgaaacgccagatggggttatcatgccgcttcaggtcgcgactactagctacaactatacggtaagccgcgatccggtactttctccgcccagtaaagagcaagctccggaattgttgcaccttgggccacgtggccagacagaagctgtactcgctcgcgaaacagcattgacaggaagatggccaacacgcgagcgtgagcagcaagtctatcgagagtttttagccctttatgacgtcaagaaggacctggaggccaagacacttgggttgcggaagaaaaaagctgcgcttgtttccgcgttgaaccggactgccgcctcaataggcacttcacccttgaaagcccaatcgtcgagcgcagaagttgaaaaagcaactcacgagtttgatgaacgacgggtttatgatccgcgcgatcgcggtcgggacaaagcattacaacggtgacaaagctggagatgaccatcgttagcggactttgtatcgatgcttaaaaatgatggttcagcatttgaaccgcaggctgtactgctactctttgaaatcccccgcaaaaaacgcgccgtagtgcaatcgatcgccagggcctgaatttcagttgaaacacgatgtccattcaacgccttaagcgcaggtgttagacttcgcatatccttgatccgcgttggagtgtgagttatgctcgaagacggccagaaaatgcaggaacgcgagctttcggtcctcggtggtgataagaccgaaagtgcagccaccttaccgaatgacattttggtggaagttgccaaacatctgccgaccgacgatccagtcgaaacggcagccaacctcacaagctttaaacttgcgagcccgtcggttcgggcatcggtcgatcagagcgatgtcggaacgttccaccgaagcgtaaatcgactgggtgcctcaagcaaggcattgtatgacctggctgtaccccggaacggctttgccgagtatccgaactatccggaaccggaccctgctggcgagtttgcgctggcgagccagcgcatcaggacaattggtccaactttgaagttccaatcgcccgccaggaaaacagcgatcgtcaatcacattctcaatatgtcggaaggcggtgagcaggcggaggcgattatgtcgatgacgtcccatttgagtgacctcgagagggccgacaagagacgccttatcgacagagcaattgaatacttcaaggtagacgggcctatcaactacgacagtcgccattatgcagcctacgcgattgcagcggcgcacaaccagttggaactcgaacacaagtcacaaatcttcgatgcaatggcgaagagaccccagcttgcgagactctacgccgacgaacgcatccatgcgcaggagcatttggggcttgcgtcgacatccgaaggtccgcacgagcggagcaataaacaactggccacggacattcttcagatcgaacaaaaaatccgcactgagctccttcccgaaactctcagtgctcacgaccagatggtaaaagcggaaggaatcgctggatcgattgagaaggcttaccgcgatgctcgcgcgaacttaacccgggcaccgcgagggaggtcaaattctgatctcagccggtagaacttggtctgaatattcgattatttctccgacgaaagcacttggttgacgagcgaatttttaaacgagcatcgataaagcgtgcacagggaaggcccacctaatggtcagtataaataaaaaagccccgcagaaatcttctacagcgaccacgcgcaattctgatgaacgcctggttgatcagttagggcaggcgtaccttgtggaacgcgaggcgcaggaaaggcgcgcgcgacttgaagcgccgccggcgttgaaaaaatatgcctcgaaactgcaactcctcaataagctcgatgcagatttccgtggtgtgatcgcccacaagccgtttcgcagcgagcaactgcgggtcgatagcaatggagaattgacccatagtcggggtctcataaaaaagaagaagaaggttttcattcgagatcaaacaactggctcccttcggcttattcactacgagaggtctgactggaatagtgtccgtcgctatgactacgaccagaacggcgtgttgagcgagaaacatatcaaaagcaaagccggtgccttcgaagaaaaatgggagcgggacgaaaacggtgaactgatgcgcacccgatacatcgatcggcgcagacttactggacgggcgttgcatcccatttccgaggaaatcggacgtccttatgagagtggcctggagaagaggctttatcgcgttttaacgcgtcgggagggctcccaacaaaagactttcgaacgcgatgacaagggtaatctggagctcattgcaagcaaacggatgggctattcgatgtcttcacaaaaggcaccggatcgacaaacatctagaacaagtatccgcaagcttggcggagctttcagtgaatcatatagatcccggctggataaggacggccacgagttaggtcgggatgtctccgcacatcgaagcctcctcaacaagcgttcagccgtctacgatgacgctacaggggagctaaagagcagcaagcacacgtttgggaagatatacaaagcggaagcgacatacctgaacgccgaaatcaaagaggtctccaaaaaaatcctcggagttacggtcggtaaagaattgaagacattaagtggacgcgaactcgaggctcaagtattacgtgccgcggaacgtgccctccataaacaggcctggcagcacccttcagctaacccctcgcggtcgcagcgggaaaataccaacagtcatcttggaaacgaacttgatgggccgctcgaatcggatatgaccgtcgtccatcaagccggatccgggttcgtcggcgacgatcgccacgttcatgatggcggtggatccaggttgaatgaattgcacgaatcgcgatcgtcgaatgatagggaaaagcttagttcgccgagagccgaaatttgcgaccgctcgatgaatcgggatcgcaccggctcaggtactttgtcgcgatgatagctaaactaggggggcacacaccgagttgtcaagtcgccccccggcaaatgagctcatccctgctgccatattcccaaactaccaacgtttcgcgtcaaactaggttcgcctaaaggcatgaaagtcgcgtttcaacgaacaggctcgatcgaaccagcgacccaacgttaatgattacaaactgcaaaccgtaacccttaaaggtaaacatttccaaagtttcatttgtagcgattttgaatttttcatgtgtagaagcgttcctgatatcaagttatagtcctcgcaatcgatccaccatagaaagattgctcatctgagcttaaggaattcaattcttcctcagatatacttggagccacgcgggccatctaactgacttctaggttttgatgaacaccatgtcccctcaatggctttgagaccgcaccggatgctcattgagttttgaaatcagcaccgttaccgaactttccatcctggctggctgatcacacacgattggaaagcgaggggaataggagtggcaagcatgccaaccgacgacattgtaatgtccgatcccggaatggctgctgttgacacgtctgtccctacgcgcttccagacagatcttcgccagttcagtaacctgctggacgagagcaatattgtggaatgggtcgtaaaccacgccgcaaatcgcaatgcgtgcttcggacaagaccaacttaagatttcggcggctcgggcactcacgcactacaaacggccggtacaagaaatcgacctgctattccaacaggtcgtcgcaagcgacaaactgacccggcttgattctccagatggccaacctctctacacctctacagagctgagagctgcggaacagaatactgtacgtcatgtcaccaatctttccgcagaagaaagcttcggcgttccgggaaccattgttgatatggtcgccgatagaggcattttcacaccggagctcagaggagcattacattatctgtctaggcgaaatcgagcttccactatggtgggcgtagcgggttccgcaaaaacaagtgtacttggagccctgaacgaagcggtggacaggttcaacgaggaagcgctcccgaccgagaaaataaagttgattgccttcgtacccaccaaccgggcggcccaggagcttcgtgagaaaggtcttcgcgacgtcgcgacgactttcaaggcgaaagaccgcaccatcggaaaaaataccatcgtcgtgatcgacgaaatgtcgatggccaagacgcaggagatcgcgcaactaatcgagacagttgcaaatgccacttcctatcacccaaccgaaaggccgaaactgatatgtgtgggagacgatcggcaactgccccctgttggacctggtgatctgcttccgattattatggagcaagccggctgctatgaactcgtccagccgcttcgacagctcgacgcgcggtcgcgaatagaaacagaaaagctcggacgtgacatacgacgcgatgccaagagcgccgtcgggcactatctcacagcgctcgaacaaatgggcctcgtccatttcgtatatgctcctcctagcggctcaaacgtcagggcgtcagaccagatcactgaccgcatgctggaggagatgaatagagtttgcgaccgatatccggtgtatgatcgtcttgtgatggcacactccaacaggagcgttaatcgcgccaatatcgctcttcatcagaggtttgttgacaaatccggattgcaagaccagcaaatgagtgtgtggtcaagcgtaatagatagtggaagttcggaatctggaatagatgagggttcgtcgagacgcgttcagcaaaggattaatctcgtcttgggagacaggattatattcagcgaaaaccgtctgcaagcggacatccgcaatggtacttttgcaactgtagtcggacttaatagcacagaagcttcccgagctgagaatggcacatctgctggggttcgcattactgcaaggttagacggatctggacgaaccgtcacttggaccgatagcgagtttaagggttttacctacggctatgctgctacaatttataagagtcagggggccacagttgatcacgccattctcctctgtgatggtgctctttcagataagctgacctatgtcggcctgacgaggcatcgcagtcgtctcgacgtcattgcttctcccctcgtggcaaacaatgttgaggctctcagtgcaaagctcactcagcaaagcgcgccaaataattccattcaattcccagcgctcgaacctgctgccttccaagagcgctcgtcggtttcgaacgcgcacttgctaaggccgctcgaccagatggaaatctctccaacgacgccgctttccttccaaggcagacaagaaagctccttcggggagaaccagctgcacgaaccatccacatcggatgtggaaatgccggaaagcgcggacctttacccgagcgccattgacttcgaagttttccagtcttctgtcatcacgactgaagagcaaatgcaaccggaattctgcgggtcggaatcgacggctaacacctcagcccacgaaagccaccaagtcacgatcgcaacggtaacaaacctggggatagcgatcgagaaacggaaacgagcggcggcaaaggaagaaatcgattctcgcaaaaaaatggcccgtcactcagttagttctgccgaggaagttgaagatatcacttccctgttcgaacgattgaaactggcaacctcggtcaccaacacagttcaaccgacgtatgcggacgtcgatcatatcatcggtactgatggccgagtgggtccaataccgcaccgggaagatgatccgggatcaaattgggaattgtcgtcaacgaacgccccctcaaacgtctcagagaaacgatcgaccaaagactcaggagaaaaaaatatggcttcgaatgaccagaaaatgcaaggcgctgactctgcaggcagcgagcgtcatttttcgcagacttccattgtggaagccctgcaggctggcgatcacaagaagctcgtggaaacgctcgccgcaaccggctcccttgtcgagaaggcggacgccgggtcggcgctgaaagcaatggcggatgcttacgaaagggatatcaaggcagatcccgaaaaggtccgcatgctctatgccaatcggcgcgttgatgtagatgcgctggccaaggagatcgaaaaacagggccttgcatccggtcgcctgagtggcgaccctgtcagcttcaaggcgttcaacaacaaggatatccgtttcagggtcggcgacaggctcagcgtcaccagcagctacaggaatctcattgccggtgaagccggccggatcgaaaagatcgaaggcaaatccgttaccttcaaacccgatggcagcagtcagagcaagaccttcgaggccagcaccggcgagccgggtgacaggggcgtcaagggctacaaaatcgaaggcccgatgacggtcatcggctccgcctatgaacttacgcgacatgatgacggcaaacgtgttgaccaaatctatctcttgaacgacgctgcccatggcatcaacgccaatagcgctttgctgagcaaggccgacgagcggacgcagcttttcacttcgctcaaggacaccgccgacagggacatcttggccaggcaactgggaaagccgggcagcgagctctaccaggacaaattcccagccttgccggactacacagccgccatcgatcggattgcaaaacgccaggaagttgtcgcggcacgtggcgaggagaaaacttccgccccgatagacctggcgccccaaacgccgcccgacgctgccgatgcggcagtcaataaccagaaaagaatcgtcgaggccttgcaggcaggcgaccacaagaagcttgtggaaacgctagccgcaaccggctcccttgttgagaacacaaatctcgtatcaacgttgaaagcgatagcgcagacttatgaaagagacattagtgcggaccccgagaaagtccgcgctctctacgccaacaaacgtgatcatgtagatttgcttgccgaagagatcgaaaagcagggccttgcatccggtcgcctgagtggcgaccctgtcagcttcaaggcgtttaacaacaaggatatccgtttcagggtcggtgacaggctcagcgtcactagcagctataggaatctcattgccggtgaagccggccggatcgaaaagatcgaaggcaaatccgttaccttcaaacccgatggcagcagtcagagcaagaccttcgaggccagcaccggcgagccgggtgacaggggtgtcaagggctataagattgaggggcccacgacaatcatcggctccgcctacgaaatcagaaatcacgacgatggcaggcgcgtcgatcaggtttatgtcttgcacagtgccattttcggctcaaatgccgcgagcgccctgttgagcaaggccgacgaacgaacccaggttttcaccgtgcaaagcgacacggctgacagacacatcttggccagccaactcagcaagcctggcagcgagctctatcaggacaaattcccagtctcgccggactacgcagccgcgatcgaccggatcgcgaaacgcgaggaacttagggccggacgtggcgaggaaagtcctactgttcaaatggagccggtgaaccaaacgccctacgaggcgggacattggacgcctgacagtcaaaaatctgtggtggaagccctgcaggctggcgatcacaagaagctcgtggaaacgctcgccgcaaccggctcccttgtcgagaaagcggacgccgggtcggcgctgaaagcaatggcggatgcttacgaaagggatatcaaggcagatcccgaaaaggtccgcatgctctatgccaatcggcgcgttgatgtagatgcgctggccaaggagatcgaaaaacagggccttgcatccggtcgcctgagtggcgaccctgtcagcttcaaggcgttcaacaacaaggatatccgtttcagggtcggcgacaggctcagcgtcaccagcagctacaggaatctcattgccggtgaagccggccggatcgaaaagatcgaaggcaaatccgttaccttcaaacccgatggcagcagtcagagcaagaccttcgaggccagcaccggcgagccgggtgacaggggcgtcaagggctacaaaatcgaaggcccgatgacggtcatcggctccgcctatgaacttacgcgacatgatgacggcaaacgtgttgaccaaatctatctcttgaacgacgctgcccatggcatcaacgccaatagcgctttgctgagcaaggccgacgagcggacgcagcttttcacttcgctcaaggacaccgccgacagggacatcttggccaggcaactgggaaagccgggcagcgagctctaccaggacaaattcccagccttgccggactacacagccgccatcgatcggattgcaaaacgccaggaagttgtcgcggcacgtggcgaggtcaagccgattgagcgcaccgaagcgcccgaaataccccaggttcaagctactatcgttggcgagacctcgatcattcggttgcccgatcggataaaaaccaatcgcgagaagccccaagaacttgatgtagtctcgaaagaagggcacgaaactacaggtagtctgaggcagagtgtccaagagagtaatgcagcaccaaaacagacttcgccgaaggcggcaaatgacgtggatcggctgacacgggattttgacgagcgcatccgcgtccgcggggatggacgtggactctaagtaaaagagggtgcgtaacgcgcaccctcttccactcgctgtccctgtatccgttctctgtcgcgagaacgtcgatcaccttttcggaactctttccagatctgcttgaggttccgttgccggagaaagcattggcgaggattgctgggatccggcggacggcgatgcgatgtgccggttcggtgaccaattccatcagagaccggccgacgtatggcctgccgaagtggaaacggctgatcagcttgcgaggccgagctacttccccggcaagcgtcgggttcggggcattgttttcctcgaccatggcggtattttgctgagttgcccggctaaactaggctttggcagcctgttctttgaactatgtacctcgcgaatgcatctagatccaatccaatatgcatggcatgccgaatccatgtgggagtttattcttgacacagatatttatgatataataactgagtaagcttaacataaggaggaaaaacatatgttacgcagcagcaacgatgttacgcagcagggcagtcgccctaaaacaaagttaggtggctcaagtatgggcatcattcgcacatgtaggctcggccctgaccaagtcaaatccatgcgggctgctcttgatcttttcggtcgtgagttcggagacgtagccacctactcccaacatcagccggactccgattacctcgggaacttgctccgtagtaagacattcatcgcgcttgctgccttcgaccaagaagcggttgttggcgctctcgcggcttacgttctgcccaagtttgagcagccgcgtagtgagatctatatctatgatctcgcagtctccggcgagcaccggaggcagggcattgccaccgcgctcatcaatctcctcaagcatgaggccaacgcgcttggtgcttatgtgatctacgtgcaagcagattacggtgacgatcccgcagtggctctctatacaaagttgggcatacgggaagaagtgatgcactttgatatcgacccaagtaccgccacctaataatgtctaacaattcgttcaagccgacgccgcttcgcggcgcggcttaactcaagcgttagatgcactatacgtaccaatccaaatcggatccccctgcagggctgagataggtgcctcactgattaagcattggtaactgtcagaccaagtttactcatatatactttagattgatttaaaacttcatttttaatttaaaaggatctaggtgaagatcctttttgataatctcatgaccaaaatcccttaacgtgagttttcgttccactgagcgtcagaccccgtagaaaagatcaaaggatcttcttgagatcctttttttctgcgcgtaatctgctgcttgcaaacaaaaaaaccaccgctaccagcggtggtttgtttgccggatcaagagctaccaactctttttccgaaggtaactggcttcagcagagcgcagataccaaatactgtccttctagtgtagccgtagttaggccaccacttcaagaactctgtagcaccgcctacatacctcgctctgctaatcctgttaccagtggctgctgccagtggcgataagtcgtgtcttaccgggttggactcaagacgatagttaccggataaggcgcagcggtcgggctgaacggggggttcgtgcacacagcccagcttggagcgaacgacctacaccgaactgagatacctacagcgtgagctatgagaaagcgccacgcttcccgaagggagaaaggcggacaggtatccggtaagcggcagggtcggaacaggagagcgcacgagggagcttccagggggaaacgcctggtatctttatagtcctgtcgggtttcgccacctctgacttgagcgtcgatttttgtgatgctcgtcaggggggcggagcctatggaaaaacgccagcaacgcggcctttttacggttcctggccttttgctggccttttgctcacatgttctttcctgcgttatcccctgattctgtggataaccgtattaccgcctttgagtgagctgataccgctcgccgcagccgaacgaccgagcgcagcgagtcagtgagcgaggaagcggaagagcgcctgatgcggtattttctccttacgcatctgtgcggtatttcacaccgcatatggtgcactctcagtacaatctgctctgatgccgcatagttaagccagtatacactccgctatcgctacgtgactgggtcatggctgcgccccgacacccgccaacacccgctgacgcgccctgacgggcttgtctgctcccggcatccgcttacagacaagctgtgaccgtctccgggagctgcatgtgtcagaggttttcaccgtcatcaccgaaacgcgcgaggcagcagatctatcgatggtacctatctgcagacggaagggattcctgttaattaaaacagcttgcgtcatgcggtcgctgcgtatatgatgcgatgagtaaataaacaaatacgcaaggggaacgcatgaaggttatcgctgtacttaaccagaaaggcgggtcaggcaagacgaccatcgcaacccatctagcccgcgccctgcaactcgccggggccgatgttctgttagtcgattccgatccccagggcagtgcccgcgattgggcggccgtgcgggaagatcaaccgctaaccgttgtcggcatcgaccgcccgacgattgaccgcgacgtgaaggccatcggccggcgcgacttcgtagtgatcgacggagcgccccaggcggcggacttggctgtgtccgcgatcaaggcagccgacttcgtgctgattccggtgcagccaagcccttacgacatatgggccaccgccgacctggtggagctggttaagcagcgcattgaggtcacggatggaaggctacaagcggcctttgtcgtgtcgcgggcgatcaaaggcacgcgcatcggcggtgaggttgccgaggcgctggccgggtacgagctgcccattcttgagtcccgtatcacgcagcgcgtgagctacccaggcactgccgccgccggcacaaccgttcttgaatcagaacccgagggcgacgctgcccgcgaggtccaggcgctggccgctgaaattaaatcaaaactcatttgagttaatgaggtaaagagaaaatgagcaaaagcacaaacacgctaagtgccggccgtccgagcgcacgcagcagcaaggctgcaacgttggccagcctcgcagacacgccagccatgaagcgggtcaactttcagttgccggcggaggatcacaccaagctgaagatgtacgcggtacgccaaggcaagaccattaccgagctgctatctgaatacatcgcgcagctaccagagtaaatgagcaaatgaataaatgagtagatgaattttagcggctaaaggaggcggcatggaaaatcaagaacaaccaggcaccgacgccgtggaatgccccatgtgtggaggaacgggcggttggccaggcgtaagcggctgggttgcctgccggccctgcaatggcactggaacccccaagcccgaggaatcggcgtgagcggtcgcaaaccatccggcccggtacaaatcggcgcggcgctgggtgatgacctggtggagaagttgaaggcagcgcaggccgcccagcggcaacgcatcgaggcagaagcacgccccggtgaatcgtggcaagcagccgctgatcgaatccgcaaagaatcccggcaaccgccggcagccggtgcgccgtcgattaggaagccgcccaagggcgacgagcaaccagattttttcgttccgatgctctatgacgtgggcacccgcgatagtcgcagcatcatggacgtggccgttttccgtctgtcgaagcgtgaccgacgagctggcgaggtgatccgctacgagcttccagacgggcacgtagaggtttccgcagggccggcaggcatggccagtgtgtgggattacgacctggtactgatggcggtttcccatctaaccgaatccatgaaccgataccgggaagggaagggagacaagcccggccgcgtgttccgtccacacgttgcggacgtactcaagttctgccggcgagccgatggcggaaagcagaaagacgacctggtagaaacctgcattcggttaaacaccacgcacgttgccatgcagcgtacgaagaaggccaagaacggccgcctggtgacggtatccgagggtgaagccttgattagccgctacaagatcgtaaagagcgaaaccgggcggccggagtacatcgagatcgagctagctgattggatgtaccgcgagatcacagaaggcaagaacccggacgtgctgacggttcaccccgattactttttgatcgatcccggcatcggccgttttctctaccgcctggcacgccgcgccgcaggcaaggcagaagccagatggttgttcaagacgatctacgaacgcagtggcagcgccggagagttcaagaagttctgtttcaccgtgcgcaagctgatcgggtcaaatgacctgccggagtacgatttgaaggaggaggcggggcaggctggcccgatcctagtcatgcgctaccgcaacctgatcgagggcgaagcatccgccggttcctaatgtacggagcagatgctagggcaaattgccctagcaggggaaaaaggtcgaaaaggtctctttcctgtggatagcacgtacattgggaacccaaagccgtacattgggaaccggaacccgtacattgggaacccaaagccgtacattgggaaccggtcacacatgtaagtgactgatataaaagagaaaaaaggcgatttttccgcctaaaactctttaaaacttattaaaactcttaaaacccgcctggcctgtgcataactgtctggccagcgcacagccgaagagctgcaaaaagcgcctacccttcggtcgctgcgctccctacgccccgccgcttcgcgtcggcctatgcatataattgtggtttcaaaatcggctccgtcgatactatgttatacgccaactctgaaaacaactttgaaaaagctgttttctggtatttaaatcggaaccctaaagggagcccccgatttagagcttgacggggaaagccggcgaacgtggcgagaaaggaagggaagaaagcgaaaggagcgggcgctagggcgctggcaagtgtagcggtcacgctgcgcgtaaccaccacacccgccgcgcttaatgcgccgctacagggcgcgtactatggttgctttgacgtatgcggtgtgaaataccgcacagatgcgtaaggagaaaataccgcatcagg

SEQ ID NO: 240 - DNA, 10808 bp, synthetic construct
  misc_feature 1..10808: note = PHP71193
  source 1..10808: mol_type = other DNA
cagtcacgacgttgtaaaacgacggccagtgagcgcgcgtaatacgactcactatagggcgaattggagctccaccgcggtggcggccgctctagaactagtggatcccccagcttgcatgcctgcagtgcagcgtgacccggtcgtgcccctctctagagataatgagcattgcatgtctaagttataaaaaattaccacatattttttttgtcacacttgtttgaagtgcagtttatctatctttatacatatatttaaactttactctacgaataatataatctatagtactacaataatatcagtgttttagagaatcatataaatgaacagttagacatggtctaaaggacaattgagtattttgacaacaggactctacagttttatctttttagtgtgcatgtgttctcctttttttttgcaaatagcttcacctatataatacttcatccattttattagtacatccatttagggtttagggttaatggtttttatagactaatttttttagtacatctattttattctattttagcctctaaattaagaaaactaaaactctattttagtttttttatttaataatttagatataaaatagaataaaataaagtgactaaaaattaaacaaataccctttaagaaattaaaaaaactaaggaaacatttttcttgtttcgagtagataatgccagcctgttaaacgccgtcgacgagtctaacggacaccaaccagcgaaccagcagcgtcgcgtcgggccaagcgaagcagacggcacggcatctctgtcgctgcctctggacccctctcgagagttccgctccaccgttggacttgctccgctgtcggcatccagaaattgcgtggcggagcggcagacgtgagccggcacggcaggcggcctcctcctcctctcacggcaccggcagctacgggggattcctttcccaccgctccttcgctttcccttcctcgcccgccgtaataaatagacaccccctccacaccctctttccccaacctcgtgttgttcggagcgcacacacacacaaccagatctcccccaaatccacccgtcggcacctccgcttcaaggtacgccgctcgtcctcccccccccccctctctaccttctctagatcggcgttccggtccatgcatggttagggcccggtagttctacttctgttcatgtttgtgttagatccgtgtttgtgttagatccgtgctgctagcgttcgtacacggatgcgacctgtacgtcagacacgttctgattgctaacttgccagtgtttctctttggggaatcctgggatggctctagccgttccgcagacgggatcgatttcatgattttttttgtttcgttgcatagggtttggtttgcccttttcctttatttcaatatatgccgtgcacttgtttgtcgggtcatcttttcatgcttttttttgtcttggttgtgatgatgtggtctggttgggcggtcgttctagatcggagtagaattctgtttcaaactacctggtggatttattaattttggatctgtatgtgtgtgccatacatattcatagttacgaattgaagatgatggatggaaatatcgatctaggataggtatacatgttgatgcgggttttactgatgcatatacagagatgctttttgttcgcttggttgtgatgatgtggtgtggttgggcggtcgttcattcgttctagatcggagtagaatactgtttcaaactacctggtgtatttattaattttggaactgtatgtgtgtgtcatacatcttcatagttacgagtttaagatggatggaaatatcgatctaggataggtatacatgttgatgtgggttttactgatgcatatacatgatggcatatgcagcatctattcatatgctctaaccttgagtacctatctattataataaacaagtatgttttataattattttgatcttgatatacttggatgatggcatatgcagcagctatatgtggatttttttagccctgccttcatacgctatttatttgcttggtactgtttcttttgtcgatgctcaccctgttgtttggtgttacttctgcaggtcgactctagaggatccatggcaccgaagaagaagcgcaaggtgatggacaagaagtacagcatcggcctcgacatcggcaccaactcggtgggctgggccgtcatcacggacgaatataaggtcccgtcgaagaagttcaaggtcctcggcaatacagaccgccacagcatcaagaaaaacttgatcggcgccctcctgttcgatagcggcgagaccgcggaggcgaccaggctcaagaggaccgccaggagacggtacactaggcgcaagaacaggatctgctacctgcaggagatcttcagcaacgagatggcgaaggtggacgactccttcttccaccgcctggaggaatcattcctggtggaggaggacaagaagcatgagcggcacccaatcttcggcaacatcgtcgacgaggtaagtttctgcttctacctttgatatatatataataattatcattaattagtagtaatataatatttcaaatatttttttcaaaataaaagaatgtagtatatagcaattgcttttctgtagtttataagtgtgtatattttaatttataacttttctaatatatgaccaaaacatggtgatgtgcaggtggcctaccacgagaagtacccgacaatctaccacctccggaagaaactggtggacagcacagacaaggcggacctccggctcatctaccttgccctcgcgcatatgatcaagttccgcggccacttcctcatcgagggcgacctgaacccggacaactccgacgtggacaagctgttcatccagctcgtgcagacgtacaatcaactgttcgaggagaaccccataaacgctagcggcgtggacgccaaggccatcctctcggccaggctctcgaaatcaagaaggctggagaaccttatcgcgcagttgccaggcgaaaagaagaacggcctcttcggcaaccttattgcgctcagcctcggcctgacgccgaacttcaaatcaaacttcgacctcgcggaggacgccaagctccagctctcaaaggacacctacgacgacgacctcgacaacctcctggcccagataggagaccagtacgcggacctcttcctcgccgccaagaacctctccgacgctatcctgctcagcgacatccttcgggtcaacaccgaaattaccaaggcaccgctgtccgccagcatgattaaacgctacgacgagcaccatcaggacctcacgctgctcaaggcactcgtccgccagcagctccccgagaagtacaaggagatcttcttcgaccaatcaaaaaacggctacgcgggatatatcgacggcggtgccagccaggaagagttctacaagttcatcaaaccaatcctggagaagatggacggcaccgaggagttgctggtcaagctcaacagggaggacctcctcaggaagcagaggaccttcgacaacggctccatcccgcatcagatccacctgggcgaactgcatgccatcctgcggcgccaggaggacttctacccgttcctgaaggataaccgggagaagatcgagaagatcttgacgttccgcatcccatactacgtgggcccgctggctcgcggcaactcccggttcgcctggatgacccggaagtcggaggagaccatcacaccctggaactttgaggaggtggtcgataagggcgctagcgctcagagcttcatcgagcgcatgaccaacttcgataaaaacctgcccaatgaaaaagtcctccccaagcactcgctgctctacgagtacttcaccgtgtacaacgagctcaccaaggtcaaatacgtcaccgagggcatgcggaagccggcgttcctgagcggcgagcagaagaaggcgatagtggacctcctcttcaagaccaacaggaaggtgaccgtgaagcaattaaaagaggactacttcaagaaaatagagtgcttcgactccgtggagatctcgggcgtggaggatcggttcaacgcctcactcggcacgtatcacgacctcctcaagatcattaaagacaaggacttcctcgacaacgaggagaacgaggacatcctcgaggacatcgtcctcaccctgaccctgttcgaggaccgcgaaatgatcgaggagaggctgaagacctacgcgcacctgttcgacgacaaggtcatgaaacagctcaagaggcgccgctacactggttggggaaggctgtcccgcaagctcattaatggcatcagggacaagcagagcggcaagaccatcctggacttcctcaagtccgacgggttcgccaaccgcaacttcatgcagctcattcacgacgactcgctcacgttcaaggaagacatccagaaggcacaggtgagcgggcagggtgactccctccacgaacacatcgccaacctggccggctcgccggccattaaaaagggcatcctgcagacggtcaaggtcgtcgacgagctcgtgaaggtgatgggccggcacaagcccgaaaatatcgtcatagagatggccagggagaaccagaccacccaaaaagggcagaagaactcgcgcgagcggatgaaacggatcgaggagggcattaaagagctcgggtcccagatcctgaaggagcaccccgtggaaaatacccagctccagaatgaaaagctctacctctactacctgcagaacggccgcgacatgtacgtggaccaggagctggacattaatcggctatcggactacgacgtcgaccacatcgtgccgcagtcgttcctcaaggacgatagcatcgacaacaaggtgctcacccggtcggataaaaatcggggcaagagcgacaacgtgcccagcgaggaggtcgtgaagaagatgaaaaactactggcgccagctcctcaacgcgaaactgatcacccagcgcaagttcgacaacctgacgaaggcggaacgcggtggcttgagcgaactcgataaggcgggcttcataaaaaggcagctggtcgagacgcgccagatcacgaagcatgtcgcccagatcctggacagccgcatgaatactaagtacgatgaaaacgacaagctgatccgggaggtgaaggtgatcacgctgaagtccaagctcgtgtcggacttccgcaaggacttccagttctacaaggtccgcgagatcaacaactaccaccacgcccacgacgcctacctgaatgcggtggtcgggaccgccctgatcaagaagtacccgaagctggagtcggagttcgtgtacggcgactacaaggtctacgacgtgcgcaaaatgatcgccaagtccgagcaggagatcggcaaggccacggcaaaatacttcttctactcgaacatcatgaacttcttcaagaccgagatcaccctcgcgaacggcgagatccgcaagcgcccgctcatcgaaaccaacggcgagacgggcgagatcgtctgggataagggccgggatttcgcgacggtccgcaaggtgctctccatgccgcaagtcaatatcgtgaaaaagacggaggtccagacgggcgggttcagcaaggagtccatcctcccgaagcgcaactccgacaagctcatcgcgaggaagaaggattgggacccgaaaaaatatggcggcttcgacagcccgaccgtcgcatacagcgtcctcgtcgtggcgaaggtggagaagggcaagtcaaagaagctcaagtccgtgaaggagctgctcgggatcacgattatggagcggtcctccttcgagaagaacccgatcgacttcctagaggccaagggatataaggaggtcaagaaggacctgattattaaactgccgaagtactcgctcttcgagctggaaaacggccgcaagaggatgctcgcctccgcaggcgagttgcagaagggcaacgagctcgccctcccgagcaaatacgtcaatttcctgtacctcgctagccactatgaaaagctcaagggcagcccggaggacaacgagcagaagcagctcttcgtggagcagcacaagcattacctggacgagatcatcgagcagatcagcgagttctcgaagcgggtgatcctcgccgacgcgaacctggacaaggtgctgtcggcatataacaagcaccgcgacaaaccaatacgcgagcaggccgaaaatatcatccacctcttcaccctcaccaacctcggcgctccggcagccttcaagtacttcgacaccacgattgaccggaagcggtacacgagcacgaaggaggtgctcgatgcgacgctgatccaccagagcatcacagggctctatgaaacacgcatcgacctgagccagctgggcggagacaagagaccacgggaccgccacgatggcgagctgggaggccgcaagcgggcaaggtaggtaccgttaacctagacttgtccatcttctggattggccaacttaattaatgtatgaaataaaaggatgcacacatagtgacatgctaatcactataatgtgggcatcaaagttgtgtgttatgtgtaattactagttatctgaataaaagagaaagagatcatccatatttcttatcctaaatgaatgtcacgtgtctttataattctttgatgaaccagatgcatttcattaaccaaatccatatacatataaatattaatcatatataattaatatcaattgggttagcaaaacaaatctagtctaggtgtgttttgcgaatgcggccgggctgcaggaattcgatagctttgagagtacaatgatgaacctagattaatcaatgccaaagtctgaaaaatgcaccctcagtctatgatccagaaaatcaagattgcttgaggccctgttcggttgttccggattagagccccggattaattcctagccggattacttctctaatttatatagattttgatgagctggaatgaatcctggcttattccggtacaaccgaacaggccctgaaggataccagtaatcgctgagctaaattggcatgctgtcagagtgtcagtattgcagcaaggtagtgagataaccggcatcatggtgccagtttgatggcaccattagggttagagatggtggccatgggcgcatgtcctggccaactttgtatgatatatggcagggtgaataggaaagtaaaattgtattgtaaaaagggatttcttctgtttgttagcgcatgtacaaggaatgcaagttttgagcgagggggcatcaaagatctggctgtgtttccagctgtttttgttagccccatcgaatccttgacataatgatcccgcttaaataagcaacctcgcttgtatagttccttgtgctctaacacacgatgatgataagtcgtaaaatagtggtgtccaaagaatttccaggcccagttgtaaaagctaaaatgctattcgaatttctactagcagtaagtcgtgtttagaaattatttttttatataccttttttccttctatgtacagtaggacacagtgtcagcgccgcgttgacggagaatatttgcaaaaaagtaaaagagaaagtcatagcggcgtatgtgccaaaaacttcgtcacagagagggccataagaaacatggcccacggcccaatacgaagcaccgcgacgaagcccaaacagcagtccgtaggtggagcaaagcgctgggtaatacgcaaacgttttgtcccaccttgactaatcacaagagtggagcgtaccttataaaccgagccgcaagcaccgaattgtacgtaacgtgcagtacgttttagagctagaaatagcaagttaaaataaggctagtccgttatcaacttgaaaaagtggcaccgagtcggtgctttttttttgcggccatcaagcttatcgataccgtcgacctcgagggggggcccggtacccagcttttgttccctttagtgagggttaattgcgcgcttggcgtaatcatggtcatagctgtttcctgtgtgaaattgttatccgctcacaattccacacaacatacgagccggaagcataaagtgtaaagcctggggtgcctaatgagtgagctaactcacattaattgcgttgcgctcactgcccgctttccagtcgggaaacctgtcgtgccagctgcattaatgaatcggccaacgcgcggggagaggcggtttgcgtattgggcgctcttccgcttcctcgctcactgactcgctgcgctcggtcgttcggctgcggcgagcggtatcagctcactcaaaggcggtaatacggttatccacagaatcaggggataacgcaggaaagaacatgtgagcaaaaggccagcaaaaggccaggaaccgtaaaaaggccgcgttgctggcgtttttccataggctccgcccccctgacgagcatcacaaaaatcgacgctcaagtcagaggtggcgaaacccgacaggactataaagataccaggcgtttccccctggaagctccctcgtgcgctctcctgttccgaccctgccgcttaccggatacctgtccgcctttctcccttcgggaagcgtggcgctttctcatagctcacgctgtaggtatctcagttcggtgtaggtcgttcgctccaagctgggctgtgtgcacgaaccccccgttcagcccgaccgctgcgccttatccggtaactatcgtcttgagtccaacccggtaagacacgacttatcgccactggcagcagccactggtaacaggattagcagagcgaggtatgtaggcggtgctacagagttcttgaagtggtggcctaactacggctacactagaagaacagtatttggtatctgcgctctgctgaagccagttaccttcggaaaaagagttggtagctcttgatccggcaaacaaaccaccgctggtagcggtggtttttttgtttgcaagcagcagattacgcgcagaaaaaaaggatctcaagaagatcctttgatcttttctacggggtctgacgctcagtggaacgaaaactcacgttaagggattttggtcatgagattatcaaaaaggatcttcacctagatccttttaaattaaaaatgaagttttaaatcaatctaaagtatatatgagtaaacttggtctgacagttaccaatgcttaatcagtgaggcacctatctcagcgatctgtctatttcgttcatccatagttgcctgactccccgtcgtgtagataactacgatacgggagggcttaccatctggccccagtgctgcaatgataccgcgagacccacgctcaccggctccagatttatcagcaataaaccagccagccggaagggccgagcgcagaagtggtcctgcaactttatccgcctccatccagtctattaattgttgccgggaagctagagtaagtagttcgccagttaatagtttgcgcaacgttgttgccattgctacaggcatcgtggtgtcacgctcgtcgtttggtatggcttcattcagctccggttcccaacgatcaaggcgagttacatgatcccccatgttgtgcaaaaaagcggttagctccttcggtcctccgatcgttgtcagaagtaagttggccgcagtgttatcactcatggttatggcagcactgcataattctcttactgtcatgccatccgtaagatgcttttctgtgactggtgagtactcaaccaagtcattctgagaatagtgtatgcggcgaccgagttgctcttgcccggcgtcaatacgggataataccgcgccacatagcagaactttaaaagtgctcatcattggaaaacgttcttcggggcgaaaactctcaaggatcttaccgctgttgagatccagttcgatgtaacccactcgtgcacccaactgatcttcagcatcttttactttcaccagcgtttctgggtgagcaaaaacaggaaggcaaaatgccgcaaaaaagggaataagggcgacacggaaatgttgaatactcatactcttcctttttcaatattattgaagcatttatcagggttattgtctcatgagcggatacatatttgaatgtatttagaaaaataaacaaataggggttccgcgcacatttccccgaaaagtgccacctaaattgtaagcgttaatattttgttaaaattcgcgttaaatttttgttaaatcagctcattttttaaccaataggccgaaatcggcaaaatcccttataaatcaaaagaatagaccgagatagggttgagtgttgttccagtttggaacaagagtccactattaaagaacgtggactccaacgtcaaagggcgaaaaaccgtctatcagggcgatggcccactacgtgaaccatcaccctaatcaagttttttggggtcgaggtgccgtaaagcactaaatcggaaccctaaagggagcccccgatttagagcttgacggggaaagccggcgaacgtggcgagaaaggaagggaagaaagcgaaaggagcgggcgctagggcgctggcaagtgtagcggtcacgctgcgcgtaaccaccacacccgccgcgcttaatgcgccgctacagggcgcgtcccattcgccattcaggctgcgcaactgttgggaagggcgatcggtgcgggcctcttcgctattacgccagctggcgaaagggggatgtgctgcaaggcgattaagttgggtaacgccagggttttcc

SEQ ID NO: 241 - DNA, 5120 bp, synthetic construct
  misc_feature 1..5120: note = PHP71788
  source 1..5120: mol_type = other DNA
gtttacccgccaatatatcctgtcaaacactgatagtttaaactgaaggcgggaaacgacaatctgatcatgagcggagaattaagggagtcacgttatgacccccgccgatgacgcgggacaagccgttttacgtttggaactgacagaaccgcaacgttgaaggagccactcagcaagctggtacgattgtaatacgactcactatagggcgaattgagcgctgtttaaacgctcttcaactggaagagcggttactaccggctggatggcggggccttgatcgtgcaccgccggcgtccggaggttaccggccagaatggcccggaccgaagactctcggtccgaagcttgcgatagcggccgcgcagaatttacggtccagcacgggcatgccgcgcgggctgactttgctccactgactcgatcatgtgcggattccatcgcggcgtagcgtagccaaccgcaacgcaaaccgacttcatcttttttttttattatgaacaaaaggagatcgagagaaacgtgaacggtaaataatatatctgatcccatgcatgcacgctgcctgggtcgatctcgctctcgctccgcccagacgaacatgcatgctggtcaggctcaacgctcaggcgggcaagctgtgggaggacatgggatgggagaggaggacacatgcatgctggccagtcaggcactgtgctggcacatgaggtagggataggggggccctcggccagtgtccaggccgcatgcatgcatgccccccctgctgctcgaccgaacaacgttggatgcctggattgatgcaacagtttggacggacggaccatacgttatgtaccagtaggtacctcactgactagctaatcgagctagttaccctatgaggtgacatgaagcgctcacggttactatgacggttagcttcacgactgttggtggcagtagcgtacgacttagctatagttccggacttaccgataacttcgtatagcatacattatacgaagttatggcgccgctagcctgcagtgcagcgtgacccggtcgtgcccctctctagagataatgagcattgcatgtctaagttataaaaaattaccacatattttttttgtcacacttgtttgaagtgcagtttatctatctttatacatatatttaaactttactctacgaataatataatctatagtactacaataatatcagtgttttagagaatcatataaatgaacagttagacatggtctaaaggacaattgagtattttgacaacaggactctacagttttatctttttagtgtgcatgtgttctcctttttttttgcaaatagcttcacctatataatacttcatccattttattagtacatccatttagggtttagggttaatggtttttatagactaatttttttagtacatctattttattctattttagcctctaaattaagaaaactaaaactctattttagtttttttatttaataatttagatataaaatagaataaaataaagtgactaaaaattaaacaaataccctttaagaaattaaaaaaactaaggaaacatttttcttgtttcgagtagataatgccagcctgttaaacgccgtcgacgagtctaacggacaccaaccagcgaaccagcagcgtcgcgtcgggccaagcgaagcagacggcacggcatctctgtcgctgcctctggacccctctcgagagttccgctccaccgttggacttgctccgctgtcggcatccagaaattgcgtggcggagcggcagacgtgagccggcacggcaggcggcctcctcctcctctcacggcaccggcagctacgggggattcctttcccaccgctccttcgctttcccttcctcgcccgccgtaataaatagacaccccctccacaccctctttccccaacctcgtgttgttcggagcgcacacacacacaaccagatctcccccaaatccacccgtcggcacctccgcttcaaggtacgccgctcgtcctcccccccccccctctctaccttctctagatcggcgttccggtccatgcatggttagggcccggtagttctacttctgttcatgtttgtgttagatccgtgtttgtgttagatccgtgctgctagcgttcgtacacggatgcgacctgtacgtcagacacgttctgattgctaacttgccagtgtttctctttggggaatcctgggatggctctagccgttccgcagacgggatcgatttcatgattttttttgtttcgttgcatagggtttggtttgcccttttcctttatttcaatatatgccgtgcacttgtttgtcgggtcatcttttcatgcttttttttgtcttggttgtgatgatgtggtctggttgggcggtcgttctagatcggagtagaattctgtttcaaactacctggtggatttattaattttggatctgtatgtgtgtgccatacatattcatagttacgaattgaagatgatggatggaaatatcgatctaggataggtatacatgttgatgcgggttttactgatgcatatacagagatgctttttgttcgcttggttgtgatgatgtggtgtggttgggcggtcgttcattcgttctagatcggagtagaatactgtttcaaactacctggtgtatttattaattttggaactgtatgtgtgtgtcatacatcttcatagttacgagtttaagatggatggaaatatcgatctaggataggtatacatgttgatgtgggttttactgatgcatatacatgatggcatatgcagcatctattcatatgctctaaccttgagtacctatctattataataaacaagtatgttttataattattttgatcttgatatacttggatgatggcatatgcagcagctatatgtggatttttttagccctgccttcatacgctatttatttgcttggtactgtttcttttgtcgatgctcaccctgttgtttggtgttacttctgcaggtcgactttaacttagcctagggaagttcctattccgaagttcctattctctagaaagtataggaacttcagatccaccgggatccaccatggttgaacaagatggattgcacgcaggttctccggccgcttgggtggagaggctattcggctatgactgggcacaacagacaatcggctgctctgatgccgccgtgttccggctgtcagcgcaggggcgcccggttctttttgtcaagaccgacctgtccggtgccctgaatgaactgcaggacgaggcagcgcggctatcgtggctggccacgacgggcgttccttgcgcagctgtgctcgacgttgtcactgaagcgggaagggactggctgctattgggcgaagtgccggggcaggatctcctgtcatctcaccttgctcctgccgagaaagtatccatcatggctgatgcaatgcggcggctgcatacgcttgatccggctacctgcccattcgaccaccaagcgaaacatcgcatcgagcgagcacgtactcggatggaagccggtcttgtcgatcaggatgatctggacgaagagcatcaggggctcgcgccagccgaactgttcgccaggctcaaggcgcgcatgcccgacggcgatgatctcgtcgtgacccatggcgatgcctgcttgccgaatatcatggtggaaaatggccgcttttctggattcatcgactgtggccggctgggtgtggcggaccgctatcaggacatagcgttggctacccgtgatattgctgaagagcttggcggcgaatgggctgaccgcttcctcgtgctttacggtatcgccgctcccgattcgcagcgcatcgccttctatcgccttcttgacgagttcttctgaggatccaccatggttaacctagacttgtccatcttctggattggccaacttaattaatgtatgaaataaaaggatgcacacatagtgacatgctaatcactataatgtgggcatcaaagttgtgtgttatgtgtaattactagttatctgaataaaagagaaagagatcatccatatttcttatcctaaatgaatgtcacgtgtctttataattctttgatgaaccagatgcatttcattaaccaaatccatatacatataaatattaatcatatataattaatatcaattgggttagcaaaacaaatctagtctaggtgtgttttgcgaatgcggccctagcgtatacgaagttcctattccgaagttcctattctccagaaagtataggaacttctgtacacctgagctgattccgatgacttcgtaggttcctagctcaagccgctcgtgtccaagcgtcacttacgattagctaatgattacggcatctaggaccgactagctaactaactagtaccgaggccggccccgcgggagctcggcgcgccctgcacgttacgtacgtacgaactaatatactccaccagctgatcactgatgagccgagccgccatgcattgtaatttataacatgtgcggctgtacgcttccatctcaaatacctttttatatatatattgtactttatagtctacgacataatctgccatggtaatttataagatgtgctttattgctcgttgttctgttctcatctgtgtccatggcatggcatggatacaaaatgtatgtatggccacgcatccaatctgtgacgttgtcaaggcagaggtccaaccgtccaagaccctcttgtgccgccctgtacttgcagtcagtgacgttgtgagaaaaagctgtgggtggtctccgcagagcgcgcgggccacgagagggagccccatctctcggccgaggggtacgggggctccagacacggtcctttggtttcttctgcctgtagcgagcggccccgccccccaccgcgctgctagcccggggattagaattaattcattccgattaatcgtggcctcttgctcttcaggatgaagagctatgtttaaacgtgcaagcgctactagacaattcagtacattaaaaacgtccgcaatgtgttattaagttgtctaagcgtcaatttgtttacaccacaatatatcctgcca

SEQ ID NO: 242 - DNA, 7842 bp, synthetic construct
  misc_feature 1..7842: note = PHP21875
  source 1..7842: mol_type = other DNA
ttttcccagtcacgacgttgtaaaacgacggccagtgaattgtaatacgactcactatagggcgaattgggttacccggaccgaagcttgcatgcctgcagtgcagcgtgacccggtcgtgcccctctctagagataatgagcattgcatgtctaagttataaaaaattaccacatattttttttgtcacacttgtttgaagtgcagtttatctatctttatacatatatttaaactttactctacgaataatataatctatagtactacaataatatcagtgttttagagaatcatataaatgaacagttagacatggtctaaaggacaattgagtattttgacaacaggactctacagttttatctttttagtgtgcatgtgttctcctttttttttgcaaatagcttcacctatataatacttcatccattttattagtacatccatttagggtttagggttaatggtttttatagactaatttttttagtacatctattttattctattttagcctctaaattaagaaaactaaaactctattttagtttttttatttaataatttagatataaaatagaataaaataaagtgactaaaaattaaacaaataccctttaagaaattaaaaaaactaaggaaacatttttcttgtttcgagtagataatgccagcctgttaaacgccgtcgacgagtctaacggacaccaaccagcgaaccagcagcgtcgcgtcgggccaagcgaagcagacggcacggcatctctgtcgctgcctctggacccctctcgagagttccgctccaccgttggacttgctccgctgtcggcatccagaaattgcgtggcggagcggcagacgtgagccggcacggcaggcggcctcctcctcctctcacggcaccggcagctacgggggattcctttcccaccgctccttcgctttcccttcctcgcccgccgtaataaatagacaccccctccacaccctctttccccaacctcgtgttgttcggagcgcacacacacacaaccagatctcccccaaatccacccgtcggcacctccgcttcaaggtacgccgctcgtcctcccccccccccctctctaccttctctagatcggcgttccggtccatgcatggttagggcccggtagttctacttctgttcatgtttgtgttagatccgtgtttgtgttagatccgtgctgctagcgttcgtacacggatgcgacctgtacgtcagacacgttctgattgctaacttgccagtgtttctctttggggaatcctgggatggctctagccgttccgcagacgggatcgatttcatgattttttttgtttcgttgcatagggtttggtttgcccttttcctttatttcaatatatgccgtgcacttgtttgtcgggtcatcttttcatgcttttttttgtcttggttgtgatgatgtggtctggttgggcggtcgttctagatcggagtagaattctgtttcaaactacctggtggatttattaattttggatctgtatgtgtgtgccatacatattcatagttacgaattgaagatgatggatggaaatatcgatctaggataggtatacatgttgatgcgggttttactgatgcatatacagagatgctttttgttcgcttggttgtgatgatgtggtgtggttgggcggtcgttcattcgttctagatcggagtagaatactgtttcaaactacctggtgtatttattaattttggaactgtatgtgtgtgtcatacatcttcatagttacgagtttaagatggatggaaatatcgatctaggataggtatacatgttgatgtgggttttactgatgcatatacatgatggcatatgcagcatctattcatatgctctaaccttgagtacctatctattataataaacaagtatgttttataattattttgatcttgatatacttggatgatggcatatgcagcagctatatgtggatttttttagccctgccttcatacgctatttatttgcttggtactgtttcttttgtcgatgctcaccctgttgtttggtgttacttctgcaggtcgactctagaggatccatggccactgtgaacaactggctcgctttctccctctccccgcaggagctgccgccctcccagacgacggactccacactcatctcggccgccaccgccgaccatgtctccggcgatgtctgcttcaacatcccccaagattggagcatgaggggatcagagctttcggcgctcgtcgcggagccgaagctggaggacttcctcggcggcatctccttctccgagcagcatcacaaggccaactgcaacatgatacccagcactagcagcacagtttgctacgcgagctcaggtgctagcaccggctaccatcaccagctgtaccaccagcccaccagctcagcgctccacttcgcggactccgtaatggtggcctcctcggccggtgtccacgacggcggtgccatgctcagcgcggccgccgctaacggtgtcgctggcgctgccagtgccaacggcggcggcatcgggctgtccatgattaagaactggctgcggagccaaccggcgcccatgcagccgagggtggcggcggctgagggcgcgcaggggctctctttgtccatgaacatggcggggacgacccaaggcgctgctggcatgccacttctcgctggagagcgcgcacgggcgcccgagagtgtatcgacgtcagcacagggtggagccgtcgtcgtcacggcgccgaaggaggatagcggtggcagcggtgttgccggcgctctagtagccgtgagcacggacacgggtggcagcggcggcgcgtcggctgacaacacggcaaggaagacggtggacacgttcgggcagcgcacgtcgatttaccgtggcgtgacaaggcatagatggactgggagatatgaggcacatctttgggataacagttgcagaagggaagggcaaactcgtaagggtcgtcaagtctatttaggtggctatgataaagaggagaaagctgctagggcttatgatcttgctgctctgaagtactggggtgccacaacaacaacaaattttccagtgagtaactacgaaaaggagctcgaggacatgaagcacatgacaaggcaggagtttgtagcgtctctgagaaggaagagcagtggtttctccagaggtgcatccatttacaggggagtgactaggcatcaccaacatggaagatggcaagcacggattggacgagttgcagggaacaaggatctttacttgggcaccttcagcacccaggaggaggcagcggaggcgtacgacatcgcggcgatcaagttccgcggcctcaacgccgtcaccaacttcgacatgagccgctacgacgtgaagagcatcctggacagcagcgccctccccatcggcagcgccgccaagcgcctcaaggaggccgaggccgcagcgtccgcgcagcaccaccacgccggcgtggtgagctacgacgtcggccgcatcgcctcgcagctcggcgacggcggagccctggcggcggcgtacggcgcgcactaccacggcgccgcctggccgaccatcgcgttccagccgggcgccgccagcacaggcctgtaccacccgtacgcgcagcagccaatgcgcggcggcgggtggtgcaagcaggagcaggaccacgcggtgatcgcggccgcgcacagcctgcaggacctccaccacctgaacctgggcgcggccggcgcgcacgactttttctcggcagggcagcaggccgccgccgctgcgatgcacggcctgggtagcatcgacagtgcgtcgctcgagcacagcaccggctccaactccgtcgtctacaacggcggggtcggcgacagcaacggcgccagcgccgtcggcggcagtggcggtggctacatgatgccgatgagcgctgccggagcaaccactacatcggcaatggtgagccacgagcaggtgcatgcacgggcctacgacgaagccaagcaggctgctcagatggggtacgagagctacctggtgaacgcggagaacaatggtggcggaaggatgtctgcatgggggactgtcgtgtctgcagccgcggcggcagcagcaagcagcaacgacaacatggccgccgacgtcggccatggcggcgcgcagctcttcagtgtctggaacgacacttaagcgtacgtgccggcctggctctccgaaagggcgaattccagcacactggcggccgttactagacccaacctagacttgtccatcttctggattggccaacttaattaatgtatgaaataaaaggatgcacacatagtgacatgctaatcactataatgtgggcatcaaagttgtgtgttatgtgtaattactagttatctgaataaaagagaaagagatcatccatatttcttatcctaaatgaatgtcacgtgtctttataattctttgatgaaccagatgcatttcattaaccaaatccatatacatataaatattaatcatatataattaatatcaattgggttagcaaaacaaatctagtctaggtgtgttttgcgaatgcggccgccaccgcggtggagctcgaattccggtccgggtcacccagcttgagtattctatagtgtcacctaaatagcttggcgtaatcatggtcatagctgtttcctgtgtgaaattgttatccgctcacaattccacacaacatacgagccggaagcataaagtgtaaagcctggggtgcctaatgagtgagctaactcacattaattgcgttgcgctcactgcccgctttccagtcgggaaacctgtcgtgccagctgcattaatgaatcggccaacgcgcggggagaggcggtttgcgtattgggcgctcttccgcttcctcgctcactgactcgctgcgctcggtcgttcggctgcggcgagcggtatcagctcactcaaaggcggtaatacggttatccacagaatcaggggataacgcaggaaagaacatgtgagcaaaaggccagcaaaaggccaggaaccgtaaaaaggccgcgttgctggcgtttttccataggctccgcccccctgacgagcatcacaaaaatcgacgctcaagtcagaggtggcgaaacccgacaggactataaagataccaggcgtttccccctggaagctccctcgtgcgctctcctgttccgaccctgccgcttaccggatacctgtccgcctttctcccttcgggaagcgtggcgctttctcatagctcacgctgtaggtatctcagttcggtgtaggtcgttcgctccaagctgggctgtgtgcacgaaccccccgttcagcccgaccgctgcgccttatccggtaactatcgtcttgagtccaacccggtaagacacgacttatcgccactggcagcagccactggtaacaggattagcagagcgaggtatgtaggcggtgctacagagttcttgaagtggtggcctaactacggctacactagaagaacagtatttggtatctgcgctctgctgaagccagttaccttcggaaaaagagttggtagctcttgatccggcaaacaaaccaccgctggtagcggtggtttttttgtttgcaagcagcagattacgcgcagaaaaaaaggatctcaagaagatcctttgatcttttctacggggtctgacgctcagtggaacgaaaactcacgttaagggattttggtcatggagccacgttgtgtctcaaaatctctgatgttacattgcacaagataaaaatatatcatcatgaacaataaaactgtctgcttacataaacagtaatacaaggggtgttatgagccatattcaacgggaaacgtcttgctcgaggccgcgattaaattccaacatggatgctgatttatatgggtataaatgggctcgcgataatgtcgggcaatcaggtgcgacaatctatcgattgtatgggaagcccgatgcgccagagttgtttctgaaacatggcaaaggtagcgttgccaatgatgttacagatgagatggtcagactaaactggctgacggaatttatgcctcttccgaccatcaagcattttatccgtactcctgatgatgcatggttactcaccactgcgatccccggaaaaacagcattccaggtattagaagaatatcctgattcaggtgaaaatattgttgatgcgctggcagtgttcctgcgccggttgcattcgattcctgtttgtaattgtccttttaacagcgatcgcgtatttcgtctcgctcaggcgcaatcacgaatgaataacggtttggttgatgcgagtgattttgatgacgagcgtaatggctggcctgttgaacaagtctggaaagaaatgcataaacttttgccattctcaccggattcagtcgtcactcatggtgatttctcacttgataaccttatttttgacgaggggaaattaataggttgtattgatgttggacgagtcggaatcgcagaccgataccaggatcttgccatcctatggaactgcctcggtgagttttctccttcattacagaaacggctttttcagaaatatggtattgataatcctgatatgaataaattgcagtttcatttgatgctcgatgagtttttctaatcagaattggttaattggttgtaacactggcagagcattacgctgacttgacgggacggcggctttgttgaataaatcgaacttttgctgagttgaaggatcagatcacgcatcttcccgacaacgcagaccgttccgtggcaaagcaaaagttcaaaatcaccaactggtccacctacaacaaagctctcatcaaccgtggctccctcactttctggctggatgatggggcgattcaggcctggtatgagtcagcaacaccttcttcacgagccatgacattaacctataaaaataggcgtatcacgaggccctttcgtctcgcgcgtttcggtgatgacggtgaaaacctctgacacatgcagctcccggagacggtcacagcttgtctgtaagcggatgccgggagcagacaagcccgtcagggcgcgtcagcgggtgttggcgggtgtcggggctggcttaactatgcggcatcagagcagattgtactgagagtgcaccatatgcggtgtgaaataccgcacagatgcgtaaggagaaaataccgcatcaggaaattgtaagcgttaatattttgttaaaattcgcgttaaatttttgttaaatcagctcattttttaaccaataggccgaaatcggcaaaatcccttataaatcaaaagaatagaccgagatagggttgagtgttgttccagtttggaacaagagtccactattaaagaacgtggactccaacgtcaaagggcgaaaaaccgtctatcagggcgatggcccactacgtgaaccatcaccctaatcaagttttttggggtcgaggtgccgtaaagcactaaatcggaaccctaaagggagcccccgatttagagcttgacggggaaagccggcgaacgtggcgagaaaggaagggaagaaagcgaaaggagcgggcgctagggcgctggcaagtgtagcggtcacgctgcgcgtaaccaccacacccgccgcgcttaatgcgccgctacagggcgcgtccattcgccattcaggctgcgcaactgttgggaagggcgatcggtgcgggcctcttcgctattacgccagctggcgaaagggggatgtgctgcaaggcgattaagttgggtaacgccaggg

SEQ ID NO: 243 - DNA, 6418 bp, synthetic construct
  misc_feature 1..6418: note = PHP40428
  source 1..6418: mol_type = other DNA
gtttacccgccaatatatcctgtcaaacactgatagtttcgacgtacgcgtatcgatggcgccagctgcaggcggccgcatgcacacctcgtctagagctcagatcagcttggggctggtatcgataaatgtttccacatagattttgcatatcataatgatgtttgtcgttccgtatctatgtttcatacaaaatttttacgcatatcgcaacacatgggcacatacctagtgactgtataactctgcatgtatgagtgtatgactatatgatgtagtaactaataagaagggtagacatttgagtgattcttttattcctggacttgtaagacttgacatttctgccttgagtgcgatacatcatatggacaggggttatgcatacactgcttgtttgttgtttatgttctaagagcatctccaacaacgtgacatatgaaaatgccctacaatttaaaaatggttatattttataaaatttagggcataaataaaacatcccgctccaacattaaagccttaaatctattatagggaagcccactatgatatagtatatttgaggcactttagagggtgccctataattttttgaccatttttttatgaaatgagacactattggagtattttttttccgtagagcaccatatttcaatttgagacaccaatttaaggcattgttggagatgttctaaatgttggtttattttgtctgtatcgttgtggttttgatagtggtgcctttgcaatgtacatcttacattgacaataataataggtaaaactctacaaattttttatctaatggactcttgtatgaaacattgtacttgcacacatctgatgtaaacactgcatacttttaacagtgacaagattctgtttcattttagggctagtttgggaaccaaattttattagggtttttattttctaagaaaaagtaatttattttaccttgagaaaatataaattacttgagaaaatagagttccaaactagctcttatctttgtcgaatcctcctctattcaaatgtgacatttctggcacgtgacaactggtgatgttgtagactgtgttaagtaatacgtgtcattattactaaatgccattttagtaaatgttgagtatgtactctactacagtaagtattattggtgtatttacactagacagttggcggcctggcgggtaaagttatcctgtagaaagttgggccaggccaaaaccaaccgccaaaggaaaggccttccggcccgcccacctttgcgcgccgaaggtcagttccttcagtctcctcccgcttcagactctgaccacgtcgacaatccgggccgaaacacatctgcaccgtccacttgcgacagattgaacacaccacttctatccacgtcagcgatccgtggcactagcccttccaccaatcagcccaagttgcccctttcctttaaattcgccgcacccattgctcttctcacggccatagaaatcgaccgagcgaatccctcgcatcgcattcgcagcctttgctgcatcacaccaccgcgaaaccccagcagccgcatctgcaggtcgactctaggggtcgactccccaacctcgtgttgttcggagcgcacacacacacaaccagatctcccccaaatccacccgtcggcacctccgcttcaaggtacgccgctcgtcctcccccccccccctctctaccttctctagatcggcgttccggtccatggttagggcccggtagttctacttctgttcatgtttgtgttagatccgtgtttgtgttagatccgtgctgctagcgttcgtacacggatgcgacctgtacgtcagacacgttctgattgctaacttgccagtgtttctctttggggaatcctgggatggctctagccgttccgcagacgggatcgatttcatgattttttttgtttcgttgcatagggtttggtttgcccttttcctttatttcaatatatgccgtgcacttgtttgtcgggtcatcttttcatgcttttttttgtcttggttgtgatgatgtggtctggttgggcggtcgttctagatcggagtagaattctgtttcaaactacctggtggatttattaattttggatctgtatgtgtgtgccatacatattcatagttacgaattgaagatgatggatggaaatatcgatctaggataggtatacatgttgatgcgggttttactgatgcatatacagagatgctttttgttcgcttggttgtgatgatgtggtgtggttgggcggtcgttcattcgttctagatcggagtagaatactgtttcaaactacctggtgtatttattaattttggaactgtatgtgtgtgtcatacatcttcatagttacgagtttaagatggatggaaatatcgatctaggataggtatacatgttgatgtgggttttactgatgcatatacatgatggcatatgcagcatctattcatatgctctaaccttgagtacctatctattataataaacaagtatgttttataattattttgatcttgatatacttggatgatggcatatgcagcagctatatgtggatttttttagccctgccttcatacgctatttatttgcttggtactgtttcttttgtcgatgctcaccctgttgtttggtgttacttctgcaggtcgactctagaggatccaaaaccatggcccagtccaagcacggcctgaccaaggagatgaccatgaagtaccgcatggagggctgcgtggacggccacaagttcgtgatcaccggcgagggcatcggctaccccttcaagggcaagcaggccatcaacctgtgcgtggtggagggcggccccttgcccttcgccgaggacatcttgtccgccgccttcatgtacggcaaccgcgtgttcaccgagtacccccaggacatcgtcgactacttcaagaactcctgccccgccggctacacctgggaccgctccttcctgttcgaggacggcgccgtgtgcatctgcaacgccgacatcaccgtgagcgtggaggagaactgcatgtaccacgagtccaagttctacggcgtgaacttccccgccgacggccccgtgatgaagaagatgaccgacaactgggagccctcctgcgagaagatcatccccgtgcccaagcagggcatcttgaagggcgacgtgagcatgtacctgctgctgaaggacggtggccgcttgcgctgccagttcgacaccgtgtacaaggccaagtccgtgccccgcaagatgcccgactggcacttcatccagcacaagctgacccgcgaggaccgcagcgacgccaagaaccagaagtggcacctgaccgagcacgccatcgcctccggctccgccttgccctccggactcagatctcgatagagtcaacctagacttgtccatcttctggattggccaacttaattaatgtatgaaataaaaggatgcacacatagtgacatgctaatcactataatgtgggcatcaaagttgtgtgttatgtgtaattactagttatctgaataaaagagaaagagatcatccatatttcttatcctaaatgaatgtcacgtgtctttataattctttgatgaaccagatgcatttcattaaccaaatccatatacatataaatattaatcatatataattaatatcaattgggttagcaaaacaaatctagtctaggtgtgttttgcgaattaaggtccgggtaacagaattcgtttaaacgcggccgctaagcaggtcaccggtccgtatcccccaattcgtcaacttcgtccacagacatcaacatcttatcgtcctttgaagataagataataatgttgaagataagagtgggagcccccactaaaacattgctttgtcaaaagctaaaaaagatgatgcccgacagccacttgtgtgaagcatgagaagccggtccctccactaagaaaattagtgaagcatcttccagtggtccctccactcacagctcaatcagtgagcaacaggacgaaggaaatgacgtaagccatgacgtctaatcccaacttcgtccacagacatcaacatcttatcgtcctttgaagataagataataatgttgaagataagagtgggagccaccactaaaacattgctttgtcaaaagctaaaaaagatgatgcccgacagccacttgtgtgaagcatgagaagccggtccctccactaagaaaattagtgaagcatcttccagtggtccctccactcacagctcaatcagtgagcaacaggacgaaggaaatgacgtaagccatgacgtctaatcccacaagaatttccttatataaggaacacaaatcagaaggaagagatcaatcgaaatcaaaatcggaatcgaaatcaaaatcggaatcgaaatctctcatctaagaggatcctaggcgctatcaactttgtatagaaaagttgggtgcccgggcccaccattcaacatgacatgaaaaagccatccgagttcaacaaatcggcaattctcggatttttcattatttctgtgttcaacttcaccaccgtaatcgtgtgcggcactgtgtacggtaacagcatccgcgagtcggtgatcaattccatccagacagtgtggatccagcaggcgatcaacctgatgatcactcgagcaactttattatacaaagttgatagatatcggtccgagatccatcaggtaagtttctgcttctacctttgatatatatataataattatcattaattagtagtaatataatatttcaaatatttttttcaaaataaaagaatgtagtatatagcaattgcttttctgtagtttataagtgtgtatattttaatttataacttttctaatatatgaccaaaacatggtgatgtgcaggtccatggtggagctcgaccgatatctatcaactttgtataataaagttgctcgagtgatcatcaggttgatcgcctgctggatccacactgtctggatggaattgatcaccgactcgcggatgctgttaccgtacacagtgccgcacacgattacggtggtgaagttgaacacagaaataatgaaaaatccgagaattgccgatttgttgaactcggatggctttttcatgtcatgttgaatggtgggcccgggcacccaacttttctatacaaagttgatagcgttaacccgggtaactgtacctaaagaaggagtgcgtcgaagcagatcgttcaaacatttggcaataaagtttcttaagattgaatcctgttgccggtcttgcgatgattatcatataatttctgttgaattacgttaagcatgtaataattaacatgtaatgcatgacgttatttatgagatgggtttttatgattagagtcccgcaattatacatttaatacgcgatagaaaacaaaatatagcgcgcaaactaggataaattatcgcgcgcggtgtcatctatgttactagatcgatgtcgaatcgatgggccccggccgaagcttcggtccgggtcacacagcttgagtattctatagtgtcacctaaatagcatgcgctagagtcgacctgcagaagctcgcgcctctagttgaagacacgttcatgtcttcatcgtaagaagacactcagtagtcttcggccagaatggcctaactcaaggccatcgtggcctcttgctcttcaggatgaagagctatgtttaattcgcactggccgtcgttttacaacgtcgtgactgggaaaaccctggcgttacccaacttaatcgccttgcagcacatccccctttcgccagctggcgtaatagcgaagaggcccgcaccgatcgcccttcccaacagttgcgcagcctgaatggcgaatggcgcccgctcctttcgctttcttcccttcctttctcgccacgttcgccggctttccccgtcaagctctaaatcgggggctccctttagggttccgatttagtgctttacggcacctcgaccccaaaaaacttgatttgggtgatggttcacgtagtggccatcgccctgatagacggtttttcgccctttgacgttggagtccacgttctttaatagtggactcttgttccaaactggaacaacactcaaccctatctcgggctattcttttgatttataagggattttgccgatttcggaaccaccatcaaacaggattttcgcctgctggggcaaaccagcgtggaccgcttgctgcaactctctcagggccaggcggtgaagggcaatcagctgttgcccgtctcactggtgaaaagaaaaaccaccccagtacattaaaaacgtccgcaatgtgttattaagttgtctaagcgtcaatttgtttacaccacaatatatcctgcca

SEQ ID NO: 244 - DNA, 12211 bp, synthetic construct
  misc_feature 1..12211: note = PHP93586
  source 1..12211: mol_type = other DNA
gtttacccgccaatatatcctgtcaaacactgatagttttaaactgaaggcgggaaacgacaatctgatcatgagcggagaattaagggagtcacgttatgacccccgccgatgacgcgggacaagccgttttacgtttggaactgacagaaccgcaacgttgaaggagccactcagcaagctggtacgattgtaatacgactcactatagggcgaattgagcgctgtttaaacgctcttcaactggaagagcggttacgctgtttaaacgctcttcaactggaagagcggttactaccggttcactagctagctgctaatcgagctagttaccctatgaggtgacatgaagcgctcacggttactatgacggttagcttcacgactgttggtggcagtagcgtacgacttagctatagttccggacttacccttaagcgatttaaatcctgaggcaattcttaccctagctccctgcggctgttacgcggtcccccatcaatcttctgttcttgcggttgtagcctgtgtaacagtgctagagtatgtatgataaataggttttaagtctgcttacatgacattttttattgtggaagagacatataaaaattagagagagtggttctcatgcaacggcggacggcccggtgctaaaagagcttcaagacaaaataatgaaacaggaagagagtagatttatctaagagccaactttattatatgaatgtgtttattgttggctttagatgatatggtaaggagttagagctaataatagataggctctattattattattattaattaaactcgctctaaggaggaaagtgggaggaagggacgaggacgaagactactggaagcatcgtgcatggatgatggatgtggtgtctcttaatgtaggtggccggaggatgtacgtgttaattgcgcgataagcactcagatccaaccgcaaactacctccacactgacacactgatagagagaaagagagacctccgacgactgccgccgcagatgagccacgtacgtatacgacgtctgccggccggctcaggctgccgccatcaccctgctcgaaagtcgcgttaggcggcgccagctacataggagtatctagtctagccagttagtatactactactgcgctgatgatgaattaactctgcatagatactgtacttgcctccctccaacacccaaccacctcctgctcggctcttaataacttggacacggatcgatgccatccaaggaagaacacgacgacgacgacggaacatccaccatgcaagcttgcatccatacgccgatacgcgtgcatccatccatccaccattatttccattttccaccgatcacacgtacacaggcctatttaaggagcgacatcccactgcaactctcctcaccactcatcaccagctagctctagcaaagcacttgccatctaccgaccgccgcattccaaacagcccgacgagctagcagagcggcaggcacctccctcctcaaggaacccatggcggccaatgcgggcggcggtggagcgggaggaggcagcggcagcggcagcgtggctgcgccggcggtgtgccgccccagcggctcgcggtggacgccgacgccggagcagatcaggatgctgaaggagctctactacggctgcggcatccggtcgcccagctcggagcagatccagcgcatcaccgccatgctgcggcagcacggcaagatcgagggcaagaacgtcttctactggttccagaaccacaaggcccgcgagcgccagaagcgccgcctcaccagcctcgacgtcaacgtgcccgccgccggcgcggccgacgccaccaccagccaactcggcgtcctctcgctgtcgtcgccgccgccttcaggcgcggcgcctccctcgcccaccctcggcttctacgccgccggcaatggcggcggatcggctgtgctgctggacacgagttccgactggggcagcagcggcgctgctatggccaccgagacatgcttcctgcaggactacatgggcgtgacggacacgggcagctcgtcgcagtggccacgcttctcgtcgtcggacacgataatggcggcggccgcggcgcgggcggcgacgacgcgggcgcccgagacgctccctctcttcccgacctgcggcgacgacggcggcagcggtagcagcagctacttgccgttctggggtgccgcgtccacaactgccggcgccacttcttccgttgcgatccaacagcaacaccagctgcaggagcagtacagcttttacagcaacagcaacagcacccagctggccggcaccggcaaccaagacgtatcggcaacagcagcagcagccgccgccctggagctgagcctcagctcatggtgctccccttaccctgctgcagggagtatgggctccggcgagggtcgcggttccctcctgacctgcggcgacgtggaggaaaaccccggtcccatggcctcttcatctgcacccaggttccgtgtctattccaagtacctctttctaacatatcctgaatgtacccttgagccacagtacgccttggattcacttcgcactctcttgaacaaatatgagcccctctacatcgctgctgttagagagctccacgaagatggatcaccacatctgcacgttctcgtgcagaacaagcttcgtgcttccatcaccaatcccaatgccttaaacctccgtatggatacatctccattctccatattccatccaaatatacaagctgccaaagactgcaaccaagttcgtgattacatcacgaaggaggttgactccgatgtaaacacagctgagtggggaacattcgtggctgtttcaactccaggtcgtaaagaccgtgatgcggatatgaaacagatcattgaatctagttcctctcgcgaggaattcctcagcatggtttgcaatcgttttccgtttgaatggtctatccgtctcaaagacttcgagtacacggcacgccatctatttcctgacccagttgccacttacacacctgagtttccaaccgaatcactcatttgccatgagaccattgaaagctggaaaaatgaacatctctactctctgtccctcgagagctacatcctgtgcaccagcacccctgccgaccaggcccagtccgacctcgaatggatggacgactacagccgtagtcaccggggaggcataagtccatctacatctgcgggccaaccagaacaggaaagacttcctgggcaaggtctctaggcgtacctagtggtacctgacatcttatagtctgcaacctctcgtgtctgaattcctatctttatcaagtgttattgcttccacgactataggacagctttcgtcgaaaggttttgctcatgtgatctcgaaggattcatctagtctgatttttcgtgacttgtatcggttttattggattcatccaacatatatcaataaaaaatgagttgtgtttcctttcttcctagttcagttaaaattatttccctcctgcgcttgtgctgtaattgtctgtgtacctgttgtttgtgactgtgttagttcccttggatatgatttcgtatttgatatgtacatggagatagcttagcttcattattggagtatgaagttagtatgacatagtcactctcctggaaaattgacactgcaaaccatatttttattctgaaccacaaatcctagtcagtccgctggcatatgccgtccgtttgctgaatccagaacgtgggtttggagatgtacggctgagatgcctctatgcgaaggggatttcgtggtgaaacgagatgggagtagagcaacgcccgtggaagatgcttcaaacttccacacttttgagcaacgatcggcagtagtaaggtagacgatttcaagatcaaagcatatgaagataaacaacatcaacaacaaaatttgttggggttctatagagagaaacagagctacatacatacactgttttgtatctaccatctgagatgatgaaaagatgaaaaactaaagaatgccccggcgccaacgccaggacacgccgcgcgcgcgtcacccgagccatctcttgacccagccggcgctgtatatttacacacgttgcagcatcgatcaccacctgttcgatcgcgtcgccgtcaccaagcttggcgcgccggtcacccggtccgggcctagaaggccacccggggcgacttattgaactagtctagggcgcggctaacaacctagcttagattgccttgtctaaacccttaggctaacgcgccaccccccgaattcctgcccttaaggccaattgttcaagattcattcaacaattgaaacatctcccatgattaaatcagtataaggttgctatggtcttgcttgacaaagtttttttttgagggaatttcaactaaatttttgagtgaaactatcaaatactgattttaaaaaatttttataaaaggaagcgcagagataaaaggccatctatgctacaaaagtacccaaaaatgtaatcctaaagtatgaattgcattttttttttgtttggacgaaaggaaaggagtattaccacaagaatgatatcatcttcatatttagatcttttttgggtaaagcttgagattctctaaatatagagaaatcagaagaaaaaaaaaccgtgttttggtggttttgatttctagcctccacaataactttgacggcgtcgacaagtctaacggacaccaagcagcgaaccaccagcgccgagccaagcgaagcagacggccgagacgttgacaccttcggcgcggcatctctcgagagttccgctccggcgctccacctccaccgctggcggtttcttattccgttccgttccgcctcctgctctgctcctctccacaccacacggcacgaaaccgttacggcaccggcagcacccagcacgggagaggggattcctttcccaccgttccttccctttccgccccgccgctataaatagccagccccatccccagcttttttccccaatctcatctcctctctcctgttgttcggagcacacgcacaatccgatcgatccccaaatccccttcgtctctcctcgcgagcctcgtggatcccagcttcaaggtacggcgatcgatcatcccccctccttctctctaccttcttttctctagactacatcggatggcgatccatggttagggcctgctagtttcccttcctgttttgtcgatggctgcgaggcacaatagatctgatggcgttatgacggctaacttgtcatgttgttgcgatttatagtccctttaggagatcagtttaatttctcggatggttcgagatcggtggtccatggttagtaccctaagatccgcgctgttagggttcgtagatggaggcgacctgttctgattgttaacttgtcagtacctgggaaatcctgggatggttctagctcgtccgcagatgagatcgatttcatgatcctctgtatcttgtttcgttgcctaggttccgtctaatctatccgtggtatgatgtagatgttttgatcgtgctaactacgtcttgtaaagttaattgtcaggtcataatttttagcatgcctttttttttgtttggttttgtctaattgggctgtcgttctagatcagagtagaagactgttccaaactacctgctggatttattgaacttggatctgtatgtgtgtcacatatcttcataaattcatgattaagatggattgaaatatcttttatctttttggtatggatagttctatatgttggtgtggctttgttagatgtatacatgcttagatacatgaagcaacgtgctgctactgtttagtaattgctgttcatttgtctaataaacagataaggatatgtatttatgttgctgttggttttgctggtactttgttggatacaaatgcttcaatacagaaaacagcatgctgctacgatttaccatttatctaatcttatcatatgtctaatctaataaacaaacatgcttttaaattatcttcatatgcttggatgatggcatacacagcggctatgtgtggttttttaaatacccagcatcatgggcatgcatgacactgctttaatatgctttttatttgcttgagactgtttcttttgtttatactgaccctttagttcggtgactcttctgcaggtcgactttaacttagcctaggatccatggcccagtccaagcacggcctgaccaaggagatgaccatgaagtaccgcatggagggctgcgtggacggccacaagttcgtgatcaccggcgagggcatcggctaccccttcaagggcaagcaggccatcaacctgtgcgtggtggagggcggccccttgcccttcgccgaggacatcttgtccgccgccttcatgtacggcaaccgcgtgttcaccgagtacccccaggacatcgtcgactacttcaagaactcctgccccgccggctacacctgggaccgctccttcctgttcgaggacggcgccgtgtgcatctgcaacgccgacatcaccgtgagcgtggaggagaactgcatgtaccacgagtccaagttctacggcgtgaacttccccgccgacggccccgtgatgaagaagatgaccgacaactgggagccctcctgcgagaagatcatccccgtgcccaagcagggcatcttgaagggcgacgtgagcatgtacctgctgctgaaggacggtggccgcttgcgctgccagttcgacaccgtgtacaaggccaagtccgtgccccgcaagatgcccgactggcacttcatccagcacaagctgacccgcgaggaccgcagcgacgccaagaaccagaagtggcacctgaccgagcacgccatcgcctccggctccgccttgccctccggactcagatctcgatagggtaccaatggccagttaacagatccagctgctgctgttctagggttcacaagtctgcctatttgtcttccccaatggagctatggttgtctggtctggtccttggtcgtgtcccgtttcattgtgtactatttacctgtaatgtgtatccttaagtctggtttgatggtgtctgaaacgttttgctgtggtagagcagcatggaagaactataatgaataagtgatccctaatcattgtgtccaaattttgcttctgctatacccttttgtgctgtttcttatgttttgcttaaaaatttgatctgacaaacaaatttgtctaaattatgctcttgttctgactgtgtactgtacacatttgtattgctaccggtttggcacatagttttctctttgattgcagatcaaacccttctgattgcagattgcttggctatggctgatgtgctcactgttcttctttagcttgtatattgctgatggtggcttggctacggctgaaaaagttgctgctgcgccgacttggcaactgttgctccagtaatgctttgtcctctcttcctagccgccgacttggcacttggcagctgttgctcctgtaatgcgttgttatctcttatctcttgagatgtactatgattttgaggctgtttgacttgtgccagattgccagtgctgatgctatattatctcaggtttttatgctagtatatgttttactgtgtgctgcctgtgtcgagttacgtaatctattgaaccgctatgcgtgttgatgccctgttgttgcttgccagattgatgcccctgttgcttgcagcttgcaagctgtagtgaaatcctaaaattcgaaaccaaatctattctgaacttttgaagatctgtgatgtccggaagaaaagattcaaacagataaacgggactctccagaatctataaaataaatgatcgacaaacgctttgctttggtaggcttcctagttagttagcggaccgaagcttcggtccgggcctagaaggccagcttcggccgcccctcggtaccctgggatctgcccttactttaacgcctctaaccaacacccctttatctttataaggaacaataaacagaatttgccccactgttctaaatcacctaataatatccccagctaaaaacaataaaggtttcctagaattaagacaagcatgactgttcctccaggagggtttggaacattgttgcagtcttgcagatacgggcgaagggtgagaaacagagcggagggctggaggtgacctcggtagtcgacgccggagttgagcttgacaacgacggggcggcccctgatggacttgaggaagtccgatggcgtcttcaccgtcccgccggcgcccgaggcgggcctgtcgctgccgccgccgccgctgctcatcttgcgcgctgtgcccccggcggtgtccctgtgttgcggatcgcgggtgggccaggtggatgcgagggcgacccgtttggactccggccggagccgccggatccctggtcggtgtcagtgccgtttactctgggccccacgtgtcagtaccgtctgtagatgacaacaacccgtcgtccacagtcatgtccaaaatatcctttcttcttttttttcgattcggatatctatcttccttttttttttccaaaaatcttcttgacgcaccagcgcgcacgtttgtggtaaacgccgacacgtcggtcccacgtcgatagaccccacccaccagtgagtagcgtgtacgtattcgggggtgacggacgtgtcgccgtcgtcttgctagtcccattcccatctgagccacacatctctgaacaaaaaaaaggagggaggcctccacgcacatccccctccgtgccacccgccccaaaccctcgcgccgcctccgagacagccgccgcaaccatggccaccgccgccgccgcgtctaccgcgctcactggcgccactaccgctgcgcccaaggcgaggcgccgggcgcacctcctggccacccgccgcgccctcgccgcgcccatcaggtgctcagcggcgtcacccgccatgccgatggctcccccggccaccccgctccggccgtggggccccaccgagccccgcaagggtgctgacatcctcgtcgagtccctcgagcgctgcggcgtccgcgacgtcttcgcctaccccggcggcgcgtccatggagatccaccaggcactcacccgctcccccgtcatcgccaaccacctcttccgccacgagcaaggggaggcctttgccgcctccggctacgcgcgctcctcgggccgcgtcggcgtctgcatcgccacctccggccccggcgccaccaacctagtctccgcgctcgccgacgcgctgctcgattccgtccccatggtcgccatcacgggacaggtggcgcgacgcatgattggcaccgacgccttccaggagacgcccatcgtcgaggtcacccgctccatcaccaagcacaactacctggtcctcgacgtcgacgacatcccccgcgtcgtgcaggaggctttcttcctcgcctcctctggtcgaccagggccggtgcttgtcgacatccccaaggacatccagcagcagatggcggtgcctgtctgggacaagcccatgagtctgcctgggtacattgcgcgccttcccaagccccctgcgactgagttgcttgagcaggtgctgcgtcttgttggtgaatcgcggcgccctgttctttatgtgggcggtggctgcgcagcatctggtgaggagttgcgacgctttgtggagctgactggaatcccggtcacaactactcttatgggcctcggcaacttccccagcgacgacccactgtctctgcgcatgctaggtatgcatgggacggtgtatgcaaattatgcagtggataaggccgatctgttgcttgcacttggtgtgcggtttgatgatcgcgtgacagggaagattgaggcttttgcaagcagggctaagattgtgcacgttgatattgatccggctgagattggcaagaacaagcagccacatgtgtccatctgtgcagatgttaagcttgctttgcagggcatgaatgctcttcttgaaggaagcacatcaaagaagagctttgactttggctcatggaacgatgagttggatcagcagaagagggaattcccccttgggtataaaacatctaatgaggagatccagccacaatatgctattcaggttcttgatgagctgacgaaaggcgaggccatcatcggcacaggtgttgggcagcaccagatgtgggcggcacagtactacacttacaagcggccaaggcagtggttgtcttcagctggtcttggggctatgggatttggtttgccggctgctgctggtgcttctgtggcaaacccaggtgtcactgttgttgacatcgatggagatggtagctttctcatgaacgttcaggagctagctatgatccgaattgagaacctcccagtgaaggtctttgtgctaaacaaccagcacctggggatggtggtgcagttggaggacaggttctataaggccaacagagcgcacacatacttgggaaacccagagaatgaaagtgagatatatccagatttcgtgacgatcgccaaagggttcaacattccagcggtccgtgtgacaaagaagaacgaagtccgcgcagcgataaagaagatgctcgagactccagggccgtacctcttggatataatcgtcccacaccaggagcatgtgttgcctatgatccctagtggtggggctttcaaggatatgatcctggatggtgatggcaggactgtgtactgactagctagtcagttaacagatctgccagatcctcggtgtacaaataacccgtcttatcctatgagacgggccggcgtcagtgtgttctggaggaatttttatgtcagagcctttttctttgtgtgcttgatgtagatgccaagggaagcttattggctgttgaagcttgatgcaaaataaattatggaactctgttttttgtttatctaataataactagcaaatatgcttccattgcattgaaactaacagccttttgtgtttccaagttttattttgtgacaatgtcatctatttcaattagttgtggaatcggaaacttgcaggactaacttggaaactccaatccctcagcatcctggactttttcctggtgtaatccatgtagatattattttaatcatcattttagttctggaggtttttccatctccggttttgctcccctttcttcaaaaaaaaaaaaaaaatgccgtaggcgccgcaacgcccacctgttgttcaaactcatgggcacgagtggctcgaagattttatacaacaattgctgtagtttcaccgttgctggtgaagaagcatttttttaaaaaaatatagtggtattcattttaattagtttagttgtgcagcgagcaaaatttggacatgctctgctcggaatctgatcgacctagacacagattagcagcagtagctttgtcatctgttccaagagttgcgatctgatagaagaaaaaaaaaccttcccttcaatgtaaaaccgaaactaacaagaaagaagcacagtgccgtttaggcaagtatggagtacgtattaagcatgtagaaggccatgcatgaaccactaacaagaaagaagcgcagtgccattcaggcaagcataagcatgtagattggcatgcatgaacaactaacagtagatcgtctctggtctgattagaagttttttgggaagccaagaaatcatgtacaactggttccatctcaaattccgtggcaaaaagaggcctaagcaacataaagcttcggtccgggcctagaaggccgaagtacttggtcttcctagtcgagtagatcacattcaagcttggtcacccggtccgtcaatattctgattccgatgacttcgtaggttcctagctcaagccgctcgtgtccaagcgtcacttacgattagctaatgattacggcatctaggaccgactagtggcgcgccgactagctagctaaggtaccgagctcgaattcattccgattaatcgtggcctcttgctcttcaggatgaagagctatgtttaaacgtgcaagcgctactagacaattcagtacattaaaaacgtccgcaatgtgttattaagttgtctaagcgtcaatttgtttacaccacaatatatcctgcca

SEQ ID NO: 245 - DNA, 15523 bp, synthetic construct
  misc_feature 1..15523: note = PHP93742
  source 1..15523: mol_type = other DNA
gtttacccgccaatatatcctgtcaaacactgcggccgcacttgaccgcggatggagccggagctgtggtgaggccatcgacgggaggtgggggagaacacagtctcagtgttctttgtgagtccgcaaggtttttagcttttctgtattaattaaggttgctgttggctgtagaatacggtcgtggaagagctgtatcggtagctactacgtaagctattatatactggaagtctggagctcgtcgatctccggtcgtcttcctccatttctcctcgtcttgctttgactgctgctaccatttgcttctgttttctgatgaagcatgccatgtcggccaccagtgtttgtgtggtttttgcagggaatggctttcaagtgctgtgattgaatggccctcgtcgtcctcggctgagctcacatggacgcgtcatgtgagtgagatatatgatcatatgatgagtggggttcgggtgagtgcgtacttgaagtaggatcccgctttcactcattcattcattggcctttaaaccgggaaattttcgcgaggagatggagggaagcaagcagggtgacgagtgcagagtgccgcgagcgctttgtcaaaaggcaccgccgtaggcaaaaaaatcaatggccctgactgactcgatggtagtactactgtagagactagagagggttgctccccatatcttcgtgtgacttttactccagcattgcatttccgtcattgagacgttaattaatagcagctttcgggacagatgactgtggccatgtttcgtcacggccgcttcgtgccagctgggggtactatagtactgtgattttgttagtaaaaactttcattaggccaccattgacgaccgggccttcgcttttgctgcgctaattaaccatttcccggcgaccgaagggaacatgaacatgccccgacacatgagggcatgaggactagtgttctccctgtcgttcgttgacttgactagtgatagtttaaacgctcttcaactggaagagcggttactaccggttcactagctagctgctaatcgagctagttaccctatgaggtgacatgaagcgctcacggttactatgacggttagcttcacgactgttggtggcagtagcgtacgacttagctatagttccggacttacccttaagataacttcgtatagcatacattatacgaagttatgggcccacgcgtgaagagcggttaccagagctggtcacctttgtccaccaagatggaactgtcttcggccagaatggccatctggattcagcaggcctagaaggccatttatcgctatcaactttgtatagaaaagttgggccgaattcgagctcggtacggccagaatggcccggaccgggttacccggaccgaagcttgcatgcctgcagggcacaaaatacataaaactagattagaaaaggaagagaatacgccaaattgcagcttaatcaattagacgatttagtcctgtttttacgaaacaattgtttaagataacattaggacatgtacaatatgtgtctttggatgtgtttaaggagtaaatgtaaaaaaaatagatacgtctcttaacgaagtcattgtgtcttggctctatgctcgagacggagaaatagctaattgattaatttaatttattgaatgttcttattggtgtaatgaatatagtaaggcactggccttatacttggagtttggcatgtcttatgctatgttgcaaacaggcccggtcttgacatttcgggggccctaagagaaaatttatatagaggtcctatacgaaaatttgagtctgttattttttcaacttttaaataatatatgaaaaataaaaaattgatgatttacataattttattcaaaatgatatgactggaaatattgttacagtattttatgagtcgtaaaattatataaattatgtaatatacatttgttttgacttttgagagagtatttttacttttaatttgtcaaactagcctaaaccttaaaatacacagtaaaccaaatctaaatacattagatcaaattttctgaaaataaagttcagcaaactaaactaggattaatcaatgtaggttattagggtcgacccttcggtaggctagaattaagcaacgcgataggcacaggtgtacaacacctttcgtccttcccacgtcaattttagggcctgtttggttcacggctaattatgccacactttgcctaaggttagtcgtccgaattgaagaactaaccttatgcagaaaagttaggcaaagtatggcaagttaggtagtaaaccaaacaggccaaagtatttgtcatcaagcagacggttgcgcgacctcaaagagatgattgctagaaaataaagagacgcaacaaaagaatgaaaatatagatttatctataacttatatgcatttgatataagatagataaatgggagccctacgaaccttgaggctctgagcagtcgcatatcctgcacacccttggcgccggccctggttgcaaatatgcaattgtgtccttatccgcgactggtcacgaggctaggattgatcgaaagctgccgatgagaaatggcaagggcggcatgctgtggccttttttttacggtctgtcaggacaactgaaaagttacaaatttatagtggttgtaaacagcaacacgttaaaaagtcgattatcagtttcacagaaagaggtcgttaaaaccgccagcaagcttgtttcactatcagtctgtcgctaagacaatctctttcaccaaaaatacaatttgctttcttgccgttgcttcaagtgaaaatcttaatgttttaaattaaaatatgtggctctacgtaggaaaaaataattcaatcgagtctcatttcataaaaaaaatttggtcaaaaaattatacaccatctcgctcaagtgactcaaatatactaaacggtactgagctgtcttataatataaatttgatttactgttagaatatgatgttttatgagtgcactaaattctataaaatatatttatttttaaattataagatatttttataggtctgctcttagagagagctaaaaaagagagaggctgtctgaagaaaaatccataaccaacgcaaaatcccgggcgcccaatcagccttctccgcggagattcctagcctcagccagagctacctcatctgcgtgaggctccggtggcgccaagtgttccggcatcccggacgcaccaatggcatccgagcaacagatcttttctgcaacaacgcttcgcgtcgcggcggtgtttccctccatctgctctgctctttaaatacctccgtcgtctcctcgtctccacagcatctcaagtcttcacactcctcgccatcacataaaaccagtgcaagcagaagcagcgcaggatccgccatggcggccaatgcgggcggcggtggagcgggaggaggcagcggcagcggcagcgtggctgcgccggcggtgtgccgccccagcggctcgcggtggacgccgacgccggagcagatcaggatgctgaaggagctctactacggctgcggcatccggtcgcccagctcggagcagatccagcgcatcaccgccatgctgcggcagcacggcaagatcgagggcaagaacgtcttctactggttccagaaccacaaggcccgcgagcgccagaagcgccgcctcaccagcctcgacgtcaacgtgcccgccgccggcgcggccgacgccaccaccagccaactcggcgtcctctcgctgtcgtcgccgccgccttcaggcgcggcgcctccctcgcccaccctcggcttctacgccgccggcaatggcggcggatcggctgtgctgctggacacgagttccgactggggcagcagcggcgctgctatggccaccgagacatgcttcctgcaggactacatgggcgtgacggacacgggcagctcgtcgcagtggccacgcttctcgtcgtcggacacgataatggcggcggccgcggcgcgggcggcgacgacgcgggcgcccgagacgctccctctcttcccgacctgcggcgacgacggcggcagcggtagcagcagctacttgccgttctggggtgccgcgtccacaactgccggcgccacttcttccgttgcgatccaacagcaacaccagctgcaggagcagtacagcttttacagcaacagcaacagcacccagctggccggcaccggcaaccaagacgtatcggcaacagcagcagcagccgccgccctggagctgagcctcagctcatggtgctccccttaccctgctgcagggagtatgggctccggcgagggtcgcggttccctcctgacctgcggcgacgtggaggaaaaccccggtccgcccatggccactgtgaacaactggctcgctttctccctctccccgcaggagctgccgccctcccagacgacggactccacactcatctcggccgccaccgccgaccatgtctccggcgatgtctgcttcaacatcccccaagattggagcatgaggggatcagagctttcggcgctcgtcgcggagccgaagctggaggacttcctcggcggcatctccttctccgagcagcatcacaaggccaactgcaacatgatacccagcactagcagcacagtttgctacgcgagctcaggtgctagcaccggctaccatcaccagctgtaccaccagcccaccagctcagcgctccacttcgcggactccgtaatggtggcttcctcggccggtgtccacgacggcggtgccatgctcagcgcggccgccgctaacggtgtcgctggcgctgccagtgccaacggcggcggcatcgggctgtccatgattaagaactggctgcggagccaaccggcgcccatgcagccgagggtggcggcggctgagggcgcgcaggggctctctttgtccatgaacatggcggggacgacccaaggcgctgctggcatgccacttctcgctggagagcgcgcacgggcgcccgagagtgtatcgacgtcagcacagggtggagccgtcgtcgtcacggcgccgaaggaggatagcggtggcagcggtgttgccggcgctctagtagccgtgagcacggacacgggtggcagcggcggcgcgtcggctgacaacacggcaaggaagacggtggacacgttcgggcagcgcacgtcgatttaccgtggcgtgacaaggcatagatggactgggagatatgaggcacatctttgggataacagttgcagaagggaagggcaaactcgtaagggtcgtcaagtctatttaggtggctatgataaagaggagaaagctgctagggcttatgatcttgctgctctgaagtactggggtgccacaacaacaacaaattttccagtgagtaactacgaaaaggagctcgaggacatgaagcacatgacaaggcaggagtttgtagcgtctctgagaaggaagagcagtggtttctccagaggtgcatccatttacaggggagtgactaggcatcaccaacatggaagatggcaagcacggattggacgagttgcagggaacaaggatctttacttgggcaccttcagcacccaggaggaggcagcggaggcgtacgacatcgcggcgatcaagttccgcggcctcaacgccgtcaccaacttcgacatgagccgctacgacgtgaagagcatcctggacagcagcgccctccccatcggcagcgccgccaagcgcctcaaggaggccgaggccgcagcgtccgcgcagcaccaccacgccggcgtggtgagctacgacgtcggccgcatcgcctcgcagctcggcgacggcggagccctggcggcggcgtacggcgcgcactaccacggcgccgcctggccgaccatcgcgttccagccgggcgccgccagcacaggcctgtaccacccgtacgcgcagcagccaatgcgcggcggcgggtggtgcaagcaggagcaggaccacgcggtgatcgcggccgcgcacagcctgcaggacctccaccacctgaacctgggcgcggccggcgcgcacgactttttctcggcagggcagcaggccgccgccgctgcgatgcacggcctgggtagcatcgacagtgcgtcgctcgagcacagcaccggctccaactccgtcgtctacaacggcggggtcggcgacagcaacggcgccagcgccgtcggcggcagtggcggtggctacatgatgccgatgagcgctgccggagcaaccactacatcggcaatggtgagccacgagcaggtgcatgcacgggcctacgacgaagccaagcaggctgctcagatggggtacgagagctacctggtgaacgcggagaacaatggtggcggaaggatgtctgcatgggggactgtcgtgtctgcagccgcggcggcagcagcaagcagcaacgacaacatggccgccgacgtcgggcatggcggcgcgcagctcttcagtgtctggaacgacacttaagcgtacctagtggtaccgagcaacgcgagctgccactgctcttcactgatgtctctggaatggaaggaggaggaagtgagaacagatcaattcgacaaagcagcattagtccgttgatcggtggaagaccactcgtcagtgttgagttgaatgtttgatcaataaaatacggcaatgctgtaagggttgttttttatgccattgataatacactgtactgttcagttgttgaactctatttcttagccatgccaagtgcttttcttattttgaataacattacagcaaaaagttgaaagacaaaaaaaaaaacccccgaacagagtgctttgggtcccaagcttctttagactgtgttcggcgttccccctaaatttctccccctatatctcactcacttgtcacatcagcgttctctttccccctatatctccacgctctacagcagttccacctatatcaaacctctataccccaccacaacaatattatatactttcatcttcaactaactcatgtaccttccaatttttttctactaataattatttacgtgcacagaaacttagcaaggagagagagagcgggaatttaaatgctcggcgttaggcttttagtccgctaggtggctagaccgaggttaggacgctagttcactaggggcctagtggtgttttaagggttaccccggctttaattcgtaacgagcagtttataccgttttgcgctgcattcaccttcgtgagtccggaccccggaagacaggaactgtagcctttttccctttgctagcatgaatatgaatagaataacacgaatttaacatcaattcagctcatattggaacaatctacgcctaaaatttagtggaacacgttttgctcattttccttgaaaagcaacagtgaagcaacatcggtaaaggttcttttggttgcctctaacggtctaacctgaggattcagttataatctggaacatgacagaaacagagcctcgcacccgttttgggaccaaaaccacatgatcgatctccaagaagattattttggacaatatttttccagccacaggcaatccgaagaccacaaatcagaggcactccaaatgcagcccatccattggaccatacagataagacccggataaggcagagcccatcgtgaccgtcaaatagatcacgtccggtctacggccgtccgatctgccacccagagatagcaccgggatttcctataagcacttttcctatttgtagcccgtgacgagcccagcgccacacaccaacctcagcacaccaaggagagtacgtggaggagcagcctccacaaccaagcactcccatcatcatgcatgcagcaggctgtgctgtggacctgatcgagtttcaattgatccaagcaagcaagagggatgggagtccttggttgtggactagacttgtccatcttctggattggccaacttaattaatgtatgaaataaaaggatgcacacatagtgacatgctaatcactataatgtgggcatcaaagttgtgtgttatgtgtaattactagttatctgaataaaagagaaagagatcatccatatttcttatcctaaatgaatgtcacgtgtctttataattctttgatgaaccagatgcatttcattaaccaaatccatatacatataaatattaatcatatataattaatatcaattgggttagcaaaacaaatctagtctaggtgtgttttgcattaagacccgtcgtcaagtaggaattccagaaatcaacgcacggtaactaaatcctcgcgctaagctgggtcagtctagaaggccgatctcccgggataacttcgtatagcatacattatacgaagttatgaattccggaccgggttaccgaattcctgcccttaaggccaattgttcaagattcattcaacaattgaaacatctcccatgattaaatcagtataaggttgctatggtcttgcttgacaaagtttttttttgagggaatttcaactaaatttttgagtgaaactatcaaatactgattttaaaaaatttttataaaaggaagcgcagagataaaaggccatctatgctacaaaagtacccaaaaatgtaatcctaaagtatgaattgcattttttttttgtttggacgaaaggaaaggagtattaccacaagaatgatatcatcttcatatttagatcttttttgggtaaagcttgagattctctaaatatagagaaatcagaagaaaaaaaaaccgtgttttggtggttttgatttctagcctccacaataactttgacggcgtcgacaagtctaacggacaccaagcagcgaaccaccagcgccgagccaagcgaagcagacggccgagacgttgacaccttcggcgcggcatctctcgagagttccgctccggcgctccacctccaccgctggcggtttcttattccgttccgttccgcctcctgctctgctcctctccacaccacacggcacgaaaccgttacggcaccggcagcacccagcacgggagaggggattcctttcccaccgttccttccctttccgccccgccgctataaatagccagccccatccccagcttttttccccaatctcatctcctctctcctgttgttcggagcacacgcacaatccgatcgatccccaaatccccttcgtctctcctcgcgagcctcgtggatcccagcttcaaggtacggcgatcgatcatcccccctccttctctctaccttcttttctctagactacatcggatggcgatccatggttagggcctgctagtttcccttcctgttttgtcgatggctgcgaggcacaatagatctgatggcgttatgacggctaacttgtcatgttgttgcgatttatagtccctttaggagatcagtttaatttctcggatggttcgagatcggtggtccatggttagtaccctaagatccgcgctgttagggttcgtagatggaggcgacctgttctgattgttaacttgtcagtacctgggaaatcctgggatggttctagctcgtccgcagatgagatcgatttcatgatcctctgtatcttgtttcgttgcctaggttccgtctaatctatccgtggtatgatgtagatgttttgatcgtgctaactacgtcttgtaaagttaattgtcaggtcataatttttagcatgcctttttttttgtttggttttgtctaattgggctgtcgttctagatcagagtagaagactgttccaaactacctgctggatttattgaacttggatctgtatgtgtgtcacatatcttcataaattcatgattaagatggattgaaatatcttttatctttttggtatggatagttctatatgttggtgtggctttgttagatgtatacatgcttagatacatgaagcaacgtgctgctactgtttagtaattgctgttcatttgtctaataaacagataaggatatgtatttatgttgctgttggttttgctggtactttgttggatacaaatgcttcaatacagaaaacagcatgctgctacgatttaccatttatctaatcttatcatatgtctaatctaataaacaaacatgcttttaaattatcttcatatgcttggatgatggcatacacagcggctatgtgtggttttttaaatacccagcatcatgggcatgcatgacactgctttaatatgctttttatttgcttgagactgtttcttttgtttatactgaccctttagttcggtgactcttctgcaggtcgactttaacttagcctaggatccatggcccagtccaagcacggcctgaccaaggagatgaccatgaagtaccgcatggagggctgcgtggacggccacaagttcgtgatcaccggcgagggcatcggctaccccttcaagggcaagcaggccatcaacctgtgcgtggtggagggcggccccttgcccttcgccgaggacatcttgtccgccgccttcatgtacggcaaccgcgtgttcaccgagtacccccaggacatcgtcgactacttcaagaactcctgccccgccggctacacctgggaccgctccttcctgttcgaggacggcgccgtgtgcatctgcaacgccgacatcaccgtgagcgtggaggagaactgcatgtaccacgagtccaagttctacggcgtgaacttccccgccgacggccccgtgatgaagaagatgaccgacaactgggagccctcctgcgagaagatcatccccgtgcccaagcagggcatcttgaagggcgacgtgagcatgtacctgctgctgaaggacggtggccgcttgcgctgccagttcgacaccgtgtacaaggccaagtccgtgccccgcaagatgcccgactggcacttcatccagcacaagctgacccgcgaggaccgcagcgacgccaagaaccagaagtggcacctgaccgagcacgccatcgcctccggctccgccttgccctccggactcagatctcgatagggtaccaatggccagttaacagatccagctgctgctgttctagggttcacaagtctgcctatttgtcttccccaatggagctatggttgtctggtctggtccttggtcgtgtcccgtttcattgtgtactatttacctgtaatgtgtatccttaagtctggtttgatggtgtctgaaacgttttgctgtggtagagcagcatggaagaactataatgaataagtgatccctaatcattgtgtccaaattttgcttctgctatacccttttgtgctgtttcttatgttttgcttaaaaatttgatctgacaaacaaatttgtctaaattatgctcttgttctgactgtgtactgtacacatttgtattgctaccggtttggcacatagttttctctttgattgcagatcaaacccttctgattgcagattgcttggctatggctgatgtgctcactgttcttctttagcttgtatattgctgatggtggcttggctacggctgaaaaagttgctgctgcgccgacttggcaactgttgctccagtaatgctttgtcctctcttcctagccgccgacttggcacttggcagctgttgctcctgtaatgcgttgttatctcttatctcttgagatgtactatgattttgaggctgtttgacttgtgccagattgccagtgctgatgctatattatctcaggtttttatgctagtatatgttttactgtgtgctgcctgtgtcgagttacgtaatctattgaaccgctatgcgtgttgatgccctgttgttgcttgccagattgatgcccctgttgcttgcagcttgcaagctgtagtgaaatcctaaaattcgaaaccaaatctattctgaacttttgaagatctgtgatgtccggaagaaaagattcaaacagataaacgggactctccagaatctataaaataaatgatcgacaaacgctttgctttggtaggcttcctagttagttagcggaccgggatccgacggcgtcttcaccgccccgccgccgcccgagccggacttgtcgctgccgccgccgctgctcatcttgcgcgcttgtgtccctccctcagtccctgcgttcgcggatcgcgggcgggtgcgacccgtttggactccggccggtagccttcgtgccgacctcgctcggtccaccggtttgtcggggacccacatgtcagtgaaggtacgcgtccacgtccacagaccctactaccccagacgagtccaaatcgctgttccctcacactctcgtgtaccagcgcgcggcggaaagcacctttccaacaaccgccgacacgtcggtcccacgtcggcatgctccaccggtcagtgtttggcgtgtacggctcccggcgacgaacgagtgtggcctaagctttcctactcccatcccatctgagccacacatctctctcacgccacgcgcacaaaacagccaggctcccacgcgcatcaaccggctctccctttccgtgccactcgcccccaagccccaaaccctcgccgccgcctccgagacagccgccgccacctaggccatggccaccgccgccgccgcgtctaccgcgctcactggcgccactaccgctgcgcccaaggcgaggcgccgggcgcacctcctggccacccgccgcgccctcgccgcgcccatcaggtgctcagcggcgtcacccgccatgccgatggctcccccggccaccccgctccggccgtggggccccaccgagccccgcaagggtgctgacatcctcgtcgagtccctcgagcgctgcggcgtccgcgacgtcttcgcctaccccggcggcgcgtcgatggagatccaccaggcactcacccgctcccccgtcatcgccaaccacctcttccgccacgagcaaggggaggcctttgccgcctccggctacgcgcgctcctcgggccgcgtcggcgtctgcatcgccacctccggccccggcgccaccaacctagtctccgcgctcgccgacgcgctgctcgattccgtcccgatggtcgccatcacgggacaggtggcgcgacgcatgattggcaccgacgccttccaggagacgcccatcgtcgaggtcacgcgctccatcaccaagcacaactacctggtcctcgacgtcgacgacatcccccgcgtcgtgcaggaggctttcttcctcgcctcctctggtcgaccagggccggtgcttgtcgacatccccaaggacatccagcagcagatggcggtgcctgtctgggacaagcccatgagtctgcctgggtacattgcgcgccttcccaagccccctgcgactgagttgcttgagcaggtgctgcgtcttgttggtgaatcgcggcgccctgttctttatgtgggcggtggctgcgcagcatctggtgaggagttgcgacgctttgtggagctgactggaatcccggtcacaactactcttatgggcctcggcaacttccccagcgacgacccactgtctctgcgcatgctaggtatgcatgggacggtgtatgcaaattatgcagtggataaggccgatctgttgcttgcacttggtgtgcggtttgatgatcgcgtgacagggaagattgaggcttttgcaagcagggctaagattgtgcacgttgatattgatccggctgagattggcaagaacaagcagccacatgtgtccatctgtgcagatgttaagcttgctttgcagggcatgaatgctcttcttgaaggaagcacatcaaagaagagctttgactttggctcatggaacgatgagttggatcagcagaagagggaattcccccttgggtataaaacatctaatgaggagatccagccacaatatgctattcaggttcttgatgagctgacgaaaggcgaggccatcatcggcacaggtgttgggcagcaccagatgtgggcggcacagtactacacttacaagcggccaaggcagtggttgtcttcagctggtcttggggctatgggatttggtttgccggctgctgctggtgcttctgtggcaaacccaggtgtcactgttgttgacatcgatggagatggtagctttctcatgaacgttcaggagctagctatgatccgaattgagaacctcccagtgaaggtctttgtgctaaacaaccagcacctggggatggtggtgcagttggaggacaggttctataaggccaacagagcgcacacatacttgggaaacccagagaatgaaagtgagatatatccagatttcgtgacgatcgccaaagggttcaacattccagccgtccgtgtgacaaagaagaacgaagtccgcgcagcgataaagaagatgctcgagactccagggccgtacctcttggatataatcgtcccacaccaggagcatgtgttgcctatgatccctagtggtggggctttcaaggatatgatcctggatggtgatggcaggactgtgtactgacttcgaataggtacccggggatcctctagtgccgtgggtcgtttaagctgccgctgtacctgtgtcgtctggtgccttctggtgtacctgggaggttgtcgtctatcaagtatctgtggttggtgtcatgagtcagtgagtcccaatactgttcgtgtcctgtgtgcattatacccaaaactgttatgggcaaatcatgaataagcttgatgttcgaacttaaaagtctctgctcaatatggtattatggttgtttttgttcgtctcctaatatttgcctgggatcaaattttattggctggtgttcatttgacctccatgttcttgctaggctccattttttactctacagccataatatgtttgattgtttggtttgttctttgttgtacacctggttctgtcgagcttagttttcgacactggcttacagcttaacatgttgctattttattgggttctgattgctattttattgggttctgattgctagtttttgctgaatccaaaaaccatgttatttatttaagcgatccaggttattattatgatggtggctaagtttttttttttccaagggtaaattttctggattctccagtgtttctgtggccgaattcaatcactagagtcgacctgcaaagcttcggtccgggcctagaaggcccgcgccacttacgcttgattccgatgacttcgtaggttcctagctcaagccgctcgtgtccaagcgtcacttacgattagctaatgattacggcatctaggaccgactagctagctagctaagagctcggtaccgagctcgaattcattccgattaatcgtggcctcttgctcttcaggatgaagagctatgtttaaacgtgcaagcgctactagacaattcagtacattaaaaacgtccgcaatgtgttattaagttgtctaagcgtcaatttgtttacaccacaatatatcctgcca

SEQ ID NO: 246 - DNA, 12833 bp, synthetic construct
  misc_feature 1..12833: note = PHP93937
  source 1..12833: mol_type = other DNA
gtttacccgccaatatatcctgtcaaacactgcggccgcacttgaccgcggatggagccggagctgtggtgaggccatcgacgggaggtgggggagaacacagtctcagtgttctttgtgagtccgcaaggtttttagcttttctgtattaattaaggttgctgttggctgtagaatacggtcgtggaagagctgtatcggtagctactacgtaagctattatatactggaagtctggagctcgtcgatctccggtcgtcttcctccatttctcctcgtcttgctttgactgctgctaccatttgcttctgttttctgatgaagcatgccatgtcggccaccagtgtttgtgtggtttttgcagggaatggctttcaagtgctgtgattgaatggccctcgtcgtcctcggctgagctcacatggacgcgtcatgtgagtgagatatatgatcatatgatgagtggggttcgggtgagtgcgtacttgaagtaggatcccgctttcactcattcattcattggcctttaaaccgggaaattttcgcgaggagatggagggaagcaagcagggtgacgagtgcagagtgccgcgagcgctttgtcaaaaggcaccgccgtaggcaaaaaaatcaatggccctgactgactcgatggtagtactactgtagagactagagagggttgctccccatatcttcgtgtgacttttactccagcattgcatttccgtcattgagacgttaattaatagcagctttcgggacagatgactgtggccatgtttcgtcacggccgcttcgtgccagctgggggtactatagtactgtgattttgttagtaaaaactttcattaggccaccattgacgaccgggccttcgcttttgctgcgctaattaaccatttcccggcgaccgaagggaacatgaacatgccccgacacatgagggcatgaggactagtgttctccctgtcgttcgttgacttgactagtgatagtttaaacgctcttcaactggaagagcggttactaccggttcactagctagctgctaatcgagctagttaccctatgaggtgacatgaagcgctcacggttactatgacggttagcttcacgactgttggtggcagtagcgtacgacttagctatagttccggacttacccttaagataacttcgtatagcatacattatacgaagttatgggcccacgcgtgaagagcggttaccagagctggtcacctttgtccaccaagatggaactgtcttcggccagaatggccatctggattcagcaggcctagaaggccatttatcgctatcaactttgtatagaaaagttgggccgaattcgagctcggtacggccagaatggcccggaccgggttacccggaccgaagcttgcatgcctgcaggccggctttaattcgtaacgagcagtttataccgttttgcgctgcattcaccttcgtgagtccggaccccggaagacaggaactgtagcctttttccctttgctagcatgaatatgaatagaataacacgaatttaacatcaattcagctcatattggaacaatctacgcctaaaatttagtggaacacgttttgctcattttccttgaaaagcaacagtgaagcaacatcggtaaaggttcttttggttgcctctaacggtctaacctgaggattcagttataatctggaacatgacagaaacagagcctcgcacccgttttgggaccaaaaccacatgatcgatctccaagaagattattttggacaatatttttccagccacaggcaatccgaagaccacaaatcagaggcactccaaatgcagcccatccattggaccatacagataagacccggataaggcagagcccatcgtgaccgtcaaatagatcacgtccggtctacggccgtccgatctgccacccagagatagcaccgggatttcctataagcacttttcctatttgtagcccgtgacgagcccagcgccacacaccaacctcagcacaccaaggagagtacgtggaggagcagccggatccatggcggccaatgcgggcggcggtggagcgggaggaggcagcggcagcggcagcgtggctgcgccggcggtgtgccgccccagcggctcgcggtggacgccgacgccggagcagatcaggatgctgaaggagctctactacggctgcggcatccggtcgcccagctcggagcagatccagcgcatcaccgccatgctgcggcagcacggcaagatcgagggcaagaacgtcttctactggttccagaaccacaaggcccgcgagcgccagaagcgccgcctcaccagcctcgacgtcaacgtgcccgccgccggcgcggccgacgccaccaccagccaactcggcgtcctctcgctgtcgtcgccgccgccttcaggcgcggcgcctccctcgcccaccctcggcttctacgccgccggcaatggcggcggatcggctgtgctgctggacacgagttccgactggggcagcagcggcgctgctatggccaccgagacatgcttcctgcaggactacatgggcgtgacggacacgggcagctcgtcgcagtggccacgcttctcgtcgtcggacacgataatggcggcggccgcggcgcgggcggcgacgacgcgggcgcccgagacgctccctctcttcccgacctgcggcgacgacggcggcagcggtagcagcagctacttgccgttctggggtgccgcgtccacaactgccggcgccacttcttccgttgcgatccaacagcaacaccagctgcaggagcagtacagcttttacagcaacagcaacagcacccagctggccggcaccggcaaccaagacgtatcggcaacagcagcagcagccgccgccctggagctgagcctcagctcatggtgctccccttaccctgctgcagggagtatgtgagagcaacgcgagctgccactgctcttcactgatgtctctggaatggaaggaggaggaagtgagaacagatcaattcgacaaagcagcattagtccgttgatcggtggaagaccactcgtcagtgttgagttgaatgtttgatcaataaaatacggcaatgctgtaagggttgttttttatgccattgataatacactgtactgttcagttgttgaactctatttcttagccatgccaagtgcttttcttattttgaataacattacagcaaaaagttgaaagacaaaaaaaaaaacccccgaacagagtgctttgggtcccaagcttctttagactgtgttcggcgttccccctaaatttctccccctatatctcactcacttgtcacatcagcgttctctttccccctatatctccacgctctacagcagttccacctatatcaaacctctataccccaccacaacaatattatatactttcatcttcaactaactcatgtaccttccaatttttttctactaataattatttacgtgcacagaaacttagcaaggagagagagagcgggaatttaaatgctcggcgttaggcttttagtccgctaggtggctagaccgaggttaggacgctagttcactaggggcctagtggtgttttaagggttaccgcacaaaatacataaaactagattagaaaaggaagagaatacgccaaattgcagcttaatcaattagacgatttagtcctgtttttacgaaacaattgtttaagataacatggccttatacttggagtttggcatgtcttatgctatgttgcaaacaggcccggtcttgacatttcgggggccctaagagaaaatttatatagaggtcctatacgaaaatttgagtctgttattttttcaacttttaaataatatatgaaaaataaaaaattgatgatttacataattttattcaaaatgatatgactggaaatattgttacagtattttatgagtcgtaaaattatataaattatgtaatatacatttgttttgacttttgagagagtatttttacttttaatttgtcaaactagcctaaaccttaaaatacacagtaaaccaaatctaaatacattagatcaaattttctgaaaataaagttcagcaaactaaactaggattaatcaatgtaggttattagggtcgacccttcggtaggctagaattaagcaacgcgataggcacaggtgtacaacacctttcgtccttcccacgtcaataaagtatttgtcatcaagcagacggttgcgcgacctcaaagagatgattgctagaaaataaagagacgcaacaaaagaatgaaaatatagatttatctataacttatatgcatttgatataagatagataaatgggagccctacgaaccttgaggctctgagcagtcgcatatcctgcacacccttggcgccggccctggttgcaaatatgcaattgtgtccttatccgcgactggtcacgaggctaggattgatcgaaagctgccgatgagaaatggcaagggcggcatgctgtggccttttttttacggtctgtcaggacaactgaaaagttacaaatttatagtggttgtaaacagcaacacgttaaaaagtcgattatcagtttcacagaaagaggtcgttaaaaccgccagcaagcttgtttcactatcagtctgtcgctaagacaatctctttcaccaaaaatacaatttgctttcttgccgttgcttcaagtgaaaatctgagctaaaaaagagagaggctgtctgaagaaaaatccataaccaacgcaaaatcccgggcgcccaatcagccttctccgcggagattcctagcctcagccagagctacctcatctgcgtgaggctccggtggcgccaagtgttccggcatcccggacgcaccaatggcatccgagcaacagatcttttctgcaacaacgcttcgcgtcgcggcggtgtttccctccatctgctctgctctttaaatacctccgtcgtctcctcgtctccacagcatctcaagtcttcacactcctcgccatcacataaaaccagtgcaagcagaagcagcgcatccacaaccaagcactcccatcatcatgcatgcagcaggctgtgctgtggacctgatcgagtttcaattgatccaagcaagcaagagggatgggagtccttggttgtggagggggtggaggcgccaccgcccaccggccaccgctgcggatatctaggtgttcggatgcacgtgagcgcgcactggttccagtttgtaccatgatgtaaattacttaccgtaccagggttcaatcggcaaggaagaattgttgtgttcactgtcttgggcagtctcttggtccaatatgaatcaacttacacagcatctccaaaaacttctaaaattactagctgaatgcccgtgcgttgcaacgggaatatataataccagtatactacgataacttatatacaaaatgtatgttatatcgttatgagaaaatgtttcataaccaatttatgattctggtcatacataaattttgttatttatagtctatctgtttcaccactacattgcaaccatcagattaagacccgtcgtcaagtaggaattccagaaatcaacgcacggtaactaaatcctcgcgctaagctgggtcagtctagaaggccgatctcccgggataacttcgtatagcatacattatacgaagttatgaattccggaccgggttaccgaattcctgcccttaaggccaattgttcaagattcattcaacaattgaaacatctcccatgattaaatcagtataaggttgctatggtcttgcttgacaaagtttttttttgagggaatttcaactaaatttttgagtgaaactatcaaatactgattttaaaaaatttttataaaaggaagcgcagagataaaaggccatctatgctacaaaagtacccaaaaatgtaatcctaaagtatgaattgcattttttttttgtttggacgaaaggaaaggagtattaccacaagaatgatatcatcttcatatttagatcttttttgggtaaagcttgagattctctaaatatagagaaatcagaagaaaaaaaaaccgtgttttggtggttttgatttctagcctccacaataactttgacggcgtcgacaagtctaacggacaccaagcagcgaaccaccagcgccgagccaagcgaagcagacggccgagacgttgacaccttcggcgcggcatctctcgagagttccgctccggcgctccacctccaccgctggcggtttcttattccgttccgttccgcctcctgctctgctcctctccacaccacacggcacgaaaccgttacggcaccggcagcacccagcacgggagaggggattcctttcccaccgttccttccctttccgccccgccgctataaatagccagccccatccccagcttttttccccaatctcatctcctctctcctgttgttcggagcacacgcacaatccgatcgatccccaaatccccttcgtctctcctcgcgagcctcgtggatcccagcttcaaggtacggcgatcgatcatcccccctccttctctctaccttcttttctctagactacatcggatggcgatccatggttagggcctgctagtttcccttcctgttttgtcgatggctgcgaggcacaatagatctgatggcgttatgacggctaacttgtcatgttgttgcgatttatagtccctttaggagatcagtttaatttctcggatggttcgagatcggtggtccatggttagtaccctaagatccgcgctgttagggttcgtagatggaggcgacctgttctgattgttaacttgtcagtacctgggaaatcctgggatggttctagctcgtccgcagatgagatcgatttcatgatcctctgtatcttgtttcgttgcctaggttccgtctaatctatccgtggtatgatgtagatgttttgatcgtgctaactacgtcttgtaaagttaattgtcaggtcataatttttagcatgcctttttttttgtttggttttgtctaattgggctgtcgttctagatcagagtagaagactgttccaaactacctgctggatttattgaacttggatctgtatgtgtgtcacatatcttcataaattcatgattaagatggattgaaatatcttttatctttttggtatggatagttctatatgttggtgtggctttgttagatgtatacatgcttagatacatgaagcaacgtgctgctactgtttagtaattgctgttcatttgtctaataaacagataaggatatgtatttatgttgctgttggttttgctggtactttgttggatacaaatgcttcaatacagaaaacagcatgctgctacgatttaccatttatctaatcttatcatatgtctaatctaataaacaaacatgcttttaaattatcttcatatgcttggatgatggcatacacagcggctatgtgtggttttttaaatacccagcatcatgggcatgcatgacactgctttaatatgctttttatttgcttgagactgtttcttttgtttatactgaccctttagttcggtgactcttctgcaggtcgactttaacttagcctaggatccatggcccagtccaagcacggcctgaccaaggagatgaccatgaagtaccgcatggagggctgcgtggacggccacaagttcgtgatcaccggcgagggcatcggctaccccttcaagggcaagcaggccatcaacctgtgcgtggtggagggcggccccttgcccttcgccgaggacatcttgtccgccgccttcatgtacggcaaccgcgtgttcaccgagtacccccaggacatcgtcgactacttcaagaactcctgccccgccggctacacctgggaccgctccttcctgttcgaggacggcgccgtgtgcatctgcaacgccgacatcaccgtgagcgtggaggagaactgcatgtaccacgagtccaagttctacggcgtgaacttccccgccgacggccccgtgatgaagaagatgaccgacaactgggagccctcctgcgagaagatcatccccgtgcccaagcagggcatcttgaagggcgacgtgagcatgtacctgctgctgaaggacggtggccgcttgcgctgccagttcgacaccgtgtacaaggccaagtccgtgccccgcaagatgcccgactggcacttcatccagcacaagctgacccgcgaggaccgcagcgacgccaagaaccagaagtggcacctgaccgagcacgccatcgcctccggctccgccttgccctccggactcagatctcgatagggtaccaatggccagttaacagatccagctgctgctgttctagggttcacaagtctgcctatttgtcttccccaatggagctatggttgtctggtctggtccttggtcgtgtcccgtttcattgtgtactatttacctgtaatgtgtatccttaagtctggtttgatggtgtctgaaacgttttgctgtggtagagcagcatggaagaactataatgaataagtgatccctaatcattgtgtccaaattttgcttctgctatacccttttgtgctgtttcttatgttttgcttaaaaatttgatctgacaaacaaatttgtctaaattatgctcttgttctgactgtgtactgtacacatttgtattgctaccggtttggcacatagttttctctttgattgcagatcaaacccttctgattgcagattgcttggctatggctgatgtgctcactgttcttctttagcttgtatattgctgatggtggcttggctacggctgaaaaagttgctgctgcgccgacttggcaactgttgctccagtaatgctttgtcctctcttcctagccgccgacttggcacttggcagctgttgctcctgtaatgcgttgttatctcttatctcttgagatgtactatgattttgaggctgtttgacttgtgccagattgccagtgctgatgctatattatctcaggtttttatgctagtatatgttttactgtgtgctgcctgtgtcgagttacgtaatctattgaaccgctatgcgtgttgatgccctgttgttgcttgccagattgatgcccctgttgcttgcagcttgcaagctgtagtgaaatcctaaaattcgaaaccaaatctattctgaacttttgaagatctgtgatgtccggaagaaaagattcaaacagataaacgggactctccagaatctataaaataaatgatcgacaaacgctttgctttggtaggcttcctagttagttagcggaccgggatccgacggcgtcttcaccgccccgccgccgcccgagccggacttgtcgctgccgccgccgctgctcatcttgcgcgcttgtgtccctccctcagtccctgcgttcgcggatcgcgggcgggtgcgacccgtttggactccggccggtagccttcgtgccgacctcgctcggtccaccggtttgtcggggacccacatgtcagtgaaggtacgcgtccacgtccacagaccctactaccccagacgagtccaaatcgctgttccctcacactctcgtgtaccagcgcgcggcggaaagcacctttccaacaaccgccgacacgtcggtcccacgtcggcatgctccaccggtcagtgtttggcgtgtacggctcccggcgacgaacgagtgtggcctaagctttcctactcccatcccatctgagccacacatctctctcacgccacgcgcacaaaacagccaggctcccacgcgcatcaaccggctctccctttccgtgccactcgcccccaagccccaaaccctcgccgccgcctccgagacagccgccgccacctaggccatggccaccgccgccgccgcgtctaccgcgctcactggcgccactaccgctgcgcccaaggcgaggcgccgggcgcacctcctggccacccgccgcgccctcgccgcgcccatcaggtgctcagcggcgtcacccgccatgccgatggctcccccggccaccccgctccggccgtggggccccaccgagccccgcaagggtgctgacatcctcgtcgagtccctcgagcgctgcggcgtccgcgacgtcttcgcctaccccggcggcgcgtcgatggagatccaccaggcactcacccgctcccccgtcatcgccaaccacctcttccgccacgagcaaggggaggcctttgccgcctccggctacgcgcgctcctcgggccgcgtcggcgtctgcatcgccacctccggccccggcgccaccaacctagtctccgcgctcgccgacgcgctgctcgattccgtcccgatggtcgccatcacgggacaggtggcgcgacgcatgattggcaccgacgccttccaggagacgcccatcgtcgaggtcacgcgctccatcaccaagcacaactacctggtcctcgacgtcgacgacatcccccgcgtcgtgcaggaggctttcttcctcgcctcctctggtcgaccagggccggtgcttgtcgacatccccaaggacatccagcagcagatggcggtgcctgtctgggacaagcccatgagtctgcctgggtacattgcgcgccttcccaagccccctgcgactgagttgcttgagcaggtgctgcgtcttgttggtgaatcgcggcgccctgttctttatgtgggcggtggctgcgcagcatctggtgaggagttgcgacgctttgtggagctgactggaatcccggtcacaactactcttatgggcctcggcaacttccccagcgacgacccactgtctctgcgcatgctaggtatgcatgggacggtgtatgcaaattatgcagtggataaggccgatctgttgcttgcacttggtgtgcggtttgatgatcgcgtgacagggaagattgaggcttttgcaagcagggctaagattgtgcacgttgatattgatccggctgagattggcaagaacaagcagccacatgtgtccatctgtgcagatgttaagcttgctttgcagggcatgaatgctcttcttgaaggaagcacatcaaagaagagctttgactttggctcatggaacgatgagttggatcagcagaagagggaattcccccttgggtataaaacatctaatgaggagatccagccacaatatgctattcaggttcttgatgagctgacgaaaggcgaggccatcatcggcacaggtgttgggcagcaccagatgtgggcggcacagtactacacttacaagcggccaaggcagtggttgtcttcagctggtcttggggctatgggatttggtttgccggctgctgctggtgcttctgtggcaaacccaggtgtcactgttgttgacatcgatggagatggtagctttctcatgaacgttcaggagctagctatgatccgaattgagaacctcccagtgaaggtctttgtgctaaacaaccagcacctggggatggtggtgcagttggaggacaggttctataaggccaacagagcgcacacatacttgggaaacccagagaatgaaagtgagatatatccagatttcgtgacgatcgccaaagggttcaacattccagccgtccgtgtgacaaagaagaacgaagtccgcgcagcgataaagaagatgctcgagactccagggccgtacctcttggatataatcgtcccacaccaggagcatgtgttgcctatgatccctagtggtggggctttcaaggatatgatcctggatggtgatggcaggactgtgtactgacttcgaataggtacccggggatcctctagtgccgtgggtcgtttaagctgccgctgtacctgtgtcgtctggtgccttctggtgtacctgggaggttgtcgtctatcaagtatctgtggttggtgtcatgagtcagtgagtcccaatactgttcgtgtcctgtgtgcattatacccaaaactgttatgggcaaatcatgaataagcttgatgttcgaacttaaaagtctctgctcaatatggtattatggttgtttttgttcgtctcctaatatttgcctgggatcaaattttattggctggtgttcatttgacctccatgttcttgctaggctccattttttactctacagccataatatgtttgattgtttggtttgttctttgttgtacacctggttctgtcgagcttagttttcgacactggcttacagcttaacatgttgctattttattgggttctgattgctattttattgggttctgattgctagtttttgctgaatccaaaaaccatgttatttatttaagcgatccaggttattattatgatggtggctaagtttttttttttccaagggtaaattttctggattctccagtgtttctgtggccgaattcaatcactagagtcgacctgcaaagcttcggtccgggcctagaaggcccgcgccacttacgcttgattccgatgacttcgtaggttcctagctcaagccgctcgtgtccaagcgtcacttacgattagctaatgattacggcatctaggaccgactagctagctagctaagagctcggtaccgagctcgaattcattccgattaatcgtggcctcttgctcttcaggatgaagagctatgtttaaacgtgcaagcgctactagacaattcagtacattaaaaacgtccgcaatgtgttattaagttgtctaagcgtcaatttgtttacaccacaatatatcctgcca

SEQ ID NO: 247 - DNA, 16555 bp, synthetic construct
  misc_feature 1..16555: note = PHP94638
  source 1..16555: mol_type = other DNA
gtttacccgccaatatatcctgtcaaacactgcggccgcacttgaccgcggatggagccggagctgtggtgaggccatcgacgggaggtgggggagaacacagtctcagtgttctttgtgagtccgcaaggtttttagcttttctgtattaattaaggttgctgttggctgtagaatacggtcgtggaagagctgtatcggtagctactacgtaagctattatatactggaagtctggagctcgtcgatctccggtcgtcttcctccatttctcctcgtcttgctttgactgctgctaccatttgcttctgttttctgatgaagcatgccatgtcggccaccagtgtttgtgtggtttttgcagggaatggctttcaagtgctgtgattgaatggccctcgtcgtcctcggctgagctcacatggacgcgtcatgtgagtgagatatatgatcatatgatgagtggggttcgggtgagtgcgtacttgaagtaggatcccgctttcactcattcattcattggcctttaaaccgggaaattttcgcgaggagatggagggaagcaagcagggtgacgagtgcagagtgccgcgagcgctttgtcaaaaggcaccgccgtaggcaaaaaaatcaatggccctgactgactcgatggtagtactactgtagagactagagagggttgctccccatatcttcgtgtgacttttactccagcattgcatttccgtcattgagacgttaattaatagcagctttcgggacagatgactgtggccatgtttcgtcacggccgcttcgtgccagctgggggtactatagtactgtgattttgttagtaaaaactttcattaggccaccattgacgaccgggccttcgcttttgctgcgctaattaaccatttcccggcgaccgaagggaacatgaacatgccccgacacatgagggcatgaggactagtgttctccctgtcgttcgttgacttgactagtgatagtttaaacgctcttcaactggaagagcggttactaccggttcactagctagctgctaatcgagctagttaccctatgaggtgacatgaagcgctcacggttactatgacggttagcttcacgactgttggtggcagtagcgtacgacttagctatagttccggacttacccagatcttggccaataacttcgtatagcatacattatacgaagttataggtacaattcgagctcggtaccctggttcacaaactcaatacaacacacagtggagtagggtattacgctccggcggcccgaaccactctaaatccttgtgtcctcgtgtgctcttccaccattaatgactgtaattgcagggacacgaagagttgtagcgcttttgccaacaagatccgctatatgctagtagagtggaacctgcacagcaacaagcatccaataatctgagaataagaattatgtgtggtgatggttctcatctctgcaactcgccattttcgcgagagaaccaaatccaagttggtgaagatcatgatttgggctcatgggctggcatagtagctattacctttgcaattgtggttcgaatctatccgatattctccttttcagggagagctaatgcttatgcttattgggtattttggtttgacactgcttcacgcccaaaaaaaggcaactatgtctgagttggatatggcccaaaaaaaggcagctatgtctgagttggatatggaagtcttctttcgtttagggtgaagtaagaccaagctcatgagcttattatcttaggtcggaacaaattagttgataggcatggcacatttatcaaattataatgattttaacagaaaagcaacacctctttttcagcagcaccagctttgcaagctgcaattgacactccaagcatagtatttgctccaaactcagcctgcatttcgcacaatatcatatctatttccatttggataaaatatattttccagaaatatgggaacagaatcaagatacagaaaaaagttgtggtagtagtggtaagtggaaacacaagtacagtgaaaagatagcattatttctgaacagtcaaattaaccgaaataagtagtatcacatactgcccctaaattgactacacccaatgtaaagaattgcttgagcatattgagccatcagttgtttgtttgtgtaacggatttgacaatgcagagttcaggagcaaaaaaccgcaaaggagagaaagagggaaaggatctcctagtatcccaccttgtggcgcgccctgtcaagtgcatgatggcctggtcgatctgcgtctgctgctgcggttccatcccaacgagtgcctccgacaccttgtcgttgatcacccgcaccgcgtaggcgacccccctggcgaggaacttccgcctctcggaggccccggccgcgtcggcggcggcgccctcgagcgcgcccacgctagccgtagatgctcggtgcacggccttgttggtgtgcaactcgacctcaacggccggtgcgctacgcccgtcaaggatctggcgcgcccgcaccctcgtgatcacggtgggcgcctcccgcctcatgtggccgacgatgaaaagcgccgggttaggggccttggcgcgcaccgccgtattcagggcctcctcgctcttgcgcgagagcaggtgcttccccaggtactcctgcactgacaaggctgccacagcggtggaatttgtcctcacgacttcgccacgtcgtcctcacctccctggcttcccacgactccgccgtatcgaggtgctcggtgggtcgtcttaatccgaagtccgaactaggaagacgagacagagaggtctgaggaatgggcctcgtttgatgttgagctgaattatttttccagcataagcccaggtcttggtccatgaacaaaattactagaaacccagcccagtactacgatctaaaagagggactgccactggatagctctctctagcattctccacgctccaatacagcggcgtcgtgtctatccgggtctatccgcgaacacgtgagaactctccagaaactgctttctcctccacttcatctctctcgctttccctctataaaaagaccccttctaggaattgagggagacagcaagcaccaagcagcgatccgaagctcaatcaattcactcaaacctcttccccaaatcttcgattagatcttcgttgacaagaagactagaaccgaacctgacatgtccaacctgctcacggttcaccagaaccttccggctcttccagtggacgcgacgtccgatgaagtcaggaagaacctcatggacatgttccgcgacaggcaagcgttcagcgagcacacctggaagatgctgctctccgtctgccgctcctgggctgcatggtgcaagctgaacaacaggaagtggttccccgctgagcccgaggacgtgagggattaccttctgtacctgcaagcgcgaggtttgtttctgcttctacctttgatatatatataataattatcattaattagtagtaatataatatttcaaatatttttttcaaaataaaagaatgtagtatatagcaattgcttttctgtagtttataagtgtgtatattttaatttataacttttctaatatatgaccaaaacatggtgatgcctaggtctggcagtgaagaccatccagcaacaccttggacaactgaacatgcttcacaggcgctccggcctcccgcgccccagcgactcgaacgccgtgagcctcgtcatgcgccgcatcaggaaggaaaacgtcgatgccggcgaaagggcaaagcaggccctcgcgttcgagaggaccgatttcgaccaggtccgcagcctgatggagaacagcgacaggtgccaggacattaggaacctggcgttcctcggaattgcatacaacacgctcctcaggatcgcggaaattgcccgcattcgcgtgaaggacattagccgcaccgacggcggcaggatgcttatccacattggcaggaccaagacgctcgtttccaccgcaggcgtcgaaaaggccctcagcctcggagtgaccaagctcgtcgaacgctggatctccgtgtccggcgtcgcggacgacccaaacaactacctcttctgccgcgtccgcaagaacggggtggctgcccctagcgccaccagccaactcagcacgagggccttggaaggtattttcgaggccacccaccgcctgatctacggcgcgaaggatgacagcggtcaacgctacctcgcatggtccgggcactccgcccgcgttggagctgctagggacatggcccgcgccggtgtttccatccccgaaatcatgcaggcgggtggatggacgaacgtgaacattgtcatgaactacattcgcaaccttgacagcgagacgggcgcaatggttcgcctcctggaagatggtgactgaggtacccaacctagacttgtccatcttctggattggccaacttaattaatgtatgaaataaaaggatgcacacatagtgacatgctaatcactataatgtgggcatcaaagttgtgtgttatgtgtaattactagttatctgaataaaagagaaagagatcatccatatttcttatcctaaatgaatgtcacgtgtctttataattctttgatgaaccagatgcatttcattaaccaaatccatatacatataaatattaatcatatataattaatatcaattgggttagcaaaacaaatctagtctaggtgtgttttgcgatccgatatcgatctcccatccttaaaacaccactaggcccctagtgaactagcgtcctaacctcggtctagccacctagcggactaaaagcctaacgccgagccccgggtggccttctaggcccggaccgggtgaccccgctctctctctccttgctaagtttctgtgcacgtaaataattattagtagaaaaaaattggaaggtacatgagttagttgaagatgaaagtatataatattgttgtggtggggtatagaggtttgatataggtggaactgctgtagagcgtggagatatagggggaaagagaacgctgatgtgacaagtgagtgagatatagggggagaaatttagggggaacgccgaacacagtctaaagaagcttgggacccaaagcactctgttcgggggtttttttttttgtctttcaactttttgctgtaatgttattcaaaataagaaaagcacttggcatggctaagaaatagagttcaacaactgaacagtacagtgtattatcaatggcataaaaaacaacccttacagcattgccgtattttattgatcaaacattcaactcaacactgacgagtggtcttccaccgatcaacggactaatgctgctttgtcgaatgatctgttctcacttcctcctccttccattccagagacatcagtgaagagcagtggcagctcgcgttgctctcacatactccctgcagcagggtaaggggagcaccatgagctgaggctcagctccagggcggcggctgctgctgctgttgccgatacgtcttggttgccggtgccggccagctgggtgctgttgctgttgctgtaaaagctgtactgctcctgcagctggtgttgctgttggatcgcaacggaagaagtggcgccggcagttgtggacgcggcaccccagaacggcaagtagctgctgctaccgctgccgccgtcgtcgccgcaggtcgggaagagagggagcgtctcgggcgcccgcgtcgtcgccgcccgcgccgcggccgccgccattatcgtgtccgacgacgagaagcgtggccactgcgacgagctgcccgtgtccgtcacgcccatgtagtcctgcaggaagcatgtctcggtggccatagcagcgccgctgctgccccagtcggaactcgtgtccagcagcacagccgatccgccgccattgccggcggcgtagaagccgagggtgggcgagggaggcgccgcgcctgaaggcggcggcgacgacagcgagaggacgccgagttggctggtggtggcgtcggccgcgccggcggcgggcacgttgacgtcgaggctggtgaggcggcgcttctggcgctcgcgggccttgtggttctggaaccagtagaagacgttcttgccctcgatcttgccgtgctgccgcagcatggcggtgatgcgctggatctgctccgagctgggcgaccggatgccgcagccgtagtagagctccttcagcatcctgatctgctccggcgtcggcgtccaccgcgagccgctggggcggcacaccgccggcgcagccacgctgccgctgccgctgcctcctcccgctccaccgccgcccgcattggccgccatggatcctgcagaagtaacaccaaacaacagggtgagcatcggacaaaagaaacagtaccaagcaaataaatagcgtatgaaggcagggctaaaaaatccacatatagctgctgcatatgccatcatccaagtatatcaagatcaaaataattataaaacatacttgtttattataatagataggtactcaaggttagagcatatgaatagatgccgcatatgccatcatgtatatgcatcagtaaaacccacatcaacatgtatacctatcctagatcaatatttccatccatcatcttaaactcgtaactatgaagatgtatggcacacacataaagatacaaaattaataaatccaccaggtagtttgaaacagtattctactccgatctagaacgaccgcccaaccagaccacatcatcacaaccaagcgaaaaaaagcatctctgtatatgcatcagtaaaacccgcatcaacatgtatacctatcctagatcgatatttccatccatcatcttaaactcgtaactatgaagatgtaggcacatacatacagatcctttaataaatccaccaggtagtttgaaacagtattctactccgatctagaacgaccctttaataaatccaccaggtagtttgaaacagtattctactccgatctagaacgaccgcccaaccagaccatatcatcacaaccaagcgagaaaaaaagcatctctgtatatgcatcagtaaaacccgcatcaacatgtatacctatcctagatcgatatttccatccatcatcttaaactcgtaactatgaagatgtatggcacacacatacagatacaaaattaataaatccaccaggtagcttgaaacagtatcctactccgatctagaacgaccgcccaaccagaccacatcatcacaaacatgaacatgaacatgtttgctctaacacaaacatgaacagaagtagaactaccgggccctaaccatggaccggatcgccgatctagagaaggtagagagaggggggggggaggatgagcggcgtaccttgaagcggaggtgccgacggctggatttgggggagatctggttgcgtgtgtgtgcgctccgaacgaacacgaggttggggaagagggtgtggagggggtgtctatttattacggcgggcgaggaagggaaagcgaaggagcggtgggaaaggaatcccccgtagctgccggtgccgtgagaggaggaagaggccgcctgccgtgccgcctcacgtctgccgctccgccacgcaatttctggatgccgacagcggagcaagtccaacggtggagcggaactctcgagaggggtccagggatcgctatcaactttgtatagaaaagttgggccgagctcggtacggccagaatggcccggaccggcagcttgcatgcctgcagtgcagcgtgacccggtcgtgcccctctctagagataatgagcattgcatgtctaagttataaaaaattaccacatattttttttgtcacacttgtttgaagtgcagtttatctatctttatacatatatttaaactttactctacgaataatataatctatagtactacaataatatcagtgttttagagaatcatataaatgaacagttagacatggtctaaaggacaattgagtattttgacaacaggactctacagttttatctttttagtgtgcatgtgttctcctttttttttgcaaatagcttcacctatataatacttcatccattttattagtacatccatttagggtttagggttaatggtttttatagactaatttttttagtacatctattttattctattttagcctctaaattaagaaaactaaaactctattttagtttttttatttaataatttagatataaaatagaataaaataaagtgactaaaaattaaacaaataccctttaagaaattaaaaaaactaaggaaacatttttcttgtttcgagtagataatgccagcctgttaaacgccgtcgacgagtctaacggacaccaaccagcgaaccagcagcgtcgcgtcgggccaagcgaagcagacggcacggcatctctgtcgctgcctctggacccctctcgagagttccgctccaccgttggacttgctccgctgtcggcatccagaaattgcgtggcggagcggcagacgtgagccggcacggcaggcggcctcctcctcctctcacggcaccggcagctacgggggattcctttcccaccgctccttcgctttcccttcctcgcccgccgtaataaatagacaccccctccacaccctctttccccaacctcgtgttgttcggagcgcacacacacacaaccagatctcccccaaatccacccgtcggcacctccgcttcaaggtacgccgctcgtcctcccccccccccctctctaccttctctagatcggcgttccggtccatgcatggttagggcccggtagttctacttctgttcatgtttgtgttagatccgtgtttgtgttagatccgtgctgctagcgttcgtacacggatgcgacctgtacgtcagacacgttctgattgctaacttgccagtgtttctctttggggaatcctgggatggctctagccgttccgcagacgggatcgatttcatgattttttttgtttcgttgcatagggtttggtttgcccttttcctttatttcaatatatgccgtgcacttgtttgtcgggtcatcttttcatgcttttttttgtcttggttgtgatgatgtggtctggttgggcggtcgttctagatcggagtagaattctgtttcaaactacctggtggatttattaattttggatctgtatgtgtgtgccatacatattcatagttacgaattgaagatgatggatggaaatatcgatctaggataggtatacatgttgatgcgggttttactgatgcatatacagagatgctttttgttcgcttggttgtgatgatgtggtgtggttgggcggtcgttcattcgttctagatcggagtagaatactgtttcaaactacctggtgtatttattaattttggaactgtatgtgtgtgtcatacatcttcatagttacgagtttaagatggatggaaatatcgatctaggataggtatacatgttgatgtgggttttactgatgcatatacatgatggcatatgcagcatctattcatatgctctaaccttgagtacctatctattataataaacaagtatgttttataattattttgatcttgatatacttggatgatggcatatgcagcagctatatgtggatttttttagccctgccttcatacgctatttatttgcttggtactgtttcttttgtcgatgctcaccctgttgtttggtgttacttctgcaggtcgactttaacttagcctagcatggccactgtgaacaactggctcgctttctccctctccccgcaggagctgccgccctcccagacgacggactccacactcatctcggccgccaccgccgaccatgtctccggcgatgtctgcttcaacatcccccaagattggagcatgaggggatcagagctttcggcgctcgtcgcggagccgaagctggaggacttcctcggcggcatctccttctccgagcagcatcacaaggccaactgcaacatgatacccagcactagcagcacagtttgctacgcgagctcaggtgctagcaccggctaccatcaccagctgtaccaccagcccaccagctcagcgctccacttcgcggactccgtaatggtggcttcctcggccggtgtccacgacggcggtgccatgctcagcgcggccgccgctaacggtgtcgctggcgctgccagtgccaacggcggcggcatcgggctgtccatgattaagaactggctgcggagccaaccggcgcccatgcagccgagggtggcggcggctgagggcgcgcaggggctctctttgtccatgaacatggcggggacgacccaaggcgctgctggcatgccacttctcgctggagagcgcgcacgggcgcccgagagtgtatcgacgtcagcacagggtggagccgtcgtcgtcacggcgccgaaggaggatagcggtggcagcggtgttgccggcgctctagtagccgtgagcacggacacgggtggcagcggcggcgcgtcggctgacaacacggcaaggaagacggtggacacgttcgggcagcgcacgtcgatttaccgtggcgtgacaaggcatagatggactgggagatatgaggcacatctttgggataacagttgcagaagggaagggcaaactcgtaagggtcgtcaagtctatttaggtggctatgataaagaggagaaagctgctagggcttatgatcttgctgctctgaagtactggggtgccacaacaacaacaaattttccagtgagtaactacgaaaaggagctcgaggacatgaagcacatgacaaggcaggagtttgtagcgtctctgagaaggaagagcagtggtttctccagaggtgcatccatttacaggggagtgactaggcatcaccaacatggaagatggcaagcacggattggacgagttgcagggaacaaggatctttacttgggcaccttcagcacccaggaggaggcagcggaggcgtacgacatcgcggcgatcaagttccgcggcctcaacgccgtcaccaacttcgacatgagccgctacgacgtgaagagcatcctggacagcagcgccctccccatcggcagcgccgccaagcgcctcaaggaggccgaggccgcagcgtccgcgcagcaccaccacgccggcgtggtgagctacgacgtcggccgcatcgcctcgcagctcggcgacggcggagccctggcggcggcgtacggcgcgcactaccacggcgccgcctggccgaccatcgcgttccagccgggcgccgccagcacaggcctgtaccacccgtacgcgcagcagccaatgcgcggcggcgggtggtgcaagcaggagcaggaccacgcggtgatcgcggccgcgcacagcctgcaggacctccaccacctgaacctgggcgcggccggcgcgcacgactttttctcggcagggcagcaggccgccgccgctgcgatgcacggcctgggtagcatcgacagtgcgtcgctcgagcacagcaccggctccaactccgtcgtctacaacggcggggtcggcgacagcaacggcgccagcgccgtcggcggcagtggcggtggctacatgatgccgatgagcgctgccggagcaaccactacatcggcaatggtgagccacgagcaggtgcatgcacgggcctacgacgaagccaagcaggctgctcagatggggtacgagagctacctggtgaacgcggagaacaatggtggcggaaggatgtctgcatgggggactgtcgtgtctgcagccgcggcggcagcagcaagcagcaacgacaacatggccgccgacgtcgggcatggcggcgcgcagctcttcagtgtctggaacgacacttaatattggtaccgtcatgggtcgtttaagctgccgatgtgcctgcgtcgtctggtgccctctctccatatggaggttgtcaaagtatctgctgttcgtgtcatgagtcgtgtcagtgttggtttaataatggaccggttgtgttgtgtgtgcgtactacccagaactatgacaaatcatgaataagtttgatgtttgaaattaaagcctgtgctcattatgttctgtctttcagttgtctcctaatatttgcctgcaggtactggctatctaccgtttcttacttaggaggtgtttgaatgcactaaaactaatagttagtggctaaaattagttaaaacatccaaacaccatagctaatagttgaactattagctatttttggaaaattagttaatagtgaggtagttatttgttagctagctaattcaactaacaatttttagccaactaacaattagtttcagtgcattcaaacacccccttaatgttaaggtggttctatctaccgtctcctaatatatggttgattgttcggtttgttgctatgctattgggttctgattgctgctagttcttgctgaatccagaagttctcgtagtatagctcagattcatattatttatttgagtgataagtgatccaggttattactatgttagctaggttttttttacaaggataaattatctgtgatcataattcttatgaaagctttatgtttcctggaggcagtggcatgcaatgcatgacagcaacttgatcacaccagctgaggtagatacggtaacaaggttcttaaatctgttcaccaaatcattggagaacacacatacacattcttgccagtcttggttagagaaatttcatgacaaaatgccaaagctgtcttgactcttcacttttggccatgagtcgtgacgcgacttattgaactagtctagggcgcggctaacaacctagcttagattgccttgtctaaacccttaggctaacgcgccactctagaaggccgatctcccgggataacttcgtatagcatacattatacgaagttatgaattccggaccggcctagaaggccccagagctggtcaccccatacgattggaagcttcaagtttgtacaaaaaagcaggctccggccagaatggcccggaccgggttaccgaattcctaactaactagctgcccttaaggccaattgttcaagattcattcaacaattgaaacatctcccatgattaaatcagtataaggttgctatggtcttgcttgacaaagtttttttttgagggaatttcaactaaatttttgagtgaaactatcaaatactgattttaaaaaatttttataaaaggaagcgcagagataaaaggccatctatgctacaaaagtacccaaaaatgtaatcctaaagtatgaattgcattttttttttgtttggacgaaaggaaaggagtattaccacaagaatgatatcatcttcatatttagatcttttttgggtaaaccttgagattctctaaatatagagaaatcagaagaaaaaaaaaccgtgttttggtggttttgatttctagcctccacaataactttgacggcgtcgacaagtctaacggacaccaagcagcgaaccaccagcgccgagccaagcgaagcagacggccgagacgttgacaccttcggcgcggcatctctggagagttccgctccggcgctccacctccaccgctggcggtttcttattccgttccgttccgcctcctgctctgctcctctccacaccacacggcacgaaaccgttacggcaccggcagcacccagcacgggagaggggattcctttcccaccgttccttccctttccgccccgccgctataaatagccagccccatccccagcttttttccccaatctcatctcctctctcctgttgttcggagcacacgcacaatccgatcgatccccaaatccccttcgtctctcctcgcgagcctcgtggttcccagcttcaaggtacggcgatcgatcatcccccctccttctctctaccttcttttctctagactacatcggatggcgatccttggttagggcctgctagtttcccttcctgttttgtcgatggctgcgaggcacaatagatctgatggcgttatgacggctaacttgtcatgttgttgcgatttatagtccctttaggagatcagtttaatttctcggatggttcgagatcggtggtccttggttagtaccctaagatccgcgctgttagggttcgtagatggaggcgacctgttctgattcttaacttgtcagtacctgggaaatcctgggatggttctagctcgtccgcagatgagatcgatttcatgatcctctgtatcttgtttcgttgcctaggttccgtctaatctatccgtggtatgatgtagatgttttgatcgtgctaactacgtcttgtaaagttaattgtcaggtcataatttttagcatgccttttttttgtttggttttgtctaattgggctgtcgttctagatcagagtagaagactgttccaaactacctgctggatttattgaacttggatctgtatgtgtgtcacatatcttcataaattcatgattaagatggattgaaatatcttttatctttttggtatggatagttctatatgttggtgtggctttgttagatgtatacatgcttagatacatgaagcaacgtgctgctactgtttagtaattgctgttcatttgtctaataaacagataaggatatgtatttatgttgctgttggttttgctggtactttgttggatacaaatgcttcaatacagaaaacagcatgctgctacgatttaccatttatctaatcttatcatatgtctaatctaataaacaaacatgcttttaaattatcttcatatgcttggatgatggcatacacagcggctatgtgtggttttttaaatacccagcatcatgggcatgcatgacactgctttaatatgctttttatttgcttgagactgtttcttttgtttatactgaccctttagttcggtgactcttctgcaggtcgactttaacttagcctaggatccgtcccccagatttgctaggacaccgccgtacccacaccccggatcagttaatatcgtagacataatggccctccctgccatctccacaaccaagcactcccatcatcatgcatgcagcaggctgtgctgtggacctgatcgagtttcaattgatccaagcaagcaagagggatgggagtccttggttgtggaaattgcagagagagaccagtcgttgatcggtcggagatctccccgaatcgatctcgatcggccggaattttgggggccggccgggaggtggatgatggggggtgattaccatctaggcggcgccgtgttggatgatgtaccaacatatcactataggctactttgggaacctcagatccccttcgggattggaggaaattgagatggaaatgaactaatttcttctctaacccccttcaatcacgaaggggattcgagtttccaaactagccctatatatatcagagctagggagggatattgctgcaacatgcatcacgaggtacagatatataattagggttctgctgcaatgttttgactatagatcgttagtgatctgctgtaattaataataatggtgatctcgaagcaattctaaacatcatagtagcaggcccaggtaccgttaacagatctactaactatctatactgtaataatgttgtatagccgccggatagctagctagtttagtcattcagcggcgatgggtaataataaagtgtcatccatccatcaccatgcgtggcaacgtgagcaatgacctgattgaacaaattgaaatgaaaagaagaaatatgttatatgtcaacgagatttcctcataatgccactgacgacgtgtgtccaagaaatgtatcagtgatacgtatattcacaatttttttatgacttatactcacaatttgtttttttactacttatactcacaatttgttgtgcgtaccataacaatttcgatcgaatatatatcagaaagttgacgaaagtaagctcactcaaaaagttaaatgggctgcggaagctgcgtcaggcccaagttttggctattctatccggtatccacgattttgatggctgagggacatatgttcgcttaagcttcggtccgggcctagaaggccagcttcggccgccccgggcaactttattatacaaagttgatagatgtacctgattccgatgacttcgtaggttcctagctcaagccgctcgtgtccaagcgtcacttacgattagctaatgattacggcatctaggaccgactagctagctagctaagagctcggtaccgagctcgaattcattccgattaatcgtggcctcttgctcttcaggatgaagagctatgtttaaacgtgcaagcgctactagacaattcagtacattaaaaacgtccgcaatgtgttattaagttgtctaagcgtcaatttgtttacaccacaatatatcctgcca

SEQ ID NO: 248 - DNA, 22694 bp, synthetic construct
  misc_feature 1..22694: note = PHP98567
  source 1..22694: mol_type = other DNA
gtttacccgccaatatatcctgtcaaacactgcggccgcacttgaccgcggatggagccggagctgtggtgaggccatcgacgggaggtgggggagaacacagtctcagtgttctttgtgagtccgcaaggtttttagcttttctgtattaattaaggttgctgttggctgtagaatacggtcgtggaagagctgtatcggtagctactacgtaagctattatatactggaagtctggagctcgtcgatctccggtcgtcttcctccatttctcctcgtcttgctttgactgctgctaccatttgcttctgttttctgatgaagcatgccatgtcggccaccagtgtttgtgtggtttttgcagggaatggctttcaagtgctgtgattgaatggccctcgtcgtcctcggctgagctcacatggacgcgtcatgtgagtgagatatatgatcatatgatgagtggggttcgggtgagtgcgtacttgaagtaggatcccgctttcactcattcattcattggcctttaaaccgggaaattttcgcgaggagatggagggaagcaagcagggtgacgagtgcagagtgccgcgagcgctttgtcaaaaggcaccgccgtaggcaaaaaaatcaatggccctgactgactcgatggtagtactactgtagagactagagagggttgctccccatatcttcgtgtgacttttactccagcattgcatttccgtcattgagacgttaattaatagcagctttcgggacagatgactgtggccatgtttcgtcacggccgcttcgtgccagctgggggtactatagtactgtgattttgttagtaaaaactttcattaggccaccattgacgaccgggccttcgcttttgctgcgctaattaaccatttcccggcgaccgaagggaacatgaacatgccccgacacatgagggcatgaggactagtgttctccctgtcgttcgttgacttgactagtgatagtttaaacgctcttcaactggaagagcggttactaccggttcactagctagctgctaatcgagctagttaccctatgaggtgacatgaagcgctcacggttactatgacggttagcttcacgactgttggtggcagtagcgtacgacttagctatagttccggacttacctagctaataacttcgtatagcatacattatacgaagttatggttaccgaattcgagctcggtaccctggcggaccgaagcttgcatgcctgcagtgcagcgtgacccggtcgtgcccctctctagagataatgagcattgcatgtctaagttataaaaaattaccacatattttttttgtcacacttgtttgaagtgcagtttatctatctttatacatatatttaaactttactctacgaataatataatctatagtactacaataatatcagtgttttagagaatcatataaatgaacagttagacatggtctaaaggacaattgagtattttgacaacaggactctacagttttatctttttagtgtgcatgtgttctcctttttttttgcaaatagcttcacctatataatacttcatccattttattagtacatccatttagggtttagggttaatggtttttatagactaatttttttagtacatctattttattctattttagcctctaaattaagaaaactaaaactctattttagtttttttatttaataatttagatataaaatagaataaaataaagtgactaaaaattaaacaaataccctttaagaaattaaaaaaactaaggaaacatttttcttgtttcgagtagataatgccagcctgttaaacgccgtcgacgagtctaacggacaccaaccagcgaaccagcagcgtcgcgtcgggccaagcgaagcagacggcacggcatctctgtcgctgcctctggacccctctcgagagttccgctccaccgttggacttgctccgctgtcggcatccagaaattgcgtggcggagcggcagacgtgagccggcacggcaggcggcctcctcctcctctcacggcaccggcagctacgggggattcctttcccaccgctccttcgcacgtaagcgcttacgcaccgaacaacgtaagcgcttacgcaccgaacaacgtaagcgcttacgctttcccttcctcgcccgccgtaataaatagacaccccctccacaccctctttccccaacctcgtgttgttcggagcgcacacacacacaaccagatctcccccaaatccacccgtcggcacctccgcttcaaggtacgccgctcgtcctcccccccccccctctctaccttctctagatcggcgttccggtccatgcatggttagggcccggtagttctacttctgttcatgtttgtgttagatccgtgtttgtgttagatccgtgctgctagcgttcgtacacggatgcgacctgtacgtcagacacgttctgattgctaacttgccagtgtttctctttggggaatcctgggatggctctagccgttccgcagacgggatcgatttcatgattttttttgtttcgttgcatagggtttggtttgcccttttcctttatttcaatatatgccgtgcacttgtttgtcgggtcatcttttcatgcttttttttgtcttggttgtgatgatgtggtctggttgggcggtcgttctagatcggagtagaattctgtttcaaactacctggtggatttattaattttggatctgtatgtgtgtgccatacatattcatagttacgaattgaagatgatggatggaaatatcgatctaggataggtatacatgttgatgcgggttttactgatgcatatacagagatgctttttgttcgcttggttgtgatgatgtggtgtggttgggcggtcgttcattcgttctagatcggagtagaatactgtttcaaactacctggtgtatttattaattttggaactgtatgtgtgtgtcatacatcttcatagttacgagtttaagatggatggaaatatcgatctaggataggtatacatgttgatgtgggttttactgatgcatatacatgatggcatatgcagcatctattcatatgctctaaccttgagtacctatctattataataaacaagtatgttttataattattttgatcttgatatacttggatgatggcatatgcagcagctatatgtggatttttttagccctgccttcatacgctatttatttgcttggtactgtttcttttgtcgatgctcaccctgttgtttggtgttacttctgcaggtcgactttaacttagcctaggatccgcccatggcggccaatgcgggcggcggtggagcgggaggaggcagcggcagcggcagcgtggctgcgccggcggtgtgccgccccagcggctcgcggtggacgccgacgccggagcagatcaggatgctgaaggagctctactacggctgcggcatccggtcgcccagctcggagcagatccagcgcatcaccgccatgctgcggcagcacggcaagatcgagggcaagaacgtcttctactggttccagaaccacaaggcccgcgagcgccagaagcgccgcctcaccagcctcgacgtcaacgtgcccgccgccggcgcggccgacgccaccaccagccaactcggcgtcctctcgctgtcgtcgccgccgccttcaggcgcggcgcctccctcgcccaccctcggcttctacgccgccggcaatggcggcggatcggctgtgctgctggacacgagttccgactggggcagcagcggcgctgctatggccaccgagacatgcttcctgcaggactacatgggcgtgacggacacgggcagctcgtcgcagtggccacgcttctcgtcgtcggacacgataatggcggcggccgcggcgcgggcggcgacgacgcgggcgcccgagacgctccctctcttcccgacctgcggcgacgacggcggcagcggtagcagcagctacttgccgttctggggtgccgcgtccacaactgccggcgccacttcttccgttgcgatccaacagcaacaccagctgcaggagcagtacagcttttacagcaacagcaacagcacccagctggccggcaccggcaaccaagacgtatcggcaacagcagcagcagccgccgccctggagctgagcctcagctcatggtgctccccttaccctgctgcagggagtatgtgagagcaacgcgagctgccactgctcttcactgatgtctctggaatggaaggaggaggaagtgagaacagatcattcgacaaagcagcattagtccgttgatcggtggaagaccactcgtcagtgttgagttgaatgtttgatcaataaaatacggcaatgctgtaagggttgttttttatgccattgataatacactgtactgttcagttgttgaactctatttcttagccatgccaagtgcttttcttattttgaataacattacagcaaaaagttgaaagacaaaaaaaaaaacccccgaacagagtgctttgggtcccaagcttctttagactgtgttcggcgttccccctaaatttctccccctatatctcactcacttgtcacatcagcgttctctttccccctatatctccacgctctacagcagttccacctatatcaaacctctataccccaccacaacaatattatatactttcatcttcaactaactcatgtaccttccaatttttttctactaataattatttacgtgcacagaaacttagcaaggagagagagagcgggaatttaaatgctcggcgttaggcttttagtccgctaggtggctagaccgaggttaggacgctagttcactaggggcctagtggtgttttaagacgtcacggtcaccacgcgtggaccgaagcttgcatgcctgcagtgcagcgtgacccggtcgtgcccctctctagagataatgagcattgcatgtctaagttataaaaaattaccacatattttttttgtcacacttgtttgaagtgcagtttatctatctttatacatatatttaaactttactctacgaataatataatctatagtactacaataatatcagtgttttagagaatcatataaatgaacagttagacatggtctaaaggacaattgagtattttgacaacaggactctacagttttatctttttagtgtgcatgtgttctcctttttttttgcaaatagcttcacctatataatacttcatccattttattagtacatccatttagggtttagggttaatggtttttatagactaatttttttagtacatctattttattctattttagcctctaaattaagaaaactaaaactctattttagtttttttatttaataatttagatataaaatagaataaaataaagtgactaaaaattaaacaaataccctttaagaaattaaaaaaactaaggaaacatttttcttgtttcgagtagataatgccagcctgttaaacgccgtcgacgagtctaacggacaccaaccagcgaaccagcagcgtcgcgtcgggccaagcgaagcagacggcacggcatctctgtcgctgcctctggacccctctcgagagttccgctccaccgttggacttgctccgctgtcggcatccagaaattgcgtggcggagcggcagacgtgagccggcacggcaggcggcctcctcctcctctcacggcaccggcagctacgggggattcctttcccaccgctccttcgcacgtaagcgcttacgcaccgaacaacgtaagcgcttacgcaccgaacaacgtaagcgcttacgctttcccttcctcgcccgccgtaataaatagacaccccctccacaccctctttccccaacctcgtgttgttcggagcgcacacacacacaaccagatctcccccaaatccacccgtcggcacctccgcttcaaggtacgccgctcgtcctcccccccccccctctctaccttctctagatcggcgttccggtccatgcatggttagggcccggtagttctacttctgttcatgtttgtgttagatccgtgtttgtgttagatccgtgctgctagcgttcgtacacggatgcgacctgtacgtcagacacgttctgattgctaacttgccagtgtttctctttggggaatcctgggatggctctagccgttccgcagacgggatcgatttcatgattttttttgtttcgttgcatagggtttggtttgcccttttcctttatttcaatatatgccgtgcacttgtttgtcgggtcatcttttcatgcttttttttgtcttggttgtgatgatgtggtctggttgggcggtcgttctagatcggagtagaattctgtttcaaactacctggtggatttattaattttggatctgtatgtgtgtgccatacatattcatagttacgaattgaagatgatggatggaaatatcgatctaggataggtatacatgttgatgcgggttttactgatgcatatacagagatgctttttgttcgcttggttgtgatgatgtggtgtggttgggcggtcgttcattcgttctagatcggagtagaatactgtttcaaactacctggtgtatttattaattttggaactgtatgtgtgtgtcatacatcttcatagttacgagtttaagatggatggaaatatcgatctaggataggtatacatgttgatgtgggttttactgatgcatatacatgatggcatatgcagcatctattcatatgctctaaccttgagtacctatctattataataaacaagtatgttttataattattttgatcttgatatacttggatgatggcatatgcagcagctatatgtggatttttttagccctgccttcatacgctatttatttgcttggtactgtttcttttgtcgatgctcaccctgttgtttggtgttacttctgcaggtcgactttaacttagcctaggatccatggccactgtgaacaactggctcgctttctccctctccccgcaggagctgccgccctcccagacgacggactccacactcatctcggccgccaccgccgaccatgtctccggcgatgtctgcttcaacatcccccaagattggagcatgaggggatcagagctttcggcgctcgtcgcggagccgaagctggaggacttcctcggcggcatctccttctccgagcagcatcacaaggccaactgcaacatgatacccagcactagcagcacagtttgctacgcgagctcaggtgctagcaccggctaccatcaccagctgtaccaccagcccaccagctcagcgctccacttcgcggactccgtaatggtggcttcctcggccggtgtccacgacggcggtgccatgctcagcgcggccgccgctaacggtgtcgctggcgctgccagtgccaacggcggcggcatcgggctgtccatgattaagaactggctgcggagccaaccggcgcccatgcagccgagggtggcggcggctgagggcgcgcaggggctctctttgtccatgaacatggcggggacgacccaaggcgctgctggcatgccacttctcgctggagagcgcgcacgggcgcccgagagtgtatcgacgtcagcacagggtggagccgtcgtcgtcacggcgccgaaggaggatagcggtggcagcggtgttgccggcgctctagtagccgtgagcacggacacgggtggcagcggcggcgcgtcggctgacaacacggcaaggaagacggtggacacgttcgggcagcgcacgtcgatttaccgtggcgtgacaaggcatagatggactgggagatatgaggcacatctttgggataacagttgcagaagggaagggcaaactcgtaagggtcgtcaagtctatttaggtggctatgataaagaggagaaagctgctagggcttatgatcttgctgctctgaagtactggggtgccacaacaacaacaaattttccagtgagtaactacgaaaaggagctcgaggacatgaagcacatgacaaggcaggagtttgtagcgtctctgagaaggaagagcagtggtttctccagaggtgcatccatttacaggggagtgactaggcatcaccaacatggaagatggcaagcacggattggacgagttgcagggaacaaggatctttacttgggcaccttcagcacccaggaggaggcagcggaggcgtacgacatcgcggcgatcaagttccgcggcctcaacgccgtcaccaacttcgacatgagccgctacgacgtgaagagcatcctggacagcagcgccctccccatcggcagcgccgccaagcgcctcaaggaggccgaggccgcagcgtccgcgcagcaccaccacgccggcgtggtgagctacgacgtcggccgcatcgcctcgcagctcggcgacggcggagccctggcggcggcgtacggcgcgcactaccacggcgccgcctggccgaccatcgcgttccagccgggcgccgccagcacaggcctgtaccacccgtacgcgcagcagccaatgcgcggcggcgggtggtgcaagcaggagcaggaccacgcggtgatcgcggccgcgcacagcctgcaggacctccaccacctgaacctgggcgcggccggcgcgcacgactttttctcggcagggcagcaggccgccgccgctgcgatgcacggcctgggtagcatcgacagtgcgtcgctcgagcacagcaccggctccaactccgtcgtctacaacggcggggtcggcgacagcaacggcgccagcgccgtcggcggcagtggcggtggctacatgatgccgatgagcgctgccggagcaaccactacatcggcaatggtgagccacgagcaggtgcatgcacgggcctacgacgaagccaagcaggctgctcagatggggtacgagagctacctggtgaacgcggagaacaatggtggcggaaggatgtctgcatgggggactgtcgtgtctgcagccgcggcggcagcagcaagcagcaacgacaacatggccgccgacgtcgggcatggcggcgcgcagctcttcagtgtctggaacgacacttaagcgtacctagtggtacctgacatcttatagtctgcaacctctcgtgtctgaattcctatctttatcaagtgttattgcttccacgactataggacagctttcgtcgaaagcttttgctcatgtgatctcgaaggattcatctagtctgatttttcgtgacttgtatcggttttattggattcatccaacatatatcaataaaaaatgagttgtgtttcctttcttcctagttcagttaaaattatttccctcctgcgcttgtgctgtaattgtctgtgtacctgttgtttgtgactgtgttagttcccttggatatgatttcgtatttgatatgtacatggagatagcttagcttcattattggagtatgaagttagtatgacatagtcactctcctggaaaattgacactgcaaaccatatttttattctgaaccacaaatcctagtcagtccgctggcatatgccgtccgtttgctgaatccagaacgtgggtttggagatgtacggctgagatgcctctatgcgaaggggatttcgtggtgaaacgagatgggagtagagcaacgcccgtggaagatgcttcaaacttccacacttttgagcaacgatcggcagtagtaaggtagacgatttcaagatcaaagcatatgaagataaacaacatcaacaacaaaatttgttggggttctatagagagaaacagagctacatacatacactgttttgtatctaccatctgagatgatgaaaagatgaaaaactaaagaatgccccggcgccaacgccaggacacgccgcgcgcgcgtcacccgagccatctcttgacccagccggcgctgtatatttacacacgttgcagcatcgatcaccacctgttcgatcgcgtcgccgtcaccggcgcgccgcgacttattgaactagtctagggcgcggctaacaacctagcttagattgccttgtctaaacccttaaggctaacgcgccactctagattcttatgtgcttctagtctccaaatgtggttgatagttattttgctctaagatcaacagtaatgaagtataaatcatcgttgtggtgtgctactcggttaattgagcattaacacacacaaacatgacgaggatggtataatctccaaaaatgtgtactttgttaggtgggaccctatagccttgattaatgtgctatgttaggcatgcctggaaacgtgtgacgcatatgttttgtgaacctgttgatattatatgtgcttttatattaccatattttattaaaatactaatatttattactagtaagatataacattctatctagcttaaaaactaaccataaatattccataataactagatttaccaaactaatatactaaatatacataataaatacaaaattaacaagacaataatcaatatttatgagcttaatatatttagacattatggttggtcgacgataatcatgctaacttttcgtaattgcttgattgaaatatgcttagaataatgcctctttgttctacatggcaaatagggaccattatggtgtaacaccctgggaaccacaaacaccccgaaatgctactaaactacacaactaaccttcatatataaaatttcgacagcatctcctttgaaaatttgcatagacgtggaagcaacagagtataaacagatatcatgataagaaaacatactagacattaataatctgctagaaatgggaagaatcgagctcggtaccctggttcacaaactcaatacaacacacagtggagtagggtattacgctccggcggcccgaaccactctaaatccttgtgtcctcgtgtgctcttccaccattaatgactgtaattgcagggacacgaagagttgtagcgcttttgccaacaagatccgctatatgctagtagagtggaacctgcacagcaacaagcatccaataatctgagaataagaattatgtgtggtgatggttctcatctctgcaactcgccattttcgcgagagaaccaaatccaagttggtgaagatcatgatttgggctcatgggctggcatagtagctattacctttgcaattgtggttcgaatctatccgatattctccttttcagggagagctaatgcttatgcttattgggtattttggtttgacactgcttcacgcccaaaaaaaggcaactatgtctgagttggatatggcccaaaaaaaggcagctatgtctgagttggatatggaagtcttctttcgtttagggtgaagtaagaccaagctcatgagcttattatcttaggtcggaacaaattagttgataggcatggcacatttatcaaattataatgattttaacagaaaagcaacacctctttttcagcagcaccagctttgcaagctgcaattgacactccaagcatagtatttgctccaaactcagcctgcatttcgcacaatatcatatctatttccatttggataaaatatattttccagaaatatgggaacagaatcaagatacagaaaaaagttgtggtagtagtggtaagtggaaacacaagtacagtgaaaagatagcattatttctgaacagtcaaattaaccgaaataagtagtatcacatactgcccctaaattgactacacccaatgtaaagaattgcttgagcatattgagccatcagttgtttgtttgtgtaacggatttgacaatgcagagttcaggagcaaaaaaccgcaaaggagagaaagagggaaaggatctcctagtatcccaccttgtggcgcgccctgtcaagtgcatgatggcctggtcgatctgcgtctgctgctgcggttccatcccaacgagtgcctccgacaccttgtcgttgatcacccgcaccgcgtaggcgacccccctggcgaggaacttccgcctctcggaggccccggccgcgtcggcggcggcgccctcgagcgcgcccacgctagccgtagatgctcggtgcacggccttgttggtgtgcaactcgacctcaacggccggtgcgctacgcccgtcaaggatctggcgcgcccgcaccctcgtgatcacggtgggcgcctcccgcctcatgtggccgacgatgaaaagcgccgggttaggggccttggcgcgcaccgccgtattcagggcctcctcgctcttgcgcgagagcaggtgcttccccaggtactcctgcactgacaaggctgccacagcggtggaatttgtcctcacgacttcgccacgtcgtcctcacctccctggcttcccacgactccgccgtatcgaggtgctcggtgggtcgtcttaatccgaagtccgaactaggaagacgagacagagaggtctgaggaatgggcctcgtttgatgttgagctgaattatttttccagcataagcccaggtcttggtccatgaacaaaattactagaaacccagcccagtactacgatctaaaagagggactgccactggatagctctctctagcattctccacgctccaatacagcggcgtcgtgtctatccgggtctatccgcgaacacgtgagaactctccagaaactgctttctcctccacttcatctctctcgctttccctctataaaaagaccccttctaggaattgagggagacagcaagcaccaagcagcgatccgaagctcaatcaattcactcaaacctcttccccaaatcttcgattagatcttcgttgacaagaagactagaaccgaacctgacatgtccaacctgctcacggttcaccagaaccttccggctcttccagtggacgcgacgtccgatgaagtcaggaagaacctcatggacatgttccgcgacaggcaagcgttcagcgagcacacctggaagatgctgctctccgtctgccgctcctgggctgcatggtgcaagctgaacaacaggaagtggttccccgctgagcccgaggacgtgagggattaccttctgtacctgcaagcgcgaggtttgtttctgcttctacctttgatatatatataataattatcattaattagtagtaatataatatttcaaatatttttttcaaaataaaagaatgtagtatatagcaattgcttttctgtagtttataagtgtgtatattttaatttataacttttctaatatatgaccaaaacatggtgatgcctaggtctggcagtgaagaccatccagcaacaccttggacaactgaacatgcttcacaggcgctccggcctcccgcgccccagcgactcgaacgccgtgagcctcgtcatgcgccgcatcaggaaggaaaacgtcgatgccggcgaaagggcaaagcaggccctcgcgttcgagaggaccgatttcgaccaggtccgcagcctgatggagaacagcgacaggtgccaggacattaggaacctggcgttcctcggaattgcatacaacacgctcctcaggatcgcggaaattgcccgcattcgcgtgaaggacattagccgcaccgacggcggcaggatgcttatccacattggcaggaccaagacgctcgtttccaccgcaggcgtcgaaaaggccctcagcctcggagtgaccaagctcgtcgaacgctggatctccgtgtccggcgtcgcggacgacccaaacaactacctcttctgccgcgtccgcaagaacggggtggctgcccctagcgccaccagccaactcagcacgagggccttggaaggtattttcgaggccacccaccgcctgatctacggcgcgaaggatgacagcggtcaacgctacctcgcatggtccgggcactccgcccgcgttggagctgctagggacatggcccgcgccggtgtttccatccccgaaatcatgcaggcgggtggatggacgaacgtgaacattgtcatgaactacattcgcaaccttgacagcgagacgggcgcaatggttcgcctcctggaagatggtgactgaggtacccaacctagacttgtccatcttctggattggccaacttaattaatgtatgaaataaaaggatgcacacatagtgacatgctaatcactataatgtgggcatcaaagttgtgtgttatgtgtaattactagttatctgaataaaagagaaagagatcatccatatttcttatcctaaatgaatgtcacgtgtctttataattctttgatgaaccagatgcatttcattaaccaaatccatatacatataaatattaatcatatataattaatatcaattgggttagcaaaacaaatctagtctaggtgtgttttgcgatccgatatcgacgtctaaaaacggcccctaactaacgcttagttgcccgctagattagtcccccgttagtgcctagttagacacacgacgaactaggggctagccccgggataacttcgtatagcatacattatacgaagttatgaattccggaccgggttaccgaattcctgcccttaaggccaattgttcaagattcattcaacaattgaaacatctcccatgattaaatcagtataaggttgctatggtcttgcttgacaaagtttttttttgagggaatttcaactaaatttttgagtgaaactatcaaatactgattttaaaaaatttttataaaaggaagcgcagagataaaaggccatctatgctacaaaagtacccaaaaatgtaatcctaaagtatgaattgcattttttttttgtttggacgaaaggaaaggagtattaccacaagaatgatatcatcttcatatttagatcttttttgggtaaagcttgagattctctaaatatagagaaatcagaagaaaaaaaaaccgtgttttggtggttttgatttctagcctccacaataactttgacggcgtcgacaagtctaacggacaccaagcagcgaaccaccagcgccgagccaagcgaagcagacggccgagacgttgacaccttcggcgcggcatctctcgagagttccgctccggcgctccacctccaccgctggcggtttcttattccgttccgttccgcctcctgctctgctcctctccacaccacacggcacgaaaccgttacggcaccggcagcacccagcacgggagaggggattcctttcccaccgttccttccctttccgccccgccgctataaatagccagccccatccccagcttttttccccaatctcatctcctctctcctgttgttcggagcacacgcacaatccgatcgatccccaaatccccttcgtctctcctcgcgagcctcgtggatcccagcttcaaggtacggcgatcgatcatcccccctccttctctctaccttcttttctctagactacatcggatggcgatccatggttagggcctgctagtttcccttcctgttttgtcgatggctgcgaggcacaatagatctgatggcgttatgacggctaacttgtcatgttgttgcgatttatagtccctttaggagatcagtttaatttctcggatggttcgagatcggtggtccatggttagtaccctaagatccgcgctgttagggttcgtagatggaggcgacctgttctgattgttaacttgtcagtacctgggaaatcctgggatggttctagctcgtccgcagatgagatcgatttcatgatcctctgtatcttgtttcgttgcctaggttccgtctaatctatccgtggtatgatgtagatgttttgatcgtgctaactacgtcttgtaaagttaattgtcaggtcataatttttagcatgcctttttttttgtttggttttgtctaattgggctgtcgttctagatcagagtagaagactgttccaaactacctgctggatttattgaacttggatctgtatgtgtgtcacatatcttcataaattcatgattaagatggattgaaatatcttttatctttttggtatggatagttctatatgttggtgtggctttgttagatgtatacatgcttagatacatgaagcaacgtgctgctactgtttagtaattgctgttcatttgtctaataaacagataaggatatgtatttatgttgctgttggttttgctggtactttgttggatacaaatgcttcaatacagaaaacagcatgctgctacgatttaccatttatctaatcttatcatatgtctaatctaataaacaaacatgcttttaaattatcttcatatgcttggatgatggcatacacagcggctatgtgtggttttttaaatacccagcatcatgggcatgcatgacactgctttaatatgctttttatttgcttgagactgtttcttttgtttatactgaccctttagttcggtgactcttctgcaggtcgactttaacttagcctaggatccatggcccagtccaagcacggcctgaccaaggagatgaccatgaagtaccgcatggagggctgcgtggacggccacaagttcgtgatcaccggcgagggcatcggctaccccttcaagggcaagcaggccatcaacctgtgcgtggtggagggcggccccttgcccttcgccgaggacatcttgtccgccgccttcatgtacggcaaccgcgtgttcaccgagtacccccaggacatcgtcgactacttcaagaactcctgccccgccggctacacctgggaccgctccttcctgttcgaggacggcgccgtgtgcatctgcaacgccgacatcaccgtgagcgtggaggagaactgcatgtaccacgagtccaagttctacggcgtgaacttccccgccgacggccccgtgatgaagaagatgaccgacaactgggagccctcctgcgagaagatcatccccgtgcccaagcagggcatcttgaagggcgacgtgagcatgtacctgctgctgaaggacggtggccgcttgcgctgccagttcgacaccgtgtacaaggccaagtccgtgccccgcaagatgcccgactggcacttcatccagcacaagctgacccgcgaggaccgcagcgacgccaagaaccagaagtggcacctgaccgagcacgccatcgcctccggctccgccttgccctccggactcagatctcgatagggtaccaatggccagttaacagatccagctgctgctgttctagggttcacaagtctgcctatttgtcttccccaatggagctatggttgtctggtctggtccttggtcgtgtcccgtttcattgtgtactatttacctgtaatgtgtatccttaagtctggtttgatggtgtctgaaacgttttgctgtggtagagcagcatggaagaactataatgaataagtgatccctaatcattgtgtccaaattttgcttctgctatacccttttgtgctgtttcttatgttttgcttaaaaatttgatctgacaaacaaatttgtctaaattatgctcttgttctgactgtgtactgtacacatttgtattgctaccggtttggcacatagttttctctttgattgcagatcaaacccttctgattgcagattgcttggctatggctgatgtgctcactgttcttctttagcttgtatattgctgatggtggcttggctacggctgaaaaagttgctgctgcgccgacttggcaactgttgctccagtaatgctttgtcctctcttcctagccgccgacttggcacttggcagctgttgctcctgtaatgcgttgttatctcttatctcttgagatgtactatgattttgaggctgtttgacttgtgccagattgccagtgctgatgctatattatctcaggtttttatgctagtatatgttttactgtgtgctgcctgtgtcgagttacgtaatctattgaaccgctatgcgtgttgatgccctgttgttgcttgccagattgatgcccctgttgcttgcagcttgcaagctgtagtgaaatcctaaaattcgaaaccaaatctattctgaacttttgaagatctgtgatgtccggaagaaaagattcaaacagataaacgggactctccagaatctataaaataaatgatcgacaaacgctttgctttggtaggcttcctagttagttagcggaccgaagcttcggtccgggcctagaaggccagcttcggccgcccctcggtaccctgggatctgcccttactttaacgcctctaaccaacacccctttatctttataaggaacaataaacagaatttgccccactgttctaaatcacctaataatatccccagctaaaaacaataaaggtttcctagaattaagacaagcatgactgttcctccaggagggtttggaacattgttgcagtcttgcagatacgggcgaagggtgagaaacagagcggagggctggaggtgacctcggtagtcgacgccggagttgagcttgacaacgacggggcggcccctgatggacttgaggaagtccgatggcgtcttcaccgtcccgccggcgcccgaggcgggcctgtcgctgccgccgccgccgctgctcatcttgcgcgctgtgcccccggcggtgtccctgtgttgcggatcgcgggtgggccaggtggatgcgagggcgacccgtttggactccggccggagccgccggatccctggtcggtgtcagtgccgtttactctgggccccacgtgtcagtaccgtctgtagatgacaacaacccgtcgtccacagtcatgtccaaaatatcctttcttcttttttttcgattcggatatctatcttccttttttttttccaaaaatcttcttgacgcaccagcgcgcacgtttgtggtaaacgccgacacgtcggtcccacgtcgatagaccccacccaccagtgagtagcgtgtacgtattcgggggtgacggacgtgtcgccgtcgtcttgctagtcccattcccatctgagccacacatctctgaacaaaaaaaaggagggaggcctccacgcacatccccctccgtgccacccgccccaaaccctcgcgccgcctccgagacagccgccgcaaccatggccaccgccgccgccgcgtctaccgcgctcactggcgccactaccgctgcgcccaaggcgaggcgccgggcgcacctcctggccacccgccgcgccctcgccgcgcccatcaggtgctcagcggcgtcacccgccatgccgatggctcccccggccaccccgctccggccgtggggccccaccgagccccgcaagggtgctgacatcctcgtcgagtccctcgagcgctgcggcgtccgcgacgtcttcgcctaccccggcggcgcgtccatggagatccaccaggcactcacccgctcccccgtcatcgccaaccacctcttccgccacgagcaaggggaggcctttgccgcctccggctacgcgcgctcctcgggccgcgtcggcgtctgcatcgccacctccggccccggcgccaccaacctagtctccgcgctcgccgacgcgctgctcgattccgtccccatggtcgccatcacgggacaggtggcgcgacgcatgattggcaccgacgccttccaggagacgcccatcgtcgaggtcacccgctccatcaccaagcacaactacctggtcctcgacgtcgacgacatcccccgcgtcgtgcaggaggctttcttcctcgcctcctctggtcgaccagggccggtgcttgtcgacatccccaaggacatccagcagcagatggcggtgcctgtctgggacaagcccatgagtctgcctgggtacattgcgcgccttcccaagccccctgcgactgagttgcttgagcaggtgctgcgtcttgttggtgaatcgcggcgccctgttctttatgtgggcggtggctgcgcagcatctggtgaggagttgcgacgctttgtggagctgactggaatcccggtcacaactactcttatgggcctcggcaacttccccagcgacgacccactgtctctgcgcatgctaggtatgcatgggacggtgtatgcaaattatgcagtggataaggccgatctgttgcttgcacttggtgtgcggtttgatgatcgcgtgacagggaagattgaggcttttgcaagcagggctaagattgtgcacgttgatattgatccggctgagattggcaagaacaagcagccacatgtgtccatctgtgcagatgttaagcttgctttgcagggcatgaatgctcttcttgaaggaagcacatcaaagaagagctttgactttggctcatggaacgatgagttggatcagcagaagagggaattcccccttgggtataaaacatctaatgaggagatccagccacaatatgctattcaggttcttgatgagctgacgaaaggcgaggccatcatcggcacaggtgttgggcagcaccagatgtgggcggcacagtactacacttacaagcggccaaggcagtggttgtcttcagctggtcttggggctatgggatttggtttgccggctgctgctggtgcttctgtggcaaacccaggtgtcactgttgttgacatcgatggagatggtagctttctcatgaacgttcaggagctagctatgatccgaattgagaacctcccagtgaaggtctttgtgctaaacaaccagcacctggggatggtggtgcagttggaggacaggttctataaggccaacagagcgcacacatacttgggaaacccagagaatgaaagtgagatatatccagatttcgtgacgatcgccaaagggttcaacattccagcggtccgtgtgacaaagaagaacgaagtccgcgcagcgataaagaagatgctcgagactccagggccgtacctcttggatataatcgtcccacaccaggagcatgtgttgcctatgatccctagtggtggggctttcaaggatatgatcctggatggtgatggcaggactgtgtactgactagctagtcagttaacagatcctctagtgccgtgggtcgtttaagctgccgctgtacctgtgtcgtctggtgccttctggtgtacctgggaggttgtcgtctatcaagtatctgtggttggtgtcatgagtcagtgagtcccaatactgttcgtgtcctgtgtgcattatacccaaaactgttatgggcaaatcatgaataagcttgatgttcgaacttaaaagtctctgctcaatatggtattatggttgtttttgttcgtctcctaatatttgcctgggatcaaattttattggctggtgttcatttgacctccatgttcttgctaggctccattttttactctacagccataatatgtttgattgtttggtttgttctttgttgtacacctggttctgtcgagcttagttttcgacactggcttacagcttaacatgttgctattttattgggttctgattgctattttattgggttctgattgctagtttttgctgaatccaaaaaccatgttatttatttaagcgatccaggttattattatgatggtggctaagtttttttttttccaagggtaaattttctggattctccagtgtttctgtggccgaattcaatcactagagtcgacctgcaggccggtccgggcctagaaggcccgcgccacttacgcttgattccgatgacttcgtaggttcctagctcaagccgctcgtgtccaagcgtcacttacgattagctaatgattacggcatctaggaccgactagttcttatgtgcttctagtctccaaatgtggttgatagttattttgctctaagatcaacagtaatgaagtataaatcatcgttgtggtgtgctactcggttaattgagcattaacacacacaaacatgacgaggatggtataatctccaaaaatgtgtactttgttaggtgggaccctatagccttgattaatgtgctatgttaggcatgcctggaaacgtgtgacgcatatgttttgtgaacctgttgatattatatgtgcttttatattaccatattttattaaaatactaatatttattactagtaagatataacattctatctagcttaaaaactaaccataaatattccataataactagatttaccaaactaatatactaaatatacataataaatacaaaattaacaagacaataatcaatatttatgagcttaatatatttagacattatggttggtcgacgataatcatgctaacttttcgtaattgcttgattgaaatatgcttagaataatgcctctttgttctacatggcaaatagggaccattatggtgtaacaccctgggaaccacaaacaccccgaaatgctactaaactacacaactaaccttcatatataaaatttcgacagcatctcctttgaaaatttgcatagacgtggaagcaacagagtataaacagatctgcgtttaaacgtgcaagcgctactagacaattcagtacattaaaaacgtccgcaatgtgttattaagttgtctaagcgtcaatttgtttacaccacaatatatcctgcca

SEQ ID NO: 249 - DNA, 22629 bp, synthetic construct
  misc_feature 1..22629: note = PHP97452
  source 1..22629: mol_type = other DNA
gtttacccgccaatatatcctgtcaaacactgcggccgcacttgaccgcggatggagccggagctgtggtgaggccatcgacgggaggtgggggagaacacagtctcagtgttctttgtgagtccgcaaggtttttagcttttctgtattaattaaggttgctgttggctgtagaatacggtcgtggaagagctgtatcggtagctactacgtaagctattatatactggaagtctggagctcgtcgatctccggtcgtcttcctccatttctcctcgtcttgctttgactgctgctaccatttgcttctgttttctgatgaagcatgccatgtcggccaccagtgtttgtgtggtttttgcagggaatggctttcaagtgctgtgattgaatggccctcgtcgtcctcggctgagctcacatggacgcgtcatgtgagtgagatatatgatcatatgatgagtggggttcgggtgagtgcgtacttgaagtaggatcccgctttcactcattcattcattggcctttaaaccgggaaattttcgcgaggagatggagggaagcaagcagggtgacgagtgcagagtgccgcgagcgctttgtcaaaaggcaccgccgtaggcaaaaaaatcaatggccctgactgactcgatggtagtactactgtagagactagagagggttgctccccatatcttcgtgtgacttttactccagcattgcatttccgtcattgagacgttaattaatagcagctttcgggacagatgactgtggccatgtttcgtcacggccgcttcgtgccagctgggggtactatagtactgtgattttgttagtaaaaactttcattaggccaccattgacgaccgggccttcgcttttgctgcgctaattaaccatttcccggcgaccgaagggaacatgaacatgccccgacacatgagggcatgaggactagtgttctccctgtcgttcgttgacttgactagtgatagtttaaacgctcttcaactggaagagcggttacaccggttcactagctagctgctaatcgagctagttaccctatgaggtgacatgaagcgctcacggttactatgacggttagcttcacgactgttggtggcagtagcgtacgacttagctatagttccggacttacctagctaataacttcgtatagcatacattatacgaagttatggttaccgaattcgagctcggtatcctggcggaccgaagcttgcatgcctgcagtgcagcgtgacccggtcgtgcccctctctagagataatgagcattgcatgtctaagttataaaaaattaccacatattttttttgtcacacttgtttgaagtgcagtttatctatctttatacatatatttaaactttactctacgaataatataatctatagtactacaataatatcagtgttttagagaatcatataaatgaacagttagacatggtctaaaggacaattgagtattttgacaacaggactctacagttttatctttttagtgtgcatgtgttctcctttttttttgcaaatagcttcacctatataatacttcatccattttattagtacatccatttagggtttagggttaatggtttttatagactaatttttttagtacatctattttattctattttagcctctaaattaagaaaactaaaactctattttagtttttttatttaataatttagatataaaatagaataaaataaagtgactaaaaattaaacaaataccctttaagaaattaaaaaaactaaggaaacatttttcttgtttcgagtagataatgccagcctgttaaacgccgtcgacgagtctaacggacaccaaccagcgaaccagcagcgtcgcgtcgggccaagcgaagcagacggcacggcatctctgtcgctgcctctggacccctctcgagagttccgctccaccgttggacttgctccgctgtcggcatccagaaattgcgtggcggagcggcagacgtgagccggcacggcaggcggcctcctcctcctctcacggcaccggcagctacgggggattcctttcccaccgctccttcgcacgtaagcgcttacgcaccgaacaacgtaagcgcttacgcaccgaacaacgtaagcgcttacgctttcccttcctcgcccgccgtaataaatagacaccccctccacaccctctttccccaacctcgtgttgttcggagcgcacacacacacaaccagatctcccccaaatccacccgtcggcacctccgcttcaaggtacgccgctcgtcctcccccccccccctctctaccttctctagatcggcgttccggtccatgcatggttagggcccggtagttctacttctgttcatgtttgtgttagatccgtgtttgtgttagatccgtgctgctagcgttcgtacacggatgcgacctgtacgtcagacacgttctgattgctaacttgccagtgtttctctttggggaatcctgggatggctctagccgttccgcagacgggatcgatttcatgattttttttgtttcgttgcatagggtttggtttgcccttttcctttatttcaatatatgccgtgcacttgtttgtcgggtcatcttttcatgcttttttttgtcttggttgtgatgatgtggtctggttgggcggtcgttctagatcggagtagaattctgtttcaaactacctggtggatttattaattttggatctgtatgtgtgtgccatacatattcatagttacgaattgaagatgatggatggaaatatcgatctaggataggtatacatgttgatgcgggttttactgatgcatatacagagatgctttttgttcgcttggttgtgatgatgtggtgtggttgggcggtcgttcattcgttctagatcggagtagaatactgtttcaaactacctggtgtatttattaattttggaactgtatgtgtgtgtcatacatcttcatagttacgagtttaagatggatggaaatatcgatctaggataggtatacatgttgatgtgggttttactgatgcatatacatgatggcatatgcagcatctattcatatgctctaaccttgagtacctatctattataataaacaagtatgttttataattattttgatcttgatatacttggatgatggcatatgcagcagctatatgtggatttttttagccctgccttcatacgctatttatttgcttggtactgtttcttttgtcgatgctcaccctgttgtttggtgttacttctgcaggtcgactttaacttagcctaggatccgcccatggcggccaatgcgggcggcggtggagcgggaggaggcagcggcagcggcagcgtggctgcgccggcggtgtgccgccccagcggctcgcggtggacgccgacgccggagcagatcaggatgctgaaggagctctactacggctgcggcatccggtcgcccagctcggagcagatccagcgcatcaccgccatgctgcggcagcacggcaagatcgagggcaagaacgtcttctactggttccagaaccacaaggcccgcgagcgccagaagcgccgcctcaccagcctcgacgtcaacgtgcccgccgccggcgcggccgacgccaccaccagccaactcggcgtcctctcgctgtcgtcgccgccgccttcaggcgcggcgcctccctcgcccaccctcggcttctacgccgccggcaatggcggcggatcggctgtgctgctggacacgagttccgactggggcagcagcggcgctgctatggccaccgagacatgcttcctgcaggactacatgggcgtgacggacacgggcagctcgtcgcagtggccacgcttctcgtcgtcggacacgataatggcggcggccgcggcgcgggcggcgacgacgcgggcgcccgagacgctccctctcttcccgacctgcggcgacgacggcggcagcggtagcagcagctacttgccgttctggggtgccgcgtccacaactgccggcgccacttcttccgttgcgatccaacagcaacaccagctgcaggagcagtacagcttttacagcaacagcaacagcacccagctggccggcaccggcaaccaagacgtatcggcaacagcagcagcagccgccgccctggagctgagcctcagctcatggtgctccccttaccctgctgcagggagtatgtgagagcaacgcgagctgccactgctcttcactgatgtctctggaatggaaggaggaggaagtgagaacagatcattcgacaaagcagcattagtccgttgatcggtggaagaccactcgtcagtgttgagttgaatgtttgatcaataaaatacggcaatgctgtaagggttgttttttatgccattgataatacactgtactgttcagttgttgaactctatttcttagccatgccaagtgcttttcttattttgaataacattacagcaaaaagttgaaagacaaaaaaaaaaacccccgaacagagtgctttgggtcccaagcttctttagactgtgttcggcgttccccctaaatttctccccctatatctcactcacttgtcacatcagcgttctctttccccctatatctccacgctctacagcagttccacctatatcaaacctctataccccaccacaacaatattatatactttcatcttcaactaactcatgtaccttccaatttttttctactaataattatttacgtgcacagaaacttagcaaggagagagagagcgggaatttaaatgctcggcgttaggcttttagtccgctaggtggctagaccgaggttaggacgctagttcactaggggcctagtggtgttttaagacgtcacggtcaccacgcgtggaccgaagcttgcatgcctgcagtgcagcgtgacccggtcgtgcccctctctagagataatgagcattgcatgtctaagttataaaaaattaccacatattttttttgtcacacttgtttgaagtgcagtttatctatctttatacatatatttaaactttactctacgaataatataatctatagtactacaataatatcagtgttttagagaatcatataaatgaacagttagacatggtctaaaggacaattgagtattttgacaacaggactctacagttttatctttttagtgtgcatgtgttctcctttttttttgcaaatagcttcacctatataatacttcatccattttattagtacatccatttagggtttagggttaatggtttttatagactaatttttttagtacatctattttattctattttagcctctaaattaagaaaactaaaactctattttagtttttttatttaataatttagatataaaatagaataaaataaagtgactaaaaattaaacaaataccctttaagaaattaaaaaaactaaggaaacatttttcttgtttcgagtagataatgccagcctgttaaacgccgtcgacgagtctaacggacaccaaccagcgaaccagcagcgtcgcgtcgggccaagcgaagcagacggcacggcatctctgtcgctgcctctggacccctctcgagagttccgctccaccgttggacttgctccgctgtcggcatccagaaattgcgtggcggagcggcagacgtgagccggcacggcaggcggcctcctcctcctctcacggcaccggcagctacgggggattcctttcccaccgctccttcgctttcccttcctcgcccgccgtaataaatagacaccccctccacaccctctttccccaacctcgtgttgttcggagcgcacacacacacaaccagatctcccccaaatccacccgtcggcacctccgcttcaaggtacgccgctcgtcctcccccccccccctctctaccttctctagatcggcgttccggtccatgcatggttagggcccggtagttctacttctgttcatgtttgtgttagatccgtgtttgtgttagatccgtgctgctagcgttcgtacacggatgcgacctgtacgtcagacacgttctgattgctaacttgccagtgtttctctttggggaatcctgggatggctctagccgttccgcagacgggatcgatttcatgattttttttgtttcgttgcatagggtttggtttgcccttttcctttatttcaatatatgccgtgcacttgtttgtcgggtcatcttttcatgcttttttttgtcttggttgtgatgatgtggtctggttgggcggtcgttctagatcggagtagaattctgtttcaaactacctggtggatttattaattttggatctgtatgtgtgtgccatacatattcatagttacgaattgaagatgatggatggaaatatcgatctaggataggtatacatgttgatgcgggttttactgatgcatatacagagatgctttttgttcgcttggttgtgatgatgtggtgtggttgggcggtcgttcattcgttctagatcggagtagaatactgtttcaaactacctggtgtatttattaattttggaactgtatgtgtgtgtcatacatcttcatagttacgagtttaagatggatggaaatatcgatctaggataggtatacatgttgatgtgggttttactgatgcatatacatgatggcatatgcagcatctattcatatgctctaaccttgagtacctatctattataataaacaagtatgttttataattattttgatcttgatatacttggatgatggcatatgcagcagctatatgtggatttttttagcactgccttcatacgctatttatttgcttggtactgtttcttttgtcgatgctcaccctgttgtttggtgttacttctgcaggtcgactttaacttagcctaggatccatggccactgtgaacaactggctcgctttctccctctccccgcaggagctgccgccctcccagacgacggactccacactcatctcggccgccaccgccgaccatgtctccggcgatgtctgcttcaacatcccccaagattggagcatgaggggatcagagctttcggcgctcgtcgcggagccgaagctggaggacttcctcggcggcatctccttctccgagcagcatcacaaggccaactgcaacatgatacccagcactagcagcacagtttgctacgcgagctcaggtgctagcaccggctaccatcaccagctgtaccaccagcccaccagctcagcgctccacttcgcggactccgtaatggtggcttcctcggccggtgtccacgacggcggtgccatgctcagcgcggccgccgctaacggtgtcgctggcgctgccagtgccaacggcggcggcatcgggctgtccatgattaagaactggctgcggagccaaccggcgcccatgcagccgagggtggcggcggctgagggcgcgcaggggctctctttgtccatgaacatggcggggacgacccaaggcgctgctggcatgccacttctcgctggagagcgcgcacgggcgcccgagagtgtatcgacgtcagcacagggtggagccgtcgtcgtcacggcgccgaaggaggatagcggtggcagcggtgttgccggcgctctagtagccgtgagcacggacacgggtggcagcggcggcgcgtcggctgacaacacggcaaggaagacggtggacacgttcgggcagcgcacgtcgatttaccgtggcgtgacaaggcatagatggactgggagatatgaggcacatctttgggataacagttgcagaagggaagggcaaactcgtaagggtcgtcaagtctatttaggtggctatgataaagaggagaaagctgctagggcttatgatcttgctgctctgaagtactggggtgccacaacaacaacaaattttccagtgagtaactacgaaaaggagctcgaggacatgaagcacatgacaaggcaggagtttgtagcgtctctgagaaggaagagcagtggtttctccagaggtgcatccatttacaggggagtgactaggcatcaccaacatggaagatggcaagcacggattggacgagttgcagggaacaaggatctttacttgggcaccttcagcacccaggaggaggcagcggaggcgtacgacatcgcggcgatcaagttccgcggcctcaacgccgtcaccaacttcgacatgagccgctacgacgtgaagagcatcctggacagcagcgccctccccatcggcagcgccgccaagcgcctcaaggaggccgaggccgcagcgtccgcgcagcaccaccacgccggcgtggtgagctacgacgtcggccgcatcgcctcgcagctcggcgacggcggagccctggcggcggcgtacggcgcgcactaccacggcgccgcctggccgaccatcgcgttccagccgggcgccgccagcacaggcctgtaccacccgtacgcgcagcagccaatgcgcggcggcgggtggtgcaagcaggagcaggaccacgcggtgatcgcggccgcgcacagcctgcaggacctccaccacctgaacctgggcgcggccggcgcgcacgactttttctcggcagggcagcaggccgccgccgctgcgatgcacggcctgggtagcatcgacagtgcgtcgctcgagcacagcaccggctccaactccgtcgtctacaacggcggggtcggcgacagcaacggcgccagcgccgtcggcggcagtggcggtggctacatgatgccgatgagcgctgccggagcaaccactacatcggcaatggtgagccacgagcaggtgcatgcacgggcctacgacgaagccaagcaggctgctcagatggggtacgagagctacctggtgaacgcggagaacaatggtggcggaaggatgtctgcatgggggactgtcgtgtctgcagccgcggcggcagcagcaagcagcaacgacaacatggccgccgacgtcgggcatggcggcgcgcagctcttcagtgtctggaacgacacttaagcgtacctagtggtacctgacatcttatagtctgcaacctctcgtgtctgaattcctatctttatcaagtgttattgcttccacgactataggacagctttcgtcgaaagcttttgctcatgtgatctcgaaggattcatctagtctgatttttcgtgacttgtatcggttttattggattcatccaacatatatcaataaaaaatgagttgtgtttcctttcttcctagttcagttaaaattatttccctcctgcgcttgtgctgtaattgtctgtgtacctgttgtttgtgactgtgttagttcccttggatatgatttcgtatttgatatgtacatggagatagcttagcttcattattggagtatgaagttagtatgacatagtcactctcctggaaaattgacactgcaaaccatatttttattctgaaccacaaatcctagtcagtccgctggcatatgccgtccgtttgctgaatccagaacgtgggtttggagatgtacggctgagatgcctctatgcgaaggggatttcgtggtgaaacgagatgggagtagagcaacgcccgtggaagatgcttcaaacttccacacttttgagcaacgatcggcagtagtaaggtagacgatttcaagatcaaagcatatgaagataaacaacatcaacaacaaaatttgttggggttctatagagagaaacagagctacatacatacactgttttgtatctaccatctgagatgatgaaaagatgaaaaactaaagaatgccccggcgccaacgccaggacacgccgcgcgcgcgtcacccgagccatctcttgacccagccggcgctgtatatttacacacgttgcagcatcgatcaccacctgttcgatcgcgtcgccgtcaccggcgcgccgcgacttattgaactagtctagggcgcggctaacaacctagcttagattgccttgtctaaacccttaaggctaacgcgccactctagattcttatgtgcttctagtctccaaatgtggttgatagttattttgctctaagatcaacagtaatgaagtataaatcatcgttgtggtgtgctactcggttaattgagcattaacacacacaaacatgacgaggatggtataatctccaaaaatgtgtactttgttaggtgggaccctatagccttgattaatgtgctatgttaggcatgcctggaaacgtgtgacgcatatgttttgtgaacctgttgatattatatgtgcttttatattaccatattttattaaaatactaatatttattactagtaagatataacattctatctagcttaaaaactaaccataaatattccataataactagatttaccaaactaatatactaaatatacataataaatacaaaattaacaagacaataatcaatatttatgagcttaatatatttagacattatggttggtcgacgataatcatgctaacttttcgtaattgcttgattgaaatatgcttagaataatgcctctttgttctacatggcaaatagggaccattatggtgtaacaccctgggaaccacaaacaccccgaaatgctactaaactacacaactaaccttcatatataaaatttcgacagcatctcctttgaaaatttgcatagacgtggaagcaacagagtataaacagatatcatgataagaaaacatactagacattaataatctgctagaaatgggaagaatcgagctcggtaccctggttcacaaactcaatacaacacacagtggagtagggtattacgctccggcggcccgaaccactctaaatccttgtgtcctcgtgtgctcttccaccattaatgactgtaattgcagggacacgaagagttgtagcgcttttgccaacaagatccgctatatgctagtagagtggaacctgcacagcaacaagcatccaataatctgagaataagaattatgtgtggtgatggttctcatctctgcaactcgccattttcgcgagagaaccaaatccaagttggtgaagatcatgatttgggctcatgggctggcatagtagctattacctttgcaattgtggttcgaatctatccgatattctccttttcagggagagctaatgcttatgcttattgggtattttggtttgacactgcttcacgcccaaaaaaaggcaactatgtctgagttggatatggcccaaaaaaaggcagctatgtctgagttggatatggaagtcttctttcgtttagggtgaagtaagaccaagctcatgagcttattatcttaggtcggaacaaattagttgataggcatggcacatttatcaaattataatgattttaacagaaaagcaacacctctttttcagcagcaccagctttgcaagctgcaattgacactccaagcatagtatttgctccaaactcagcctgcatttcgcacaatatcatatctatttccatttggataaaatatattttccagaaatatgggaacagaatcaagatacagaaaaaagttgtggtagtagtggtaagtggaaacacaagtacagtgaaaagatagcattatttctgaacagtcaaattaaccgaaataagtagtatcacatactgcccctaaattgactacacccaatgtaaagaattgcttgagcatattgagccatcagttgtttgtttgtgtaacggatttgacaatgcagagttcaggagcaaaaaaccgcaaaggagagaaagagggaaaggatctcctagtatcccaccttgtggcgcgccctgtcaagtgcatgatggcctggtcgatctgcgtctgctgctgcggttccatcccaacgagtgcctccgacaccttgtcgttgatcacccgcaccgcgtaggcgacccccctggcgaggaacttccgcctctcggaggccccggccgcgtcggcggcggcgccctcgagcgcgcccacgctagccgtagatgctcggtgcacggccttgttggtgtgcaactcgacctcaacggccggtgcgctacgcccgtcaaggatctggcgcgcccgcaccctcgtgatcacggtgggcgcctcccgcctcatgtggccgacgatgaaaagcgccgggttaggggccttggcgcgcaccgccgtattcagggcctcctcgctcttgcgcgagagcaggtgcttccccaggtactcctgcactgacaaggctgccacagcggtggaatttgtcctcacgacttcgccacgtcgtcctcacctccctggcttcccacgactccgccgtatcgaggtgctcggtgggtcgtcttaatccgaagtccgaactaggaagacgagacagagaggtctgaggaatgggcctcgtttgatgttgagctgaattatttttccagcataagcccaggtcttggtccatgaacaaaattactagaaacccagcccagtactacgatctaaaagagggactgccactggatagctctctctagcattctccacgctccaatacagcggcgtcgtgtctatccgggtctatccgcgaacacgtgagaactctccagaaactgctttctcctccacttcatctctctcgctttccctctataaaaagaccccttctaggaattgagggagacagcaagcaccaagcagcgatccgaagctcaatcaattcactcaaacctcttccccaaatcttcgattagatcttcgttgacaagaagactagaaccgaacctgacatgtccaacctgctcacggttcaccagaaccttccggctcttccagtggacgcgacgtccgatgaagtcaggaagaacctcatggacatgttccgcgacaggcaagcgttcagcgagcacacctggaagatgctgctctccgtctgccgctcctgggctgcatggtgcaagctgaacaacaggaagtggttccccgctgagcccgaggacgtgagggattaccttctgtacctgcaagcgcgaggtttgtttctgcttctacctttgatatatatataataattatcattaattagtagtaatataatatttcaaatatttttttcaaaataaaagaatgtagtatatagcaattgcttttctgtagtttataagtgtgtatattttaatttataacttttctaatatatgaccaaaacatggtgatgcctaggtctggcagtgaagaccatccagcaacaccttggacaactgaacatgcttcacaggcgctccggcctcccgcgccccagcgactcgaacgccgtgagcctcgtcatgcgccgcatcaggaaggaaaacgtcgatgccggcgaaagggcaaagcaggccctcgcgttcgagaggaccgatttcgaccaggtccgcagcctgatggagaacagcgacaggtgccaggacattaggaacctggcgttcctcggaattgcatacaacacgctcctcaggatcgcggaaattgcccgcattcgcgtgaaggacattagccgcaccgacggcggcaggatgcttatccacattggcaggaccaagacgctcgtttccaccgcaggcgtcgaaaaggccctcagcctcggagtgaccaagctcgtcgaacgctggatctccgtgtccggcgtcgcggacgacccaaacaactacctcttctgccgcgtccgcaagaacggggtggctgcccctagcgccaccagccaactcagcacgagggccttggaaggtattttcgaggccacccaccgcctgatctacggcgcgaaggatgacagcggtcaacgctacctcgcatggtccgggcactccgcccgcgttggagctgctagggacatggcccgcgccggtgtttccatccccgaaatcatgcaggcgggtggatggacgaacgtgaacattgtcatgaactacattcgcaaccttgacagcgagacgggcgcaatggttcgcctcctggaagatggtgactgaggtacccaacctagacttgtccatcttctggattggccaacttaattaatgtatgaaataaaaggatgcacacatagtgacatgctaatcactataatgtgggcatcaaagttgtgtgttatgtgtaattactagttatctgaataaaagagaaagagatcatccatatttcttatcctaaatgaatgtcacgtgtctttataattctttgatgaaccagatgcatttcattaaccaaatccatatacatataaatattaatcatatataattaatatcaattgggttagcaaaacaaatctagtctaggtgtgttttgcgatccgatatcgacgtctaaaaacggcccctaactaacgcttagttgcccgctagattagtcccccgttagtgcctagttagacacacgacgaactaggggctagccccgggataacttcgtatagcatacattatacgaagttatgaattccggaccgggttaccgaattcctgcccttaaggccaattgttcaagattcattcaacaattgaaacatctcccatgattaaatcagtataaggttgctatggtcttgcttgacaaagtttttttttgagggaatttcaactaaatttttgagtgaaactatcaaatactgattttaaaaaatttttataaaaggaagcgcagagataaaaggccatctatgctacaaaagtacccaaaaatgtaatcctaaagtatgaattgcattttttttttgtttggacgaaaggaaaggagtattaccacaagaatgatatcatcttcatatttagatcttttttgggtaaagcttgagattctctaaatatagagaaatcagaagaaaaaaaaaccgtgttttggtggttttgatttctagcctccacaataactttgacggcgtcgacaagtctaacggacaccaagcagcgaaccaccagcgccgagccaagcgaagcagacggccgagacgttgacaccttcggcgcggcatctctcgagagttccgctccggcgctccacctccaccgctggcggtttcttattccgttccgttccgcctcctgctctgctcctctccacaccacacggcacgaaaccgttacggcaccggcagcacccagcacgggagaggggattcctttcccaccgttccttccctttccgccccgccgctataaatagccagccccatccccagcttttttccccaatctcatctcctctctcctgttgttcggagcacacgcacaatccgatcgatccccaaatccccttcgtctctcctcgcgagcctcgtggatcccagcttcaaggtacggcgatcgatcatcccccctccttctctctaccttcttttctctagactacatcggatggcgatccatggttagggcctgctagtttcccttcctgttttgtcgatggctgcgaggcacaatagatctgatggcgttatgacggctaacttgtcatgttgttgcgatttatagtccctttaggagatcagtttaatttctcggatggttcgagatcggtggtccatggttagtaccctaagatccgcgctgttagggttcgtagatggaggcgacctgttctgattgttaacttgtcagtacctgggaaatcctgggatggttctagctcgtccgcagatgagatcgatttcatgatcctctgtatcttgtttcgttgcctaggttccgtctaatctatccgtggtatgatgtagatgttttgatcgtgctaactacgtcttgtaaagttaattgtcaggtcataatttttagcatgcctttttttttgtttggttttgtctaattgggctgtcgttctagatcagagtagaagactgttccaaactacctgctggatttattgaacttggatctgtatgtgtgtcacatatcttcataaattcatgattaagatggattgaaatatcttttatctttttggtatggatagttctatatgttggtgtggctttgttagatgtatacatgcttagatacatgaagcaacgtgctgctactgtttagtaattgctgttcatttgtctaataaacagataaggatatgtatttatgttgctgttggttttgctggtactttgttggatacaaatgcttcaatacagaaaacagcatgctgctacgatttaccatttatctaatcttatcatatgtctaatctaataaacaaacatgcttttaaattatcttcatatgcttggatgatggcatacacagcggctatgtgtggttttttaaatacccagcatcatgggcatgcatgacactgctttaatatgctttttatttgcttgagactgtttcttttgtttatactgaccctttagttcggtgactcttctgcaggtcgactttaacttagcctaggatccatggcccagtccaagcacggcctgaccaaggagatgaccatgaagtaccgcatggagggctgcgtggacggccacaagttcgtgatcaccggcgagggcatcggctaccccttcaagggcaagcaggccatcaacctgtgcgtggtggagggcggccccttgcccttcgccgaggacatcttgtccgccgccttcatgtacggcaaccgcgtgttcaccgagtacccccaggacatcgtcgactacttcaagaactcctgccccgccggctacacctgggaccgctccttcctgttcgaggacggcgccgtgtgcatctgcaacgccgacatcaccgtgagcgtggaggagaactgcatgtaccacgagtccaagttctacggcgtgaacttccccgccgacggccccgtgatgaagaagatgaccgacaactgggagccctcctgcgagaagatcatccccgtgcccaagcagggcatcttgaagggcgacgtgagcatgtacctgctgctgaaggacggtggccgcttgcgctgccagttcgacaccgtgtacaaggccaagtccgtgccccgcaagatgcccgactggcacttcatccagcacaagctgacccgcgaggaccgcagcgacgccaagaaccagaagtggcacctgaccgagcacgccatcgcctccggctccgccttgccctccggactcagatctcgatagggtaccaatggccagttaacagatccagctgctgctgttctagggttcacaagtctgcctatttgtcttccccaatggagctatggttgtctggtctggtccttggtcgtgtcccgtttcattgtgtactatttacctgtaatgtgtatccttaagtctggtttgatggtgtctgaaacgttttgctgtggtagagcagcatggaagaactataatgaataagtgatccctaatcattgtgtccaaattttgcttctgctatacccttttgtgctgtttcttatgttttgcttaaaaatttgatctgacaaacaaatttgtctaaattatgctcttgttctgactgtgtactgtacacatttgtattgctaccggtttggcacatagttttctctttgattgcagatcaaacccttctgattgcagattgcttggctatggctgatgtgctcactgttcttctttagcttgtatattgctgatggtggcttggctacggctgaaaaagttgctgctgcgccgacttggcaactgttgctccagtaatgctttgtcctctcttcctagccgccgacttggcacttggcagctgttgctcctgtaatgcgttgttatctcttatctcttgagatgtactatgattttgaggctgtttgacttgtgccagattgccagtgctgatgctatattatctcaggtttttatgctagtatatgttttactgtgtgctgcctgtgtcgagttacgtaatctattgaaccgctatgcgtgttgatgccctgttgttgcttgccagattgatgcccctgttgcttgcagcttgcaagctgtagtgaaatcctaaaattcgaaaccaaatctattctgaacttttgaagatctgtgatgtccggaagaaaagattcaaacagataaacgggactctccagaatctataaaataaatgatcgacaaacgctttgctttggtaggcttcctagttagttagcggaccgaagcttcggtccgggcctagaaggccagcttcggccgcccctcggtaccctgggatctgcccttactttaacgcctctaaccaacacccctttatctttataaggaacaataaacagaatttgccccactgttctaaatcacctaataatatccccagctaaaaacaataaaggtttcctagaattaagacaagcatgactgttcctccaggagggtttggaacattgttgcagtcttgcagatacgggcgaagggtgagaaacagagcggagggctggaggtgacctcggtagtcgacgccggagttgagcttgacaacgacggggcggcccctgatggacttgaggaagtccgatggcgtcttcaccgtcccgccggcgcccgaggcgggcctgtcgctgccgccgccgccgctgctcatcttgcgcgctgtgcccccggcggtgtccctgtgttgcggatcgcgggtgggccaggtggatgcgagggcgacccgtttggactccggccggagccgccggatccctggtcggtgtcagtgccgtttactctgggccccacgtgtcagtaccgtctgtagatgacaacaacccgtcgtccacagtcatgtccaaaatatcctttcttcttttttttcgattcggatatctatcttccttttttttttccaaaaatcttcttgacgcaccagcgcgcacgtttgtggtaaacgccgacacgtcggtcccacgtcgatagaccccacccaccagtgagtagcgtgtacgtattcgggggtgacggacgtgtcgccgtcgtcttgctagtcccattcccatctgagccacacatctctgaacaaaaaaaaggagggaggcctccacgcacatccccctccgtgccacccgccccaaaccctcgcgccgcctccgagacagccgccgcaaccatggccaccgccgccgccgcgtctaccgcgctcactggcgccactaccgctgcgcccaaggcgaggcgccgggcgcacctcctggccacccgccgcgccctcgccgcgcccatcaggtgctcagcggcgtcacccgccatgccgatggctcccccggccaccccgctccggccgtggggccccaccgagccccgcaagggtgctgacatcctcgtcgagtccctcgagcgctgcggcgtccgcgacgtcttcgcctaccccggcggcgcgtccatggagatccaccaggcactcacccgctcccccgtcatcgccaaccacctcttccgccacgagcaaggggaggcctttgccgcctccggctacgcgcgctcctcgggccgcgtcggcgtctgcatcgccacctccggccccggcgccaccaacctagtctccgcgctcgccgacgcgctgctcgattccgtccccatggtcgccatcacgggacaggtggcgcgacgcatgattggcaccgacgccttccaggagacgcccatcgtcgaggtcacccgctccatcaccaagcacaactacctggtcctcgacgtcgacgacatcccccgcgtcgtgcaggaggctttcttcctcgcctcctctggtcgaccagggccggtgcttgtcgacatccccaaggacatccagcagcagatggcggtgcctgtctgggacaagcccatgagtctgcctgggtacattgcgcgccttcccaagccccctgcgactgagttgcttgagcaggtgctgcgtcttgttggtgaatcgcggcgccctgttctttatgtgggcggtggctgcgcagcatctggtgaggagttgcgacgctttgtggagctgactggaatcccggtcacaactactcttatgggcctcggcaacttccccagcgacgacccactgtctctgcgcatgctaggtatgcatgggacggtgtatgcaaattatgcagtggataaggccgatctgttgcttgcacttggtgtgcggtttgatgatcgcgtgacagggaagattgaggcttttgcaagcagggctaagattgtgcacgttgatattgatccggctgagattggcaagaacaagcagccacatgtgtccatctgtgcagatgttaagcttgctttgcagggcatgaatgctcttcttgaaggaagcacatcaaagaagagctttgactttggctcatggaacgatgagttggatcagcagaagagggaattcccccttgggtataaaacatctaatgaggagatccagccacaatatgctattcaggttcttgatgagctgacgaaaggcgaggccatcatcggcacaggtgttgggcagcaccagatgtgggcggcacagtactacacttacaagcggccaaggcagtggttgtcttcagctggtcttggggctatgggatttggtttgccggctgctgctggtgcttctgtggcaaacccaggtgtcactgttgttgacatcgatggagatggtagctttctcatgaacgttcaggagctagctatgatccgaattgagaacctcccagtgaaggtctttgtgctaaacaaccagcacctggggatggtggtgcagttggaggacaggttctataaggccaacagagcgcacacatacttgggaaacccagagaatgaaagtgagatatatccagatttcgtgacgatcgccaaagggttcaacattccagcggtccgtgtgacaaagaagaacgaagtccgcgcagcgataaagaagatgctcgagactccagggccgtacctcttggatataatcgtcccacaccaggagcatgtgttgcctatgatccctagtggtggggctttcaaggatatgatcctggatggtgatggcaggactgtgtactgactagctagtcagttaacagatcctctagtgccgtgggtcgtttaagctgccgctgtacctgtgtcgtctggtgccttctggtgtacctgggaggttgtcgtctatcaagtatctgtggttggtgtcatgagtcagtgagtcccaatactgttcgtgtcctgtgtgcattatacccaaaactgttatgggcaaatcatgaataagcttgatgttcgaacttaaaagtctctgctcaatatggtattatggttgtttttgttcgtctcctaatatttgcctgggatcaaattttattggctggtgttcatttgacctccatgttcttgctaggctccattttttactctacagccataatatgtttgattgtttggtttgttctttgttgtacacctggttctgtcgagcttagttttcgacactggcttacagcttaacatgttgctattttattgggttctgattgctattttattgggttctgattgctagtttttgctgaatccaaaaaccatgttatttatttaagcgatccaggttattattatgatggtggctaagtttttttttttccaagggtaaattttctggattctccagtgtttctgtggccgaattcaatcactagagtcgacctgcaggccggtccgggcctagaaggcccgcgccacttacgcttgattccgatgacttcgtaggttcctagctcaagccgctcgtgtccaagcgtcacttacgattagctaatgattacggcatctaggaccgactagttcttatgtgcttctagtctccaaatgtggttgatagttattttgctctaagatcaacagtaatgaagtataaatcatcgttgtggtgtgctactcggttaattgagcattaacacacacaaacatgacgaggatggtataatctccaaaaatgtgtactttgttaggtgggaccctatagccttgattaatgtgctatgttaggcatgcctggaaacgtgtgacgcatatgttttgtgaacctgttgatattatatgtgcttttatattaccatattttattaaaatactaatatttattactagtaagatataacattctatctagcttaaaaactaaccataaatattccataataactagatttaccaaactaatatactaaatatacataataaatacaaaattaacaagacaataatcaatatttatgagcttaatatatttagacattatggttggtcgacgataatcatgctaacttttcgtaattgcttgattgaaatatgcttagaataatgcctctttgttctacatggcaaatagggaccattatggtgtaacaccctgggaaccacaaacaccccgaaatgctactaaactacacaactaaccttcatatataaaatttcgacagcatctcctttgaaaatttgcatagacgtggaagcaacagagtataaacagatctgcgtttaaacgtgcaagcgctactagacaattcagtacattaaaaacgtccgcaatgtgttattaagttgtctaagcgtcaatttgtttacaccacaatatatcctgcca

SEQ ID NO: 250 - DNA, 22132 bp, synthetic construct
  misc_feature 1..22132: note = PHP97456
  source 1..22132: mol_type = other DNA
gtttacccgccaatatatcctgtcaaacactgcggccgcacttgaccgcggatggagccggagctgtggtgaggccatcgacgggaggtgggggagaacacagtctcagtgttctttgtgagtccgcaaggtttttagcttttctgtattaattaaggttgctgttggctgtagaatacggtcgtggaagagctgtatcggtagctactacgtaagctattatatactggaagtctggagctcgtcgatctccggtcgtcttcctccatttctcctcgtcttgctttgactgctgctaccatttgcttctgttttctgatgaagcatgccatgtcggccaccagtgtttgtgtggtttttgcagggaatggctttcaagtgctgtgattgaatggccctcgtcgtcctcggctgagctcacatggacgcgtcatgtgagtgagatatatgatcatatgatgagtggggttcgggtgagtgcgtacttgaagtaggatcccgctttcactcattcattcattggcctttaaaccgggaaattttcgcgaggagatggagggaagcaagcagggtgacgagtgcagagtgccgcgagcgctttgtcaaaaggcaccgccgtaggcaaaaaaatcaatggccctgactgactcgatggtagtactactgtagagactagagagggttgctccccatatcttcgtgtgacttttactccagcattgcatttccgtcattgagacgttaattaatagcagctttcgggacagatgactgtggccatgtttcgtcacggccgcttcgtgccagctgggggtactatagtactgtgattttgttagtaaaaactttcattaggccaccattgacgaccgggccttcgcttttgctgcgctaattaaccatttcccggcgaccgaagggaacatgaacatgccccgacacatgagggcatgaggactagtgttctccctgtcgttcgttgacttgactagtgatagtttaaacgctcttcaactggaagagcggttactaccggttcactagctagctgctaatcgagctagttaccctatgaggtgacatgaagcgctcacggttactatgacggttagcttcacgactgttggtggcagtagcgtacgacttagctatagttccggacttacctagctaataacttcgtatagcatacattatacgaagttatggttaccgaattcgagctcggtaccctgcggaccgaagcttgcatgcctgcagtgcagcgtgacccggtcgtgcccctctctagagataatgagcattgcatgtctaagttataaaaaattaccacatattttttttgtcacacttgtttgaagtgcagtttatctatctttatacatatatttaaactttactctacgaataatataatctatagtactacaataatatcagtgttttagagaatcatataaatgaacagttagacatggtctaaaggacaattgagtattttgacaacaggactctacagttttatctttttagtgtgcatgtgttctcctttttttttgcaaatagcttcacctatataatacttcatccattttattagtacatccatttagggtttagggttaatggtttttatagactaatttttttagtacatctattttattctattttagcctctaaattaagaaaactaaaactctattttagtttttttatttaataatttagatataaaatagaataaaataaagtgactaaaaattaaacaaataccctttaagaaattaaaaaaactaaggaaacatttttcttgtttcgagtagataatgccagcctgttaaacgccgtcgacgagtctaacggacaccaaccagcgaaccagcagcgtcgcgtcgggccaagcgaagcagacggcacggcatctctgtcgctgcctctggacccctctcgagagttccgctccaccgttggacttgctccgctgtcggcatccagaaattgcgtggcggagcggcagacgtgagccggcacggcaggcggcctcctcctcctctcacggcaccggcagctacgggggattcctttcccaccgctccttcgcacgtaagcgcttacgcaccgaacaacgtaagcgcttacgcaccgaacaacgtaagcgcttacgctttcccttcctcgcccgccgtaataaatagacaccccctccacaccctctttccccaacctcgtgttgttcggagcgcacacacacacaaccagatctcccccaaatccacccgtcggcacctccgcttcaaggtacgccgctcgtcctcccccccccccctctctaccttctctagatcggcgttccggtccatgcatggttagggcccggtagttctacttctgttcatgtttgtgttagatccgtgtttgtgttagatccgtgctgctagcgttcgtacacggatgcgacctgtacgtcagacacgttctgattgctaacttgccagtgtttctctttggggaatcctgggatggctctagccgttccgcagacgggatcgatttcatgattttttttgtttcgttgcatagggtttggtttgcccttttcctttatttcaatatatgccgtgcacttgtttgtcgggtcatcttttcatgcttttttttgtcttggttgtgatgatgtggtctggttgggcggtcgttctagatcggagtagaattctgtttcaaactacctggtggatttattaattttggatctgtatgtgtgtgccatacatattcatagttacgaattgaagatgatggatggaaatatcgatctaggataggtatacatgttgatgcgggttttactgatgcatatacagagatgctttttgttcgcttggttgtgatgatgtggtgtggttgggcggtcgttcattcgttctagatcggagtagaatactgtttcaaactacctggtgtatttattaattttggaactgtatgtgtgtgtcatacatcttcatagttacgagtttaagatggatggaaatatcgatctaggataggtatacatgttgatgtgggttttactgatgcatatacatgatggcatatgcagcatctattcatatgctctaaccttgagtacctatctattataataaacaagtatgttttataattattttgatcttgatatacttggatgatggcatatgcagcagctatatgtggatttttttagccctgccttcatacgctatttatttgcttggtactgtttcttttgtcgatgctcaccctgttgtttggtgttacttctgcaggtcgactttaacttagcctaggatccgcccatggcggccaatgcgggcggcggtggagcgggaggaggcagcggcagcggcagcgtggctgcgccggcggtgtgccgccccagcggctcgcggtggacgccgacgccggagcagatcaggatgctgaaggagctctactacggctgcggcatccggtcgcccagctcggagcagatccagcgcatcaccgccatgctgcggcagcacggcaagatcgagggcaagaacgtcttctactggttccagaaccacaaggcccgcgagcgccagaagcgccgcctcaccagcctcgacgtcaacgtgcccgccgccggcgcggccgacgccaccaccagccaactcggcgtcctctcgctgtcgtcgccgccgccttcaggcgcggcgcctccctcgcccaccctcggcttctacgccgccggcaatggcggcggatcggctgtgctgctggacacgagttccgactggggcagcagcggcgctgctatggccaccgagacatgcttcctgcaggactacatgggcgtgacggacacgggcagctcgtcgcagtggccacgcttctcgtcgtcggacacgataatggcggcggccgcggcgcgggcggcgacgacgcgggcgcccgagacgctccctctcttcccgacctgcggcgacgacggcggcagcggtagcagcagctacttgccgttctggggtgccgcgtccacaactgccggcgccacttcttccgttgcgatccaacagcaacaccagctgcaggagcagtacagcttttacagcaacagcaacagcacccagctggccggcaccggcaaccaagacgtatcggcaacagcagcagcagccgccgccctggagctgagcctcagctcatggtgctccccttaccctgctgcagggagtatgtgagagcaacgcgagctgccactgctcttcactgatgtctctggaatggaaggaggaggaagtgagaacagatcattcgacaaagcagcattagtccgttgatcggtggaagaccactcgtcagtgttgagttgaatgtttgatcaataaaatacggcaatgctgtaagggttgttttttatgccattgataatacactgtactgttcagttgttgaactctatttcttagccatgccaagtgcttttcttattttgaataacattacagcaaaaagttgaaagacaaaaaaaaaaacccccgaacagagtgctttgggtcccaagcttctttagactgtgttcggcgttccccctaaatttctccccctatatctcactcacttgtcacatcagcgttctctttccccctatatctccacgctctacagcagttccacctatatcaaacctctataccccaccacaacaatattatatactttcatcttcaactaactcatgtaccttccaatttttttctactaataattatttacgtgcacagaaacttagcaaggagagagagagcgggaatttaaatgctcggcgttaggcttttagtccgctaggtggctagaccgaggttaggacgctagttcactaggggcctagtggtgttttaagacgtcacggtcaccacgcgtggaccgaagcttgcatgcctgcagtgcagcgtgacccggtcgtgcccctctctagagataatgagcattgcatgtctaagttataaaaaattaccacatattttttttgtcacacttgtttgaagtgcagtttatctatctttatacatatatttaaactttactctacgaataatataatctatagtactacaataatatcagtgttttagagaatcatataaatgaacagttagacatggtctaaaggacaattgagtattttgacaacaggactctacagttttatctttttagtgtgcatgtgttctcctttttttttgcaaatagcttcacctatataatacttcatccattttattagtacatccatttagggtttagggttaatggtttttatagactaatttttttagtacatctattttattctattttagcctctaaattaagaaaactaaaactctattttagtttttttatttaataatttagatataaaatagaataaaataaagtgactaaaaattaaacaaataccctttaagaaattaaaaaaactaaggaaacatttttcttgtttcgagtagataatgccagcctgttaaacgccgtcgacgagtctaacggacaccaaccagcgaaccagcagcgtcgcgtcgggccaagcgaagcagacggcacggcatctctgtcgctgcctctggacccctctcgagagttccgctccaccgttggacttgctccgctgtcggcatccagaaattgcgtggcggagcggcagacgtgagccggcacggcaggcggcctcctcctcctctcacggcaccggcagctacgggggattcctttcccaccgctccttcgctttcccttcctcgcccgccgtaataaatagacaccccctccacaccctctttccccaacctcgtgttgttcggagcgcacacacacacaaccagatctcccccaaatccacccgtcggcacctccgcttcaagaggtccgccttgtttctcctctgtctcttgatctgactaatcttggtttatgattcgttgagtaattttggggaaagcttcgtccacagttttttttcgatgaacagtgccgcagtggcgctgatcttgtatgctatcctgcaatcgtggtgaacttatttcttttatatcctttactcccatgaaaaggctagtaatctttctcgatgtaacatcgtccagcactgctattaccgtgtggtccatccgacagtctggctgaacacatcatacgatctatggagcaaaaatctatcttccctgttctttaatgaaggacgtcattttcattagtatgatctaggaatgttgcaacttgcaaggaggcgtttctttctttgaatttaactaactcgttgagtggccctgtttctcggacgtaaggcctttgctgctccacacatgtccattcgaattttaccgtgtttagcaagggcgaaaagtttgcatcttgatgatttagcttgactatgcgattgctttcctgaacccgtgcaggatccatggccactgtgaacaactggctcgctttctccctctccccgcaggagctgccgccctcccagacgacggactccacactcatctcggccgccaccgccgaccatgtctccggcgatgtctgcttcaacatcccccaagattggagcatgaggggatcagagctttcggcgctcgtcgcggagccgaagctggaggacttcctcggcggcatctccttctccgagcagcatcacaaggccaactgcaacatgatacccagcactagcagcacagtttgctacgcgagctcaggtgctagcaccggctaccatcaccagctgtaccaccagcccaccagctcagcgctccacttcgcggactccgtaatggtggcttcctcggccggtgtccacgacggcggtgccatgctcagcgcggccgccgctaacggtgtcgctggcgctgccagtgccaacggcggcggcatcgggctgtccatgattaagaactggctgcggagccaaccggcgcccatgcagccgagggtggcggcggctgagggcgcgcaggggctctctttgtccatgaacatggcggggacgacccaaggcgctgctggcatgccacttctcgctggagagcgcgcacgggcgcccgagagtgtatcgacgtcagcacagggtggagccgtcgtcgtcacggcgccgaaggaggatagcggtggcagcggtgttgccggcgctctagtagccgtgagcacggacacgggtggcagcggcggcgcgtcggctgacaacacggcaaggaagacggtggacacgttcgggcagcgcacgtcgatttaccgtggcgtgacaaggcatagatggactgggagatatgaggcacatctttgggataacagttgcagaagggaagggcaaactcgtaagggtcgtcaagtctatttaggtggctatgataaagaggagaaagctgctagggcttatgatcttgctgctctgaagtactggggtgccacaacaacaacaaattttccagtgagtaactacgaaaaggagctcgaggacatgaagcacatgacaaggcaggagtttgtagcgtctctgagaaggaagagcagtggtttctccagaggtgcatccatttacaggggagtgactaggcatcaccaacatggaagatggcaagcacggattggacgagttgcagggaacaaggatctttacttgggcaccttcagcacccaggaggaggcagcggaggcgtacgacatcgcggcgatcaagttccgcggcctcaacgccgtcaccaacttcgacatgagccgctacgacgtgaagagcatcctggacagcagcgccctccccatcggcagcgccgccaagcgcctcaaggaggccgaggccgcagcgtccgcgcagcaccaccacgccggcgtggtgagctacgacgtcggccgcatcgcctcgcagctcggcgacggcggagccctggcggcggcgtacggcgcgcactaccacggcgccgcctggccgaccatcgcgttccagccgggcgccgccagcacaggcctgtaccacccgtacgcgcagcagccaatgcgcggcggcgggtggtgcaagcaggagcaggaccacgcggtgatcgcggccgcgcacagcctgcaggacctccaccacctgaacctgggcgcggccggcgcgcacgactttttctcggcagggcagcaggccgccgccgctgcgatgcacggcctgggtagcatcgacagtgcgtcgctcgagcacagcaccggctccaactccgtcgtctacaacggcggggtcggcgacagcaacggcgccagcgccgtcggcggcagtggcggtggctacatgatgccgatgagcgctgccggagcaaccactacatcggcaatggtgagccacgagcaggtgcatgcacgggcctacgacgaagccaagcaggctgctcagatggggtacgagagctacctggtgaacgcggagaacaatggtggcggaaggatgtctgcatgggggactgtcgtgtctgcagccgcggcggcagcagcaagcagcaacgacaacatggccgccgacgtcgggcatggcggcgcgcagctcttcagtgtctggaacgacacttaagcgtacctagtggtacctgacatcttatagtctgcaacctctcgtgtctgaattcctatctttatcaagtgttattgcttccacgactataggacagctttcgtcgaaagcttttgctcatgtgatctcgaaggattcatctagtctgatttttcgtgacttgtatcggttttattggattcatccaacatatatcaataaaaaatgagttgtgtttcctttcttcctagttcagttaaaattatttccctcctgcgcttgtgctgtaattgtctgtgtacctgttgtttgtgactgtgttagttcccttggatatgatttcgtatttgatatgtacatggagatagcttagcttcattattggagtatgaagttagtatgacatagtcactctcctggaaaattgacactgcaaaccatatttttattctgaaccacaaatcctagtcagtccgctggcatatgccgtccgtttgctgaatccagaacgtgggtttggagatgtacggctgagatgcctctatgcgaaggggatttcgtggtgaaacgagatgggagtagagcaacgcccgtggaagatgcttcaaacttccacacttttgagcaacgatcggcagtagtaaggtagacgatttcaagatcaaagcatatgaagataaacaacatcaacaacaaaatttgttggggttctatagagagaaacagagctacatacatacactgttttgtatctaccatctgagatgatgaaaagatgaaaaactaaagaatgccccggcgccaacgccaggacacgccgcgcgcgcgtcacccgagccatctcttgacccagccggcgctgtatatttacacacgttgcagcatcgatcaccacctgttcgatcgcgtcgccgtcaccggcgcgccgcgacttattgaactagtctagggcgcggctaacaacctagcttagattgccttgtctaaacccttaaggctaacgcgccactctagattcttatgtgcttctagtctccaaatgtggttgatagttattttgctctaagatcaacagtaatgaagtataaatcatcgttgtggtgtgctactcggttaattgagcattaacacacacaaacatgacgaggatggtataatctccaaaaatgtgtactttgttaggtgggaccctatagccttgattaatgtgctatgttaggcatgcctggaaacgtgtgacgcatatgttttgtgaacctgttgatattatatgtgcttttatattaccatattttattaaaatactaatatttattactagtaagatataacattctatctagcttaaaaactaaccataaatattccataataactagatttaccaaactaatatactaaatatacataataaatacaaaattaacaagacaataatcaatatttatgagcttaatatatttagacattatggttggtcgacgataatcatgctaacttttcgtaattgcttgattgaaatatgcttagaataatgcctctttgttctacatggcaaatagggaccattatggtgtaacaccctgggaaccacaaacaccccgaaatgctactaaactacacaactaaccttcatatataaaatttcgacagcatctcctttgaaaatttgcatagacgtggaagcaacagagtataaacagatatcatgataagaaaacatactagacattaataatctgctagaaatgggaagaatcgagctcggtaccctggttcacaaactcaatacaacacacagtggagtagggtattacgctccggcggcccgaaccactctaaatccttgtgtcctcgtgtgctcttccaccattaatgactgtaattgcagggacacgaagagttgtagcgcttttgccaacaagatccgctatatgctagtagagtggaacctgcacagcaacaagcatccaataatctgagaataagaattatgtgtggtgatggttctcatctctgcaactcgccattttcgcgagagaaccaaatccaagttggtgaagatcatgatttgggctcatgggctggcatagtagctattacctttgcaattgtggttcgaatctatccgatattctccttttcagggagagctaatgcttatgcttattgggtattttggtttgacactgcttcacgcccaaaaaaaggcaactatgtctgagttggatatggcccaaaaaaaggcagctatgtctgagttggatatggaagtcttctttcgtttagggtgaagtaagaccaagctcatgagcttattatcttaggtcggaacaaattagttgataggcatggcacatttatcaaattataatgattttaacagaaaagcaacacctctttttcagcagcaccagctttgcaagctgcaattgacactccaagcatagtatttgctccaaactcagcctgcatttcgcacaatatcatatctatttccatttggataaaatatattttccagaaatatgggaacagaatcaagatacagaaaaaagttgtggtagtagtggtaagtggaaacacaagtacagtgaaaagatagcattatttctgaacagtcaaattaaccgaaataagtagtatcacatactgcccctaaattgactacacccaatgtaaagaattgcttgagcatattgagccatcagttgtttgtttgtgtaacggatttgacaatgcagagttcaggagcaaaaaaccgcaaaggagagaaagagggaaaggatctcctagtatcccaccttgtggcgcgccctgtcaagtgcatgatggcctggtcgatctgcgtctgctgctgcggttccatcccaacgagtgcctccgacaccttgtcgttgatcacccgcaccgcgtaggcgacccccctggcgaggaacttccgcctctcggaggccccggccgcgtcggcggcggcgccctcgagcgcgcccacgctagccgtagatgctcggtgcacggccttgttggtgtgcaactcgacctcaacggccggtgcgctacgcccgtcaaggatctggcgcgcccgcaccctcgtgatcacggtgggcgcctcccgcctcatgtggccgacgatgaaaagcgccgggttaggggccttggcgcgcaccgccgtattcagggcctcctcgctcttgcgcgagagcaggtgcttccccaggtactcctgcactgacaaggctgccacagcggtggaatttgtcctcacgacttcgccacgtcgtcctcacctccctggcttcccacgactccgccgtatcgaggtgctcggtgggtcgtcttaatccgaagtccgaactaggaagacgagacagagaggtctgaggaatgggcctcgtttgatgttgagctgaattatttttccagcataagcccaggtcttggtccatgaacaaaattactagaaacccagcccagtactacgatctaaaagagggactgccactggatagctctctctagcattctccacgctccaatacagcggcgtcgtgtctatccgggtctatccgcgaacacgtgagaactctccagaaactgctttctcctccacttcatctctctcgctttccctctataaaaagaccccttctaggaattgagggagacagcaagcaccaagcagcgatccgaagctcaatcaattcactcaaacctcttccccaaatcttcgattagatcttcgttgacaagaagactagaaccgaacctgacatgtccaacctgctcacggttcaccagaaccttccggctcttccagtggacgcgacgtccgatgaagtcaggaagaacctcatggacatgttccgcgacaggcaagcgttcagcgagcacacctggaagatgctgctctccgtctgccgctcctgggctgcatggtgcaagctgaacaacaggaagtggttccccgctgagcccgaggacgtgagggattaccttctgtacctgcaagcgcgaggtttgtttctgcttctacctttgatatatatataataattatcattaattagtagtaatataatatttcaaatatttttttcaaaataaaagaatgtagtatatagcaattgcttttctgtagtttataagtgtgtatattttaatttataacttttctaatatatgaccaaaacatggtgatgcctaggtctggcagtgaagaccatccagcaacaccttggacaactgaacatgcttcacaggcgctccggcctcccgcgccccagcgactcgaacgccgtgagcctcgtcatgcgccgcatcaggaaggaaaacgtcgatgccggcgaaagggcaaagcaggccctcgcgttcgagaggaccgatttcgaccaggtccgcagcctgatggagaacagcgacaggtgccaggacattaggaacctggcgttcctcggaattgcatacaacacgctcctcaggatcgcggaaattgcccgcattcgcgtgaaggacattagccgcaccgacggcggcaggatgcttatccacattggcaggaccaagacgctcgtttccaccgcaggcgtcgaaaaggccctcagcctcggagtgaccaagctcgtcgaacgctggatctccgtgtccggcgtcgcggacgacccaaacaactacctcttctgccgcgtccgcaagaacggggtggctgcccctagcgccaccagccaactcagcacgagggccttggaaggtattttcgaggccacccaccgcctgatctacggcgcgaaggatgacagcggtcaacgctacctcgcatggtccgggcactccgcccgcgttggagctgctagggacatggcccgcgccggtgtttccatccccgaaatcatgcaggcgggtggatggacgaacgtgaacattgtcatgaactacattcgcaaccttgacagcgagacgggcgcaatggttcgcctcctggaagatggtgactgaggtacccaacctagacttgtccatcttctggattggccaacttaattaatgtatgaaataaaaggatgcacacatagtgacatgctaatcactataatgtgggcatcaaagttgtgtgttatgtgtaattactagttatctgaataaaagagaaagagatcatccatatttcttatcctaaatgaatgtcacgtgtctttataattctttgatgaaccagatgcatttcattaaccaaatccatatacatataaatattaatcatatataattaatatcaattgggttagcaaaacaaatctagtctaggtgtgttttgcgatccgatatcgacgtctaaaaacggcccctaactaacgcttagttgcccgctagattagtcccccgttagtgcctagttagacacacgacgaactaggggctagccccgggataacttcgtatagcatacattatacgaagttatgaattccggaccgggttaccgaattcctgcccttaaggccaattgttcaagattcattcaacaattgaaacatctcccatgattaaatcagtataaggttgctatggtcttgcttgacaaagtttttttttgagggaatttcaactaaatttttgagtgaaactatcaaatactgattttaaaaaatttttataaaaggaagcgcagagataaaaggccatctatgctacaaaagtacccaaaaatgtaatcctaaagtatgaattgcattttttttttgtttggacgaaaggaaaggagtattaccacaagaatgatatcatcttcatatttagatcttttttgggtaaagcttgagattctctaaatatagagaaatcagaagaaaaaaaaaccgtgttttggtggttttgatttctagcctccacaataactttgacggcgtcgacaagtctaacggacaccaagcagcgaaccaccagcgccgagccaagcgaagcagacggccgagacgttgacaccttcggcgcggcatctctcgagagttccgctccggcgctccacctccaccgctggcggtttcttattccgttccgttccgcctcctgctctgctcctctccacaccacacggcacgaaaccgttacggcaccggcagcacccagcacgggagaggggattcctttcccaccgttccttccctttccgccccgccgctataaatagccagccccatccccagcttttttccccaatctcatctcctctctcctgttgttcggagcacacgcacaatccgatcgatccccaaatccccttcgtctctcctcgcgagcctcgtggatcccagcttcaaggtacggcgatcgatcatcccccctccttctctctaccttcttttctctagactacatcggatggcgatccatggttagggcctgctagtttcccttcctgttttgtcgatggctgcgaggcacaatagatctgatggcgttatgacggctaacttgtcatgttgttgcgatttatagtccctttaggagatcagtttaatttctcggatggttcgagatcggtggtccatggttagtaccctaagatccgcgctgttagggttcgtagatggaggcgacctgttctgattgttaacttgtcagtacctgggaaatcctgggatggttctagctcgtccgcagatgagatcgatttcatgatcctctgtatcttgtttcgttgcctaggttccgtctaatctatccgtggtatgatgtagatgttttgatcgtgctaactacgtcttgtaaagttaattgtcaggtcataatttttagcatgcctttttttttgtttggttttgtctaattgggctgtcgttctagatcagagtagaagactgttccaaactacctgctggatttattgaacttggatctgtatgtgtgtcacatatcttcataaattcatgattaagatggattgaaatatcttttatctttttggtatggatagttctatatgttggtgtggctttgttagatgtatacatgcttagatacatgaagcaacgtgctgctactgtttagtaattgctgttcatttgtctaataaacagataaggatatgtatttatgttgctgttggttttgctggtactttgttggatacaaatgcttcaatacagaaaacagcatgctgctacgatttaccatttatctaatcttatcatatgtctaatctaataaacaaacatgcttttaaattatcttcatatgcttggatgatggcatacacagcggctatgtgtggttttttaaatacccagcatcatgggcatgcatgacactgctttaatatgctttttatttgcttgagactgtttcttttgtttatactgaccctttagttcggtgactcttctgcaggtcgactttaacttagcctaggatccatggcccagtccaagcacggcctgaccaaggagatgaccatgaagtaccgcatggagggctgcgtggacggccacaagttcgtgatcaccggcgagggcatcggctaccccttcaagggcaagcaggccatcaacctgtgcgtggtggagggcggccccttgcccttcgccgaggacatcttgtccgccgccttcatgtacggcaaccgcgtgttcaccgagtacccccaggacatcgtcgactacttcaagaactcctgccccgccggctacacctgggaccgctccttcctgttcgaggacggcgccgtgtgcatctgcaacgccgacatcaccgtgagcgtggaggagaactgcatgtaccacgagtccaagttctacggcgtgaacttccccgccgacggccccgtgatgaagaagatgaccgacaactgggagccctcctgcgagaagatcatccccgtgcccaagcagggcatcttgaagggcgacgtgagcatgtacctgctgctgaaggacggtggccgcttgcgctgccagttcgacaccgtgtacaaggccaagtccgtgccccgcaagatgcccgactggcacttcatccagcacaagctgacccgcgaggaccgcagcgacgccaagaaccagaagtggcacctgaccgagcacgccatcgcctccggctccgccttgccctccggactcagatctcgatagggtaccaatggccagttaacagatccagctgctgctgttctagggttcacaagtctgcctatttgtcttccccaatggagctatggttgtctggtctggtccttggtcgtgtcccgtttcattgtgtactatttacctgtaatgtgtatccttaagtctggtttgatggtgtctgaaacgttttgctgtggtagagcagcatggaagaactataatgaataagtgatccctaatcattgtgtccaaattttgcttctgctatacccttttgtgctgtttcttatgttttgcttaaaaatttgatctgacaaacaaatttgtctaaattatgctcttgttctgactgtgtactgtacacatttgtattgctaccggtttggcacatagttttctctttgattgcagatcaaacccttctgattgcagattgcttggctatggctgatgtgctcactgttcttctttagcttgtatattgctgatggtggcttggctacggctgaaaaagttgctgctgcgccgacttggcaactgttgctccagtaatgctttgtcctctcttcctagccgccgacttggcacttggcagctgttgctcctgtaatgcgttgttatctcttatctcttgagatgtactatgattttgaggctgtttgacttgtgccagattgccagtgctgatgctatattatctcaggtttttatgctagtatatgttttactgtgtgctgcctgtgtcgagttacgtaatctattgaaccgctatgcgtgttgatgccctgttgttgcttgccagattgatgcccctgttgcttgcagcttgcaagctgtagtgaaatcctaaaattcgaaaccaaatctattctgaacttttgaagatctgtgatgtccggaagaaaagattcaaacagataaacgggactctccagaatctataaaataaatgatcgacaaacgctttgctttggtaggcttcctagttagttagcggaccgaagcttcggtccgggcctagaaggccagcttcggccgcccctcggtaccctgggatctgcccttactttaacgcctctaaccaacacccctttatctttataaggaacaataaacagaatttgccccactgttctaaatcacctaataatatccccagctaaaaacaataaaggtttcctagaattaagacaagcatgactgttcctccaggagggtttggaacattgttgcagtcttgcagatacgggcgaagggtgagaaacagagcggagggctggaggtgacctcggtagtcgacgccggagttgagcttgacaacgacggggcggcccctgatggacttgaggaagtccgatggcgtcttcaccgtcccgccggcgcccgaggcgggcctgtcgctgccgccgccgccgctgctcatcttgcgcgctgtgcccccggcggtgtccctgtgttgcggatcgcgggtgggccaggtggatgcgagggcgacccgtttggactccggccggagccgccggatccctggtcggtgtcagtgccgtttactctgggccccacgtgtcagtaccgtctgtagatgacaacaacccgtcgtccacagtcatgtccaaaatatcctttcttcttttttttcgattcggatatctatcttccttttttttttccaaaaatcttcttgacgcaccagcgcgcacgtttgtggtaaacgccgacacgtcggtcccacgtcgatagaccccacccaccagtgagtagcgtgtacgtattcgggggtgacggacgtgtcgccgtcgtcttgctagtcccattcccatctgagccacacatctctgaacaaaaaaaaggagggaggcctccacgcacatccccctccgtgccacccgccccaaaccctcgcgccgcctccgagacagccgccgcaaccatggccaccgccgccgccgcgtctaccgcgctcactggcgccactaccgctgcgcccaaggcgaggcgccgggcgcacctcctggccacccgccgcgccctcgccgcgcccatcaggtgctcagcggcgtcacccgccatgccgatggctcccccggccaccccgctccggccgtggggccccaccgagccccgcaagggtgctgacatcctcgtcgagtccctcgagcgctgcggcgtccgcgacgtcttcgcctaccccggcggcgcgtccatggagatccaccaggcactcacccgctcccccgtcatcgccaaccacctcttccgccacgagcaaggggaggcctttgccgcctccggctacgcgcgctcctcgggccgcgtcggcgtctgcatcgccacctccggccccggcgccaccaacctagtctccgcgctcgccgacgcgctgctcgattccgtccccatggtcgccatcacgggacaggtggcgcgacgcatgattggcaccgacgccttccaggagacgcccatcgtcgaggtcacccgctccatcaccaagcacaactacctggtcctcgacgtcgacgacatcccccgcgtcgtgcaggaggctttcttcctcgcctcctctggtcgaccagggccggtgcttgtcgacatccccaaggacatccagcagcagatggcggtgcctgtctgggacaagcccatgagtctgcctgggtacattgcgcgccttcccaagccccctgcgactgagttgcttgagcaggtgctgcgtcttgttggtgaatcgcggcgccctgttctttatgtgggcggtggctgcgcagcatctggtgaggagttgcgacgctttgtggagctgactggaatcccggtcacaactactcttatgggcctcggcaacttccccagcgacgacccactgtctctgcgcatgctaggtatgcatgggacggtgtatgcaaattatgcagtggataaggccgatctgttgcttgcacttggtgtgcggtttgatgatcgcgtgacagggaagattgaggcttttgcaagcagggctaagattgtgcacgttgatattgatccggctgagattggcaagaacaagcagccacatgtgtccatctgtgcagatgttaagcttgctttgcagggcatgaatgctcttcttgaaggaagcacatcaaagaagagctttgactttggctcatggaacgatgagttggatcagcagaagagggaattcccccttgggtataaaacatctaatgaggagatccagccacaatatgctattcaggttcttgatgagctgacgaaaggcgaggccatcatcggcacaggtgttgggcagcaccagatgtgggcggcacagtactacacttacaagcggccaaggcagtggttgtcttcagctggtcttggggctatgggatttggtttgccggctgctgctggtgcttctgtggcaaacccaggtgtcactgttgttgacatcgatggagatggtagctttctcatgaacgttcaggagctagctatgatccgaattgagaacctcccagtgaaggtctttgtgctaaacaaccagcacctggggatggtggtgcagttggaggacaggttctataaggccaacagagcgcacacatacttgggaaacccagagaatgaaagtgagatatatccagatttcgtgacgatcgccaaagggttcaacattccagcggtccgtgtgacaaagaagaacgaagtccgcgcagcgataaagaagatgctcgagactccagggccgtacctcttggatataatcgtcccacaccaggagcatgtgttgcctatgatccctagtggtggggctttcaaggatatgatcctggatggtgatggcaggactgtgtactgactagctagtcagttaacagatcctctagtgccgtgggtcgtttaagctgccgctgtacctgtgtcgtctggtgccttctggtgtacctgggaggttgtcgtctatcaagtatctgtggttggtgtcatgagtcagtgagtcccaatactgttcgtgtcctgtgtgcattatacccaaaactgttatgggcaaatcatgaataagcttgatgttcgaacttaaaagtctctgctcaatatggtattatggttgtttttgttcgtctcctaatatttgcctgggatcaaattttattggctggtgttcatttgacctccatgttcttgctaggctccattttttactctacagccataatatgtttgattgtttggtttgttctttgttgtacacctggttctgtcgagcttagttttcgacactggcttacagcttaacatgttgctattttattgggttctgattgctattttattgggttctgattgctagtttttgctgaatccaaaaaccatgttatttatttaagcgatccaggttattattatgatggtggctaagtttttttttttccaagggtaaattttctggattctccagtgtttctgtggccgaattcaatcactagagtcgacctgcaggccggtccgggcctagaaggcccgcgccacttacgcttgattccgatgacttcgtaggttcctagctcaagccgctcgtgtccaagcgtcacttacgattagctaatgattacggcatctaggaccgactagttcttatgtgcttctagtctccaaatgtggttgatagttattttgctctaagatcaacagtaatgaagtataaatcatcgttgtggtgtgctactcggttaattgagcattaacacacacaaacatgacgaggatggtataatctccaaaaatgtgtactttgttaggtgggaccctatagccttgattaatgtgctatgttaggcatgcctggaaacgtgtgacgcatatgttttgtgaacctgttgatattatatgtgcttttatattaccatattttattaaaatactaatatttattactagtaagatataacattctatctagcttaaaaactaaccataaatattccataataactagatttaccaaactaatatactaaatatacataataaatacaaaattaacaagacaataatcaatatttatgagcttaatatatttagacattatggttggtcgacgataatcatgctaacttttcgtaattgcttgattgaaatatgcttagaataatgcctctttgttctacatggcaaatagggaccattatggtgtaacaccctgggaaccacaaacaccccgaaatgctactaaactacacaactaaccttcatatataaaatttcgacagcatctcctttgaaaatttgcatagacgtggaagcaacagagtataaacagatctgcgtttaaacgtgcaagcgctactagacaattcagtacattaaaaacgtccgcaatgtgttattaagttgtctaagcgtcaatttgtttacaccacaatatatcctgcca

SEQ ID NO: 251 - DNA, 21544 bp, synthetic construct
  misc_feature 1..21544: note = PHP97977
  source 1..21544: mol_type = other DNA
gtttacccgccaatatatcctgtcaaacactgcggccgcacttgaccgcggatggagccggagctgtggtgaggccatcgacgggaggtgggggagaacacagtctcagtgttctttgtgagtccgcaaggtttttagcttttctgtattaattaaggttgctgttggctgtagaatacggtcgtggaagagctgtatcggtagctactacgtaagctattatatactggaagtctggagctcgtcgatctccggtcgtcttcctccatttctcctcgtcttgctttgactgctgctaccatttgcttctgttttctgatgaagcatgccatgtcggccaccagtgtttgtgtggtttttgcagggaatggctttcaagtgctgtgattgaatggccctcgtcgtcctcggctgagctcacatggacgcgtcatgtgagtgagatatatgatcatatgatgagtggggttcgggtgagtgcgtacttgaagtaggatcccgctttcactcattcattcattggcctttaaaccgggaaattttcgcgaggagatggagggaagcaagcagggtgacgagtgcagagtgccgcgagcgctttgtcaaaaggcaccgccgtaggcaaaaaaatcaatggccctgactgactcgatggtagtactactgtagagactagagagggttgctccccatatcttcgtgtgacttttactccagcattgcatttccgtcattgagacgttaattaatagcagctttcgggacagatgactgtggccatgtttcgtcacggccgcttcgtgccagctgggggtactatagtactgtgattttgttagtaaaaactttcattaggccaccattgacgaccgggccttcgcttttgctgcgctaattaaccatttcccggcgaccgaagggaacatgaacatgccccgacacatgagggcatgaggactagtgttctccctgtcgttcgttgacttgactagtgatagtttaaacgctcttcaactggaagagcggttactaccggttcactagctagctgctaatcgagctagttaccctatgaggtgacatgaagcgctcacggttactatgacggttagcttcacgactgttggtggcagtagcgtacgacttagctatagttccggacttacctagctaataacttcgtatagcatacattatacgaagttatggttacctcgcgaatacatctagatatcaagcttgcatgcctgcagtgcagcgtgacccggtcgtgcccctctctagagataatgagcattgcatgtctaagttataaaaaattaccacatattttttttgtcacacttgtttgaagtgcagtttatctatctttatacatatatttaaactttactctacgaataatataatctatagtactacaataatatcagtgttttagagaatcatataaatgaacagttagacatggtctaaaggacaattgagtattttgacaacaggactctacagttttatctttttagtgtgcatgtgttctcctttttttttgcaaatagcttcacctatataatacttcatccattttattagtacatccatttagggtttagggttaatggtttttatagactaatttttttagtacatctattttattctattttagcctctaaattaagaaaactaaaactctattttagtttttttatttaataatttagatataaaatagaataaaataaagtgactaaaaattaaacaaataccctttaagaaattaaaaaaactaaggaaacatttttcttgtttcgagtagataatgccagcctgttaaacgccgtcgacgagtctaacggacaccaaccagcgaaccagcagcgtcgcgtcgggccaagcgaagcagacggcacggcatctctgtcgctgcctctggacccctctcgagagttccgctccaccgttggacttgctccgctgtcggcatccagaaattgcgtggcggagcggcagacgtgagccggcacggcaggcggcctcctcctcctctcacggcaccggcagctacgggggattcctttcccaccgctccttcgcacgtaagcgcttacgcaccgaacaacgtaagcgcttacgcaccgaacaacgtaagcgcttacgctttcccttcctcgcccgccgtaataaatagacaccccctccacaccctctttccccaacctcgtgttgttcggagcgcacacacacacaaccagatctcccccaaatccacccgtcggcacctccgcttcaaggtacgccgctcgtcctcccccccccccctctctaccttctctagatcggcgttccggtccatgcatggttagggcccggtagttctacttctgttcatgtttgtgttagatccgtgtttgtgttagatccgtgctgctagcgttcgtacacggatgcgacctgtacgtcagacacgttctgattgctaacttgccagtgtttctctttggggaatcctgggatggctctagccgttccgcagacgggatcgatttcatgattttttttgtttcgttgcatagggtttggtttgcccttttcctttatttcaatatatgccgtgcacttgtttgtcgggtcatcttttcatgcttttttttgtcttggttgtgatgatgtggtctggttgggcggtcgttctagatcggagtagaattctgtttcaaactacctggtggatttattaattttggatctgtatgtgtgtgccatacatattcatagttacgaattgaagatgatggatggaaatatcgatctaggataggtatacatgttgatgcgggttttactgatgcatatacagagatgctttttgttcgcttggttgtgatgatgtggtgtggttgggcggtcgttcattcgttctagatcggagtagaatactgtttcaaactacctggtgtatttattaattttggaactgtatgtgtgtgtcatacatcttcatagttacgagtttaagatggatggaaatatcgatctaggataggtatacatgttgatgtgggttttactgatgcatatacatgatggcatatgcagcatctattcatatgctctaaccttgagtacctatctattataataaacaagtatgttttataattattttgatcttgatatacttggatgatggcatatgcagcagctatatgtggatttttttagccctgccttcatacgctatttatttgcttggtactgtttcttttgtcgatgctcaccctgttgtttggtgttacttctgcaggtcgactttaacttagcctaggatccatggcggccaatgcgggcggcggtggagcgggaggaggcagcggcagcggcagcgtggctgcgccggcggtgtgccgccccagcggctcgcggtggacgccgacgccggagcagatcaggatgctgaaggagctctactacggctgcggcatccggtcgcccagctcggagcagatccagcgcatcaccgccatgctgcggcagcacggcaagatcgagggcaagaacgtcttctactggttccagaaccacaaggcccgcgagcgccagaagcgccgcctcaccagcctcgacgtcaacgtgcccgccgccggcgcggccgacgccaccaccagccaactcggcgtcctctcgctgtcgtcgccgccgccttcaggcgcggcgcctccctcgcccaccctcggcttctacgccgccggcaatggcggcggatcggctgtgctgctggacacgagttccgactggggcagcagcggcgctgctatggccaccgagacatgcttcctgcaggactacatgggcgtgacggacacgggcagctcgtcgcagtggccacgcttctcgtcgtcggacacgataatggcggcggccgcggcgcgggcggcgacgacgcgggcgcccgagacgctccctctcttcccgacctgcggcgacgacggcggcagcggtagcagcagctacttgccgttctggggtgccgcgtccacaactgccggcgccacttcttccgttgcgatccaacagcaacaccagctgcaggagcagtacagcttttacagcaacagcaacagcacccagctggccggcaccggcaaccaagacgtatcggcaacagcagcagcagccgccgccctggagctgagcctcagctcatggtgctccccttaccctgctgcagggagtatgtgagagcaacgcgagctgccactgctcttcactgatgtctctggaatggaaggaggaggaagtgagaacagatcattcgacaaagcagcattagtccgttgatcggtggaagaccactcgtcagtgttgagttgaatgtttgatcaataaaatacggcaatgctgtaagggttgttttttatgccattgataatacactgtactgttcagttgttgaactctatttcttagccatgccaagtgcttttcttattttgaataacattacagcaaaaagttgaaagacaaaaaaaaaaacccccgaacagagtgctttgggtcccaagcttctttagactgtgttcggcgttccccctaaatttctccccctatatctcactcacttgtcacatcagcgttctctttccccctatatctccacgctctacagcagttccacctatatcaaacctctataccccaccacaacaatattatatactttcatcttcaactaactcatgtaccttccaatttttttctactaataattatttacgtgcacagaaacttagcaaggagagagagagcgggaatttaaatgctcggcgttaggcttttagtccgctaggtggctagaccgaggttaggacgctagttcactaggggcctagtggtgttttaagacgtcacggtcaccacgcgtggaccgaagcttgcatgcctgcagtgcagcgtgacccggtcgtgcccctctctagagataatgagcattgcatgtctaagttataaaaaattaccacatattttttttgtcacacttgtttgaagtgcagtttatctatctttatacatatatttaaactttactctacgaataatataatctatagtactacaataatatcagtgttttagagaatcatataaatgaacagttagacatggtctaaaggacaattgagtattttgacaacaggactctacagttttatctttttagtgtgcatgtgttctcctttttttttgcaaatagcttcacctatataatacttcatccattttattagtacatccatttagggtttagggttaatggtttttatagactaatttttttagtacatctattttattctattttagcctctaaattaagaaaactaaaactctattttagtttttttatttaataatttagatataaaatagaataaaataaagtgactaaaaattaaacaaataccctttaagaaattaaaaaaactaaggaaacatttttcttgtttcgagtagataatgccagcctgttaaacgccgtcgacgagtctaacggacaccaaccagcgaaccagcagcgtcgcgtcgggccaagcgaagcagacggcacggcatctctgtcgctgcctctggacccctctcgagagttccgctccaccgttggacttgctccgctgtcggcatccagaaattgcgtggcggagcggcagacgtgagccggcacggcaggcggcctcctcctcctctcacggcaccggcagctacgggggattcctttcccaccgctccttcgctttcccttcctcgcccgccgtaataaatagacaccccctccacaccctctttccccaacctcgtgttgttcggagcgcacacacacacaaccagatccatggccactgtgaacaactggctcgctttctccctctccccgcaggagctgccgccctcccagacgacggactccacactcatctcggccgccaccgccgaccatgtctccggcgatgtctgcttcaacatcccccaagattggagcatgaggggatcagagctttcggcgctcgtcgcggagccgaagctggaggacttcctcggcggcatctccttctccgagcagcatcacaaggccaactgcaacatgatacccagcactagcagcacagtttgctacgcgagctcaggtgctagcaccggctaccatcaccagctgtaccaccagcccaccagctcagcgctccacttcgcggactccgtaatggtggcttcctcggccggtgtccacgacggcggtgccatgctcagcgcggccgccgctaacggtgtcgctggcgctgccagtgccaacggcggcggcatcgggctgtccatgattaagaactggctgcggagccaaccggcgcccatgcagccgagggtggcggcggctgagggcgcgcaggggctctctttgtccatgaacatggcggggacgacccaaggcgctgctggcatgccacttctcgctggagagcgcgcacgggcgcccgagagtgtatcgacgtcagcacagggtggagccgtcgtcgtcacggcgccgaaggaggatagcggtggcagcggtgttgccggcgctctagtagccgtgagcacggacacgggtggcagcggcggcgcgtcggctgacaacacggcaaggaagacggtggacacgttcgggcagcgcacgtcgatttaccgtggcgtgacaaggcatagatggactgggagatatgaggcacatctttgggataacagttgcagaagggaagggcaaactcgtaagggtcgtcaagtctatttaggtggctatgataaagaggagaaagctgctagggcttatgatcttgctgctctgaagtactggggtgccacaacaacaacaaattttccagtgagtaactacgaaaaggagctcgaggacatgaagcacatgacaaggcaggagtttgtagcgtctctgagaaggaagagcagtggtttctccagaggtgcatccatttacaggggagtgactaggcatcaccaacatggaagatggcaagcacggattggacgagttgcagggaacaaggatctttacttgggcaccttcagcacccaggaggaggcagcggaggcgtacgacatcgcggcgatcaagttccgcggcctcaacgccgtcaccaacttcgacatgagccgctacgacgtgaagagcatcctggacagcagcgccctccccatcggcagcgccgccaagcgcctcaaggaggccgaggccgcagcgtccgcgcagcaccaccacgccggcgtggtgagctacgacgtcggccgcatcgcctcgcagctcggcgacggcggagccctggcggcggcgtacggcgcgcactaccacggcgccgcctggccgaccatcgcgttccagccgggcgccgccagcacaggcctgtaccacccgtacgcgcagcagccaatgcgcggcggcgggtggtgcaagcaggagcaggaccacgcggtgatcgcggccgcgcacagcctgcaggacctccaccacctgaacctgggcgcggccggcgcgcacgactttttctcggcagggcagcaggccgccgccgctgcgatgcacggcctgggtagcatcgacagtgcgtcgctcgagcacagcaccggctccaactccgtcgtctacaacggcggggtcggcgacagcaacggcgccagcgccgtcggcggcagtggcggtggctacatgatgccgatgagcgctgccggagcaaccactacatcggcaatggtgagccacgagcaggtgcatgcacgggcctacgacgaagccaagcaggctgctcagatggggtacgagagctacctggtgaacgcggagaacaatggtggcggaaggatgtctgcatgggggactgtcgtgtctgcagccgcggcggcagcagcaagcagcaacgacaacatggccgccgacgtcgggcatggcggcgcgcagctcttcagtgtctggaacgacacttaagcgtacctagtggtacctgacatcttatagtctgcaacctctcgtgtctgaattcctatctttatcaagtgttattgcttccacgactataggacagctttcgtcgaaagcttttgctcatgtgatctcgaaggattcatctagtctgatttttcgtgacttgtatcggttttattggattcatccaacatatatcaataaaaaatgagttgtgtttcctttcttcctagttcagttaaaattatttccctcctgcgcttgtgctgtaattgtctgtgtacctgttgtttgtgactgtgttagttcccttggatatgatttcgtatttgatatgtacatggagatagcttagcttcattattggagtatgaagttagtatgacatagtcactctcctggaaaattgacactgcaaaccatatttttattctgaaccacaaatcctagtcagtccgctggcatatgccgtccgtttgctgaatccagaacgtgggtttggagatgtacggctgagatgcctctatgcgaaggggatttcgtggtgaaacgagatgggagtagagcaacgcccgtggaagatgcttcaaacttccacacttttgagcaacgatcggcagtagtaaggtagacgatttcaagatcaaagcatatgaagataaacaacatcaacaacaaaatttgttggggttctatagagagaaacagagctacatacatacactgttttgtatctaccatctgagatgatgaaaagatgaaaaactaaagaatgccccggcgccaacgccaggacacgccgcgcgcgcgtcacccgagccatctcttgacccagccggcgctgtatatttacacacgttgcagcatcgatcaccacctgttcgatcgcgtcgccgtcaccggcgcgccgcgacttattgaactagtctagggcgcggctaacaacctagcttagattgccttgtctaaacccttaaggctaacgcgccactctagattcttatgtgcttctagtctccaaatgtggttgatagttattttgctctaagatcaacagtaatgaagtataaatcatcgttgtggtgtgctactcggttaattgagcattaacacacacaaacatgacgaggatggtataatctccaaaaatgtgtactttgttaggtgggaccctatagccttgattaatgtgctatgttaggcatgcctggaaacgtgtgacgcatatgttttgtgaacctgttgatattatatgtgcttttatattaccatattttattaaaatactaatatttattactagtaagatataacattctatctagcttaaaaactaaccataaatattccataataactagatttaccaaactaatatactaaatatacataataaatacaaaattaacaagacaataatcaatatttatgagcttaatatatttagacattatggttggtcgacgataatcatgctaacttttcgtaattgcttgattgaaatatgcttagaataatgcctctttgttctacatggcaaatagggaccattatggtgtaacaccctgggaaccacaaacaccccgaaatgctactaaactacacaactaaccttcatatataaaatttcgacagcatctcctttgaaaatttgcatagacgtggaagcaacagagtataaacagatatcatgataagaaaacatactagacattaataatctgctagaaatgggaagaatcgagctcggtaccctggttcacaaactcaatacaacacacagtggagtagggtattacgctccggcggcccgaaccactctaaatccttgtgtcctcgtgtgctcttccaccattaatgactgtaattgcagggacacgaagagttgtagcgcttttgccaacaagatccgctatatgctagtagagtggaacctgcacagcaacaagcatccaataatctgagaataagaattatgtgtggtgatggttctcatctctgcaactcgccattttcgcgagagaaccaaatccaagttggtgaagatcatgatttgggctcatgggctggcatagtagctattacctttgcaattgtggttcgaatctatccgatattctccttttcagggagagctaatgcttatgcttattgggtattttggtttgacactgcttcacgcccaaaaaaaggcaactatgtctgagttggatatggcccaaaaaaaggcagctatgtctgagttggatatggaagtcttctttcgtttagggtgaagtaagaccaagctcatgagcttattatcttaggtcggaacaaattagttgataggcatggcacatttatcaaattataatgattttaacagaaaagcaacacctctttttcagcagcaccagctttgcaagctgcaattgacactccaagcatagtatttgctccaaactcagcctgcatttcgcacaatatcatatctatttccatttggataaaatatattttccagaaatatgggaacagaatcaagatacagaaaaaagttgtggtagtagtggtaagtggaaacacaagtacagtgaaaagatagcattatttctgaacagtcaaattaaccgaaataagtagtatcacatactgcccctaaattgactacacccaatgtaaagaattgcttgagcatattgagccatcagttgtttgtttgtgtaacggatttgacaatgcagagttcaggagcaaaaaaccgcaaaggagagaaagagggaaaggatctcctagtatcccaccttgtggcgcgccctgtcaagtgcatgatggcctggtcgatctgcgtctgctgctgcggttccatcccaacgagtgcctccgacaccttgtcgttgatcacccgcaccgcgtaggcgacccccctggcgaggaacttccgcctctcggaggccccggccgcgtcggcggcggcgccctcgagcgcgcccacgctagccgtagatgctcggtgcacggccttgttggtgtgcaactcgacctcaacggccggtgcgctacgcccgtcaaggatctggcgcgcccgcaccctcgtgatcacggtgggcgcctcccgcctcatgtggccgacgatgaaaagcgccgggttaggggccttggcgcgcaccgccgtattcagggcctcctcgctcttgcgcgagagcaggtgcttccccaggtactcctgcactgacaaggctgccacagcggtggaatttgtcctcacgacttcgccacgtcgtcctcacctccctggcttcccacgactccgccgtatcgaggtgctcggtgggtcgtcttaatccgaagtccgaactaggaagacgagacagagaggtctgaggaatgggcctcgtttgatgttgagctgaattatttttccagcataagcccaggtcttggtccatgaacaaaattactagaaacccagcccagtactacgatctaaaagagggactgccactggatagctctctctagcattctccacgctccaatacagcggcgtcgtgtctatccgggtctatccgcgaacacgtgagaactctccagaaactgctttctcctccacttcatctctctcgctttccctctataaaaagaccccttctaggaattgagggagacagcaagcaccaagcagcgatccgaagctcaatcaattcactcaaacctcttccccaaatcttcgattagatcttcgttgacaagaagactagaaccgaacctgacatgtccaacctgctcacggttcaccagaaccttccggctcttccagtggacgcgacgtccgatgaagtcaggaagaacctcatggacatgttccgcgacaggcaagcgttcagcgagcacacctggaagatgctgctctccgtctgccgctcctgggctgcatggtgcaagctgaacaacaggaagtggttccccgctgagcccgaggacgtgagggattaccttctgtacctgcaagcgcgaggtttgtttctgcttctacctttgatatatatataataattatcattaattagtagtaatataatatttcaaatatttttttcaaaataaaagaatgtagtatatagcaattgcttttctgtagtttataagtgtgtatattttaatttataacttttctaatatatgaccaaaacatggtgatgcctaggtctggcagtgaagaccatccagcaacaccttggacaactgaacatgcttcacaggcgctccggcctcccgcgccccagcgactcgaacgccgtgagcctcgtcatgcgccgcatcaggaaggaaaacgtcgatgccggcgaaagggcaaagcaggccctcgcgttcgagaggaccgatttcgaccaggtccgcagcctgatggagaacagcgacaggtgccaggacattaggaacctggcgttcctcggaattgcatacaacacgctcctcaggatcgcggaaattgcccgcattcgcgtgaaggacattagccgcaccgacggcggcaggatgcttatccacattggcaggaccaagacgctcgtttccaccgcaggcgtcgaaaaggccctcagcctcggagtgaccaagctcgtcgaacgctggatctccgtgtccggcgtcgcggacgacccaaacaactacctcttctgccgcgtccgcaagaacggggtggctgcccctagcgccaccagccaactcagcacgagggccttggaaggtattttcgaggccacccaccgcctgatctacggcgcgaaggatgacagcggtcaacgctacctcgcatggtccgggcactccgcccgcgttggagctgctagggacatggcccgcgccggtgtttccatccccgaaatcatgcaggcgggtggatggacgaacgtgaacattgtcatgaactacattcgcaaccttgacagcgagacgggcgcaatggttcgcctcctggaagatggtgactgaggtacccaacctagacttgtccatcttctggattggccaacttaattaatgtatgaaataaaaggatgcacacatagtgacatgctaatcactataatgtgggcatcaaagttgtgtgttatgtgtaattactagttatctgaataaaagagaaagagatcatccatatttcttatcctaaatgaatgtcacgtgtctttataattctttgatgaaccagatgcatttcattaaccaaatccatatacatataaatattaatcatatataattaatatcaattgggttagcaaaacaaatctagtctaggtgtgttttgcgatccgatatcgacgtctaaaaacggcccctaactaacgcttagttgcccgctagattagtcccccgttagtgcctagttagacacacgacgaactaggggctagccccgggataacttcgtatagcatacattatacgaagttatgaattccggaccgggttaccgaattcctgcccttaaggccaattgttcaagattcattcaacaattgaaacatctcccatgattaaatcagtataaggttgctatggtcttgcttgacaaagtttttttttgagggaatttcaactaaatttttgagtgaaactatcaaatactgattttaaaaaatttttataaaaggaagcgcagagataaaaggccatctatgctacaaaagtacccaaaaatgtaatcctaaagtatgaattgcattttttttttgtttggacgaaaggaaaggagtattaccacaagaatgatatcatcttcatatttagatcttttttgggtaaagcttgagattctctaaatatagagaaatcagaagaaaaaaaaaccgtgttttggtggttttgatttctagcctccacaataactttgacggcgtcgacaagtctaacggacaccaagcagcgaaccaccagcgccgagccaagcgaagcagacggccgagacgttgacaccttcggcgcggcatctctcgagagttccgctccggcgctccacctccaccgctggcggtttcttattccgttccgttccgcctcctgctctgctcctctccacaccacacggcacgaaaccgttacggcaccggcagcacccagcacgggagaggggattcctttcccaccgttccttccctttccgccccgccgctataaatagccagccccatccccagcttttttccccaatctcatctcctctctcctgttgttcggagcacacgcacaatccgatcgatccccaaatccccttcgtctctcctcgcgagcctcgtggatcccagcttcaaggtacggcgatcgatcatcccccctccttctctctaccttcttttctctagactacatcggatggcgatccatggttagggcctgctagtttcccttcctgttttgtcgatggctgcgaggcacaatagatctgatggcgttatgacggctaacttgtcatgttgttgcgatttatagtccctttaggagatcagtttaatttctcggatggttcgagatcggtggtccatggttagtaccctaagatccgcgctgttagggttcgtagatggaggcgacctgttctgattgttaacttgtcagtacctgggaaatcctgggatggttctagctcgtccgcagatgagatcgatttcatgatcctctgtatcttgtttcgttgcctaggttccgtctaatctatccgtggtatgatgtagatgttttgatcgtgctaactacgtcttgtaaagttaattgtcaggtcataatttttagcatgcctttttttttgtttggttttgtctaattgggctgtcgttctagatcagagtagaagactgttccaaactacctgctggatttattgaacttggatctgtatgtgtgtcacatatcttcataaattcatgattaagatggattgaaatatcttttatctttttggtatggatagttctatatgttggtgtggctttgttagatgtatacatgcttagatacatgaagcaacgtgctgctactgtttagtaattgctgttcatttgtctaataaacagataaggatatgtatttatgttgctgttggttttgctggtactttgttggatacaaatgcttcaatacagaaaacagcatgctgctacgatttaccatttatctaatcttatcatatgtctaatctaataaacaaacatgcttttaaattatcttcatatgcttggatgatggcatacacagcggctatgtgtggttttttaaatacccagcatcatgggcatgcatgacactgctttaatatgctttttatttgcttgagactgtttcttttgtttatactgaccctttagttcggtgactcttctgcaggtcgactttaacttagcctaggatccatggcccagtccaagcacggcctgaccaaggagatgaccatgaagtaccgcatggagggctgcgtggacggccacaagttcgtgatcaccggcgagggcatcggctaccccttcaagggcaagcaggccatcaacctgtgcgtggtggagggcggccccttgcccttcgccgaggacatcttgtccgccgccttcatgtacggcaaccgcgtgttcaccgagtacccccaggacatcgtcgactacttcaagaactcctgccccgccggctacacctgggaccgctccttcctgttcgaggacggcgccgtgtgcatctgcaacgccgacatcaccgtgagcgtggaggagaactgcatgtaccacgagtccaagttctacggcgtgaacttccccgccgacggccccgtgatgaagaagatgaccgacaactgggagccctcctgcgagaagatcatccccgtgcccaagcagggcatcttgaagggcgacgtgagcatgtacctgctgctgaaggacggtggccgcttgcgctgccagttcgacaccgtgtacaaggccaagtccgtgccccgcaagatgcccgactggcacttcatccagcacaagctgacccgcgaggaccgcagcgacgccaagaaccagaagtggcacctgaccgagcacgccatcgcctccggctccgccttgccctccggactcagatctcgatagggtaccaatggccagttaacagatccagctgctgctgttctagggttcacaagtctgcctatttgtcttccccaatggagctatggttgtctggtctggtccttggtcgtgtcccgtttcattgtgtactatttacctgtaatgtgtatccttaagtctggtttgatggtgtctgaaacgttttgctgtggtagagcagcatggaagaactataatgaataagtgatccctaatcattgtgtccaaattttgcttctgctatacccttttgtgctgtttcttatgttttgcttaaaaatttgatctgacaaacaaatttgtctaaattatgctcttgttctgactgtgtactgtacacatttgtattgctaccggtttggcacatagttttctctttgattgcagatcaaacccttctgattgcagattgcttggctatggctgatgtgctcactgttcttctttagcttgtatattgctgatggtggcttggctacggctgaaaaagttgctgctgcgccgacttggcaactgttgctccagtaatgctttgtcctctcttcctagccgccgacttggcacttggcagctgttgctcctgtaatgcgttgttatctcttatctcttgagatgtactatgattttgaggctgtttgacttgtgccagattgccagtgctgatgctatattatctcaggtttttatgctagtatatgttttactgtgtgctgcctgtgtcgagttacgtaatctattgaaccgctatgcgtgttgatgccctgttgttgcttgccagattgatgcccctgttgcttgcagcttgcaagctgtagtgaaatcctaaaattcgaaaccaaatctattctgaacttttgaagatctgtgatgtccggaagaaaagattcaaacagataaacgggactctccagaatctataaaataaatgatcgacaaacgctttgctttggtaggcttcctagttagttagcggaccgaagcttcggtccgggcctagaaggccagcttcggccgcccctcggtaccctgggatctgcccttactttaacgcctctaaccaacacccctttatctttataaggaacaataaacagaatttgccccactgttctaaatcacctaataatatccccagctaaaaacaataaaggtttcctagaattaagacaagcatgactgttcctccaggagggtttggaacattgttgcagtcttgcagatacgggcgaagggtgagaaacagagcggagggctggaggtgacctcggtagtcgacgccggagttgagcttgacaacgacggggcggcccctgatggacttgaggaagtccgatggcgtcttcaccgtcccgccggcgcccgaggcgggcctgtcgctgccgccgccgccgctgctcatcttgcgcgctgtgcccccggcggtgtccctgtgttgcggatcgcgggtgggccaggtggatgcgagggcgacccgtttggactccggccggagccgccggatccctggtcggtgtcagtgccgtttactctgggccccacgtgtcagtaccgtctgtagatgacaacaacccgtcgtccacagtcatgtccaaaatatcctttcttcttttttttcgattcggatatctatcttccttttttttttccaaaaatcttcttgacgcaccagcgcgcacgtttgtggtaaacgccgacacgtcggtcccacgtcgatagaccccacccaccagtgagtagcgtgtacgtattcgggggtgacggacgtgtcgccgtcgtcttgctagtcccattcccatctgagccacacatctctgaacaaaaaaaaggagggaggcctccacgcacatccccctccgtgccacccgccccaaaccctcgcgccgcctccgagacagccgccgcaaccatggccaccgccgccgccgcgtctaccgcgctcactggcgccactaccgctgcgcccaaggcgaggcgccgggcgcacctcctggccacccgccgcgccctcgccgcgcccatcaggtgctcagcggcgtcacccgccatgccgatggctcccccggccaccccgctccggccgtggggccccaccgagccccgcaagggtgctgacatcctcgtcgagtccctcgagcgctgcggcgtccgcgacgtcttcgcctaccccggcggcgcgtccatggagatccaccaggcactcacccgctcccccgtcatcgccaaccacctcttccgccacgagcaaggggaggcctttgccgcctccggctacgcgcgctcctcgggccgcgtcggcgtctgcatcgccacctccggccccggcgccaccaacctagtctccgcgctcgccgacgcgctgctcgattccgtccccatggtcgccatcacgggacaggtggcgcgacgcatgattggcaccgacgccttccaggagacgcccatcgtcgaggtcacccgctccatcaccaagcacaactacctggtcctcgacgtcgacgacatcccccgcgtcgtgcaggaggctttcttcctcgcctcctctggtcgaccagggccggtgcttgtcgacatccccaaggacatccagcagcagatggcggtgcctgtctgggacaagcccatgagtctgcctgggtacattgcgcgccttcccaagccccctgcgactgagttgcttgagcaggtgctgcgtcttgttggtgaatcgcggcgccctgttctttatgtgggcggtggctgcgcagcatctggtgaggagttgcgacgctttgtggagctgactggaatcccggtcacaactactcttatgggcctcggcaacttccccagcgacgacccactgtctctgcgcatgctaggtatgcatgggacggtgtatgcaaattatgcagtggataaggccgatctgttgcttgcacttggtgtgcggtttgatgatcgcgtgacagggaagattgaggcttttgcaagcagggctaagattgtgcacgttgatattgatccggctgagattggcaagaacaagcagccacatgtgtccatctgtgcagatgttaagcttgctttgcagggcatgaatgctcttcttgaaggaagcacatcaaagaagagctttgactttggctcatggaacgatgagttggatcagcagaagagggaattcccccttgggtataaaacatctaatgaggagatccagccacaatatgctattcaggttcttgatgagctgacgaaaggcgaggccatcatcggcacaggtgttgggcagcaccagatgtgggcggcacagtactacacttacaagcggccaaggcagtggttgtcttcagctggtcttggggctatgggatttggtttgccggctgctgctggtgcttctgtggcaaacccaggtgtcactgttgttgacatcgatggagatggtagctttctcatgaacgttcaggagctagctatgatccgaattgagaacctcccagtgaaggtctttgtgctaaacaaccagcacctggggatggtggtgcagttggaggacaggttctataaggccaacagagcgcacacatacttgggaaacccagagaatgaaagtgagatatatccagatttcgtgacgatcgccaaagggttcaacattccagcggtccgtgtgacaaagaagaacgaagtccgcgcagcgataaagaagatgctcgagactccagggccgtacctcttggatataatcgtcccacaccaggagcatgtgttgcctatgatccctagtggtggggctttcaaggatatgatcctggatggtgatggcaggactgtgtactgactagctagtcagttaacagatcctctagtgccgtgggtcgtttaagctgccgctgtacctgtgtcgtctggtgccttctggtgtacctgggaggttgtcgtctatcaagtatctgtggttggtgtcatgagtcagtgagtcccaatactgttcgtgtcctgtgtgcattatacccaaaactgttatgggcaaatcatgaataagcttgatgttcgaacttaaaagtctctgctcaatatggtattatggttgtttttgttcgtctcctaatatttgcctgggatcaaattttattggctggtgttcatttgacctccatgttcttgctaggctccattttttactctacagccataatatgtttgattgtttggtttgttctttgttgtacacctggttctgtcgagcttagttttcgacactggcttacagcttaacatgttgctattttattgggttctgattgctattttattgggttctgattgctagtttttgctgaatccaaaaaccatgttatttatttaagcgatccaggttattattatgatggtggctaagtttttttttttccaagggtaaattttctggattctccagtgtttctgtggccgaattcaatcactagagtcgacctgcaggccggtccgggcctagaaggcccgcgccacttacgcttgattccgatgacttcgtaggttcctagctcaagccgctcgtgtccaagcgtcacttacgattagctaatgattacggcatctaggaccgactagttcttatgtgcttctagtctccaaatgtggttgatagttattttgctctaagatcaacagtaatgaagtataaatcatcgttgtggtgtgctactcggttaattgagcattaacacacacaaacatgacgaggatggtataatctccaaaaatgtgtactttgttaggtgggaccctatagccttgattaatgtgctatgttaggcatgcctggaaacgtgtgacgcatatgttttgtgaacctgttgatattatatgtgcttttatattaccatattttattaaaatactaatatttattactagtaagatataacattctatctagcttaaaaactaaccataaatattccataataactagatttaccaaactaatatactaaatatacataataaatacaaaattaacaagacaataatcaatatttatgagcttaatatatttagacattatggttggtcgacgataatcatgctaacttttcgtaattgcttgattgaaatatgcttagaataatgcctctttgttctacatggcaaatagggaccattatggtgtaacaccctgggaaccacaaacaccccgaaatgctactaaactacacaactaaccttcatatataaaatttcgacagcatctcctttgaaaatttgcatagacgtggaagcaacagagtataaacagatctgcgtttaaacgtgcaagcgctactagacaattcagtacattaaaaacgtccgcaatgtgttattaagttgtctaagcgtcaatttgtttacaccacaatatatcctgcca

SEQ ID NO: 252 - DNA, 21556 bp, synthetic construct
  misc_feature 1..21556: note = PHP97449
  source 1..21556: mol_type = other DNA
gtttacccgccaatatatcctgtcaaacactgcggccgcacttgaccgcggatggagccggagctgtggtgaggccatcgacgggaggtgggggagaacacagtctcagtgttctttgtgagtccgcaaggtttttagcttttctgtattaattaaggttgctgttggctgtagaatacggtcgtggaagagctgtatcggtagctactacgtaagctattatatactggaagtctggagctcgtcgatctccggtcgtcttcctccatttctcctcgtcttgctttgactgctgctaccatttgcttctgttttctgatgaagcatgccatgtcggccaccagtgtttgtgtggtttttgcagggaatggctttcaagtgctgtgattgaatggccctcgtcgtcctcggctgagctcacatggacgcgtcatgtgagtgagatatatgatcatatgatgagtggggttcgggtgagtgcgtacttgaagtaggatcccgctttcactcattcattcattggcctttaaaccgggaaattttcgcgaggagatggagggaagcaagcagggtgacgagtgcagagtgccgcgagcgctttgtcaaaaggcaccgccgtaggcaaaaaaatcaatggccctgactgactcgatggtagtactactgtagagactagagagggttgctccccatatcttcgtgtgacttttactccagcattgcatttccgtcattgagacgttaattaatagcagctttcgggacagatgactgtggccatgtttcgtcacggccgcttcgtgccagctgggggtactatagtactgtgattttgttagtaaaaactttcattaggccaccattgacgaccgggccttcgcttttgctgcgctaattaaccatttcccggcgaccgaagggaacatgaacatgccccgacacatgagggcatgaggactagtgttctccctgtcgttcgttgacttgactagtgatagtttaaacgctcttcaactggaagagcggttactaccggttcactagctagctgctaatcgagctagttaccctatgaggtgacatgaagcgctcacggttactatgacggttagcttcacgactgttggtggcagtagcgtacgacttagctatagttccggacttacctagctaataacttcgtatagcatacattatacgaagttatggttaccgaattcgagctcggtaccctggcggaccgaagcttgcatgcctgcagtgcagcgtgacccggtcgtgcccctctctagagataatgagcattgcatgtctaagttataaaaaattaccacatattttttttgtcacacttgtttgaagtgcagtttatctatctttatacatatatttaaactttactctacgaataatataatctatagtactacaataatatcagtgttttagagaatcatataaatgaacagttagacatggtctaaaggacaattgagtattttgacaacaggactctacagttttatctttttagtgtgcatgtgttctcctttttttttgcaaatagcttcacctatataatacttcatccattttattagtacatccatttagggtttagggttaatggtttttatagactaatttttttagtacatctattttattctattttagcctctaaattaagaaaactaaaactctattttagtttttttatttaataatttagatataaaatagaataaaataaagtgactaaaaattaaacaaataccctttaagaaattaaaaaaactaaggaaacatttttcttgtttcgagtagataatgccagcctgttaaacgccgtcgacgagtctaacggacaccaaccagcgaaccagcagcgtcgcgtcgggccaagcgaagcagacggcacggcatctctgtcgctgcctctggacccctctcgagagttccgctccaccgttggacttgctccgctgtcggcatccagaaattgcgtggcggagcggcagacgtgagccggcacggcaggcggcctcctcctcctctcacggcaccggcagctacgggggattcctttcccaccgctccttcgctttcccttcctcgcccgccgtaataaatagacaccccctccacaccctctttccccaacctcgtgttgttcggagcgcacacacacacaaccagatccgcccatggcggccaatgcgggcggcggtggagcgggaggaggcagcggcagcggcagcgtggctgcgccggcggtgtgccgccccagcggctcgcggtggacgccgacgccggagcagatcaggatgctgaaggagctctactacggctgcggcatccggtcgcccagctcggagcagatccagcgcatcaccgccatgctgcggcagcacggcaagatcgagggcaagaacgtcttctactggttccagaaccacaaggcccgcgagcgccagaagcgccgcctcaccagcctcgacgtcaacgtgcccgccgccggcgcggccgacgccaccaccagccaactcggcgtcctctcgctgtcgtcgccgccgccttcaggcgcggcgcctccctcgcccaccctcggcttctacgccgccggcaatggcggcggatcggctgtgctgctggacacgagttccgactggggcagcagcggcgctgctatggccaccgagacatgcttcctgcaggactacatgggcgtgacggacacgggcagctcgtcgcagtggccacgcttctcgtcgtcggacacgataatggcggcggccgcggcgcgggcggcgacgacgcgggcgcccgagacgctccctctcttcccgacctgcggcgacgacggcggcagcggtagcagcagctacttgccgttctggggtgccgcgtccacaactgccggcgccacttcttccgttgcgatccaacagcaacaccagctgcaggagcagtacagcttttacagcaacagcaacagcacccagctggccggcaccggcaaccaagacgtatcggcaacagcagcagcagccgccgccctggagctgagcctcagctcatggtgctccccttaccctgctgcagggagtatgtgagagcaacgcgagctgccactgctcttcactgatgtctctggaatggaaggaggaggaagtgagaacagatcattcgacaaagcagcattagtccgttgatcggtggaagaccactcgtcagtgttgagttgaatgtttgatcaataaaatacggcaatgctgtaagggttgttttttatgccattgataatacactgtactgttcagttgttgaactctatttcttagccatgccaagtgcttttcttattttgaataacattacagcaaaaagttgaaagacaaaaaaaaaaacccccgaacagagtgctttgggtcccaagcttctttagactgtgttcggcgttccccctaaatttctccccctatatctcactcacttgtcacatcagcgttctctttccccctatatctccacgctctacagcagttccacctatatcaaacctctataccccaccacaacaatattatatactttcatcttcaactaactcatgtaccttccaatttttttctactaataattatttacgtgcacagaaacttagcaaggagagagagagcgggaatttaaatgctcggcgttaggcttttagtccgctaggtggctagaccgaggttaggacgctagttcactaggggcctagtggtgttttaagacgtcacggtcaccacgcgtggaccgaagcttgcatgcctgcagtgcagcgtgacccggtcgtgcccctctctagagataatgagcattgcatgtctaagttataaaaaattaccacatattttttttgtcacacttgtttgaagtgcagtttatctatctttatacatatatttaaactttactctacgaataatataatctatagtactacaataatatcagtgttttagagaatcatataaatgaacagttagacatggtctaaaggacaattgagtattttgacaacaggactctacagttttatctttttagtgtgcatgtgttctcctttttttttgcaaatagcttcacctatataatacttcatccattttattagtacatccatttagggtttagggttaatggtttttatagactaatttttttagtacatctattttattctattttagcctctaaattaagaaaactaaaactctattttagtttttttatttaataatttagatataaaatagaataaaataaagtgactaaaaattaaacaaataccctttaagaaattaaaaaaactaaggaaacatttttcttgtttcgagtagataatgccagcctgttaaacgccgtcgacgagtctaacggacaccaaccagcgaaccagcagcgtcgcgtcgggccaagcgaagcagacggcacggcatctctgtcgctgcctctggacccctctcgagagttccgctccaccgttggacttgctccgctgtcggcatccagaaattgcgtggcggagcggcagacgtgagccggcacggcaggcggcctcctcctcctctcacggcaccggcagctacgggggattcctttcccaccgctccttcgcacgtaagcgcttacgcaccgaacaacgtaagcgcttacgcaccgaacaacgtaagcgcttacgctttcccttcctcgcccgccgtaataaatagacaccccctccacaccctctttccccaacctcgtgttgttcggagcgcacacacacacaaccagatctcccccaaatccacccgtcggcacctccgcttcaaggtacgccgctcgtcctcccccccccccctctctaccttctctagatcggcgttccggtccatgcatggttagggcccggtagttctacttctgttcatgtttgtgttagatccgtgtttgtgttagatccgtgctgctagcgttcgtacacggatgcgacctgtacgtcagacacgttctgattgctaacttgccagtgtttctctttggggaatcctgggatggctctagccgttccgcagacgggatcgatttcatgattttttttgtttcgttgcatagggtttggtttgcccttttcctttatttcaatatatgccgtgcacttgtttgtcgggtcatcttttcatgcttttttttgtcttggttgtgatgatgtggtctggttgggcggtcgttctagatcggagtagaattctgtttcaaactacctggtggatttattaattttggatctgtatgtgtgtgccatacatattcatagttacgaattgaagatgatggatggaaatatcgatctaggataggtatacatgttgatgcgggttttactgatgcatatacagagatgctttttgttcgcttggttgtgatgatgtggtgtggttgggcggtcgttcattcgttctagatcggagtagaatactgtttcaaactacctggtgtatttattaattttggaactgtatgtgtgtgtcatacatcttcatagttacgagtttaagatggatggaaatatcgatctaggataggtatacatgttgatgtgggttttactgatgcatatacatgatggcatatgcagcatctattcatatgctctaaccttgagtacctatctattataataaacaagtatgttttataattattttgatcttgatatacttggatgatggcatatgcagcagctatatgtggatttttttagccctgccttcatacgctatttatttgcttggtactgtttcttttgtcgatgctcaccctgttgtttggtgttacttctgcaggtcgactttaacttagcctaggatccatggccactgtgaacaactggctcgctttctccctctccccgcaggagctgccgccctcccagacgacggactccacactcatctcggccgccaccgccgaccatgtctccggcgatgtctgcttcaacatcccccaagattggagcatgaggggatcagagctttcggcgctcgtcgcggagccgaagctggaggacttcctcggcggcatctccttctccgagcagcatcacaaggccaactgcaacatgatacccagcactagcagcacagtttgctacgcgagctcaggtgctagcaccggctaccatcaccagctgtaccaccagcccaccagctcagcgctccacttcgcggactccgtaatggtggcttcctcggccggtgtccacgacggcggtgccatgctcagcgcggccgccgctaacggtgtcgctggcgctgccagtgccaacggcggcggcatcgggctgtccatgattaagaactggctgcggagccaaccggcgcccatgcagccgagggtggcggcggctgagggcgcgcaggggctctctttgtccatgaacatggcggggacgacccaaggcgctgctggcatgccacttctcgctggagagcgcgcacgggcgcccgagagtgtatcgacgtcagcacagggtggagccgtcgtcgtcacggcgccgaaggaggatagcggtggcagcggtgttgccggcgctctagtagccgtgagcacggacacgggtggcagcggcggcgcgtcggctgacaacacggcaaggaagacggtggacacgttcgggcagcgcacgtcgatttaccgtggcgtgacaaggcatagatggactgggagatatgaggcacatctttgggataacagttgcagaagggaagggcaaactcgtaagggtcgtcaagtctatttaggtggctatgataaagaggagaaagctgctagggcttatgatcttgctgctctgaagtactggggtgccacaacaacaacaaattttccagtgagtaactacgaaaaggagctcgaggacatgaagcacatgacaaggcaggagtttgtagcgtctctgagaaggaagagcagtggtttctccagaggtgcatccatttacaggggagtgactaggcatcaccaacatggaagatggcaagcacggattggacgagttgcagggaacaaggatctttacttgggcaccttcagcacccaggaggaggcagcggaggcgtacgacatcgcggcgatcaagttccgcggcctcaacgccgtcaccaacttcgacatgagccgctacgacgtgaagagcatcctggacagcagcgccctccccatcggcagcgccgccaagcgcctcaaggaggccgaggccgcagcgtccgcgcagcaccaccacgccggcgtggtgagctacgacgtcggccgcatcgcctcgcagctcggcgacggcggagccctggcggcggcgtacggcgcgcactaccacggcgccgcctggccgaccatcgcgttccagccgggcgccgccagcacaggcctgtaccacccgtacgcgcagcagccaatgcgcggcggcgggtggtgcaagcaggagcaggaccacgcggtgatcgcggccgcgcacagcctgcaggacctccaccacctgaacctgggcgcggccggcgcgcacgactttttctcggcagggcagcaggccgccgccgctgcgatgcacggcctgggtagcatcgacagtgcgtcgctcgagcacagcaccggctccaactccgtcgtctacaacggcggggtcggcgacagcaacggcgccagcgccgtcggcggcagtggcggtggctacatgatgccgatgagcgctgccggagcaaccactacatcggcaatggtgagccacgagcaggtgcatgcacgggcctacgacgaagccaagcaggctgctcagatggggtacgagagctacctggtgaacgcggagaacaatggtggcggaaggatgtctgcatgggggactgtcgtgtctgcagccgcggcggcagcagcaagcagcaacgacaacatggccgccgacgtcgggcatggcggcgcgcagctcttcagtgtctggaacgacacttaagcgtacctagtggtacctgacatcttatagtctgcaacctctcgtgtctgaattcctatctttatcaagtgttattgcttccacgactataggacagctttcgtcgaaagcttttgctcatgtgatctcgaaggattcatctagtctgatttttcgtgacttgtatcggttttattggattcatccaacatatatcaataaaaaatgagttgtgtttcctttcttcctagttcagttaaaattatttccctcctgcgcttgtgctgtaattgtctgtgtacctgttgtttgtgactgtgttagttcccttggatatgatttcgtatttgatatgtacatggagatagcttagcttcattattggagtatgaagttagtatgacatagtcactctcctggaaaattgacactgcaaaccatatttttattctgaaccacaaatcctagtcagtccgctggcatatgccgtccgtttgctgaatccagaacgtgggtttggagatgtacggctgagatgcctctatgcgaaggggatttcgtggtgaaacgagatgggagtagagcaacgcccgtggaagatgcttcaaacttccacacttttgagcaacgatcggcagtagtaaggtagacgatttcaagatcaaagcatatgaagataaacaacatcaacaacaaaatttgttggggttctatagagagaaacagagctacatacatacactgttttgtatctaccatctgagatgatgaaaagatgaaaaactaaagaatgccccggcgccaacgccaggacacgccgcgcgcgcgtcacccgagccatctcttgacccagccggcgctgtatatttacacacgttgcagcatcgatcaccacctgttcgatcgcgtcgccgtcaccggcgcgccgcgacttattgaactagtctagggcgcggctaacaacctagcttagattgccttgtctaaacccttaaggctaacgcgccactctagattcttatgtgcttctagtctccaaatgtggttgatagttattttgctctaagatcaacagtaatgaagtataaatcatcgttgtggtgtgctactcggttaattgagcattaacacacacaaacatgacgaggatggtataatctccaaaaatgtgtactttgttaggtgggaccctatagccttgattaatgtgctatgttaggcatgcctggaaacgtgtgacgcatatgttttgtgaacctgttgatattatatgtgcttttatattaccatattttattaaaatactaatatttattactagtaagatataacattctatctagcttaaaaactaaccataaatattccataataactagatttaccaaactaatatactaaatatacataataaatacaaaattaacaagacaataatcaatatttatgagcttaatatatttagacattatggttggtcgacgataatcatgctaacttttcgtaattgcttgattgaaatatgcttagaataatgcctctttgttctacatggcaaatagggaccattatggtgtaacaccctgggaaccacaaacaccccgaaatgctactaaactacacaactaaccttcatatataaaatttcgacagcatctcctttgaaaatttgcatagacgtggaagcaacagagtataaacagatatcatgataagaaaacatactagacattaataatctgctagaaatgggaagaatcgagctcggtaccctggttcacaaactcaatacaacacacagtggagtagggtattacgctccggcggcccgaaccactctaaatccttgtgtcctcgtgtgctcttccaccattaatgactgtaattgcagggacacgaagagttgtagcgcttttgccaacaagatccgctatatgctagtagagtggaacctgcacagcaacaagcatccaataatctgagaataagaattatgtgtggtgatggttctcatctctgcaactcgccattttcgcgagagaaccaaatccaagttggtgaagatcatgatttgggctcatgggctggcatagtagctattacctttgcaattgtggttcgaatctatccgatattctccttttcagggagagctaatgcttatgcttattgggtattttggtttgacactgcttcacgcccaaaaaaaggcaactatgtctgagttggatatggcccaaaaaaaggcagctatgtctgagttggatatggaagtcttctttcgtttagggtgaagtaagaccaagctcatgagcttattatcttaggtcggaacaaattagttgataggcatggcacatttatcaaattataatgattttaacagaaaagcaacacctctttttcagcagcaccagctttgcaagctgcaattgacactccaagcatagtatttgctccaaactcagcctgcatttcgcacaatatcatatctatttccatttggataaaatatattttccagaaatatgggaacagaatcaagatacagaaaaaagttgtggtagtagtggtaagtggaaacacaagtacagtgaaaagatagcattatttctgaacagtcaaattaaccgaaataagtagtatcacatactgcccctaaattgactacacccaatgtaaagaattgcttgagcatattgagccatcagttgtttgtttgtgtaacggatttgacaatgcagagttcaggagcaaaaaaccgcaaaggagagaaagagggaaaggatctcctagtatcccaccttgtggcgcgccctgtcaagtgcatgatggcctggtcgatctgcgtctgctgctgcggttccatcccaacgagtgcctccgacaccttgtcgttgatcacccgcaccgcgtaggcgacccccctggcgaggaacttccgcctctcggaggccccggccgcgtcggcggcggcgccctcgagcgcgcccacgctagccgtagatgctcggtgcacggccttgttggtgtgcaactcgacctcaacggccggtgcgctacgcccgtcaaggatctggcgcgcccgcaccctcgtgatcacggtgggcgcctcccgcctcatgtggccgacgatgaaaagcgccgggttaggggccttggcgcgcaccgccgtattcagggcctcctcgctcttgcgcgagagcaggtgcttccccaggtactcctgcactgacaaggctgccacagcggtggaatttgtcctcacgacttcgccacgtcgtcctcacctccctggcttcccacgactccgccgtatcgaggtgctcggtgggtcgtcttaatccgaagtccgaactaggaagacgagacagagaggtctgaggaatgggcctcgtttgatgttgagctgaattatttttccagcataagcccaggtcttggtccatgaacaaaattactagaaacccagcccagtactacgatctaaaagagggactgccactggatagctctctctagcattctccacgctccaatacagcggcgtcgtgtctatccgggtctatccgcgaacacgtgagaactctccagaaactgctttctcctccacttcatctctctcgctttccctctataaaaagaccccttctaggaattgagggagacagcaagcaccaagcagcgatccgaagctcaatcaattcactcaaacctcttccccaaatcttcgattagatcttcgttgacaagaagactagaaccgaacctgacatgtccaacctgctcacggttcaccagaaccttccggctcttccagtggacgcgacgtccgatgaagtcaggaagaacctcatggacatgttccgcgacaggcaagcgttcagcgagcacacctggaagatgctgctctccgtctgccgctcctgggctgcatggtgcaagctgaacaacaggaagtggttccccgctgagcccgaggacgtgagggattaccttctgtacctgcaagcgcgaggtttgtttctgcttctacctttgatatatatataataattatcattaattagtagtaatataatatttcaaatatttttttcaaaataaaagaatgtagtatatagcaattgcttttctgtagtttataagtgtgtatattttaatttataacttttctaatatatgaccaaaacatggtgatgcctaggtctggcagtgaagaccatccagcaacaccttggacaactgaacatgcttcacaggcgctccggcctcccgcgccccagcgactcgaacgccgtgagcctcgtcatgcgccgcatcaggaaggaaaacgtcgatgccggcgaaagggcaaagcaggccctcgcgttcgagaggaccgatttcgaccaggtccgcagcctgatggagaacagcgacaggtgccaggacattaggaacctggcgttcctcggaattgcatacaacacgctcctcaggatcgcggaaattgcccgcattcgcgtgaaggacattagccgcaccgacggcggcaggatgcttatccacattggcaggaccaagacgctcgtttccaccgcaggcgtcgaaaaggccctcagcctcggagtgaccaagctcgtcgaacgctggatctccgtgtccggcgtcgcggacgacccaaacaactacctcttctgccgcgtccgcaagaacggggtggctgcccctagcgccaccagccaactcagcacgagggccttggaaggtattttcgaggccacccaccgcctgatctacggcgcgaaggatgacagcggtcaacgctacctcgcatggtccgggcactccgcccgcgttggagctgctagggacatggcccgcgccggtgtttccatccccgaaatcatgcaggcgggtggatggacgaacgtgaacattgtcatgaactacattcgcaaccttgacagcgagacgggcgcaatggttcgcctcctggaagatggtgactgaggtacccaacctagacttgtccatcttctggattggccaacttaattaatgtatgaaataaaaggatgcacacatagtgacatgctaatcactataatgtgggcatcaaagttgtgtgttatgtgtaattactagttatctgaataaaagagaaagagatcatccatatttcttatcctaaatgaatgtcacgtgtctttataattctttgatgaaccagatgcatttcattaaccaaatccatatacatataaatattaatcatatataattaatatcaattgggttagcaaaacaaatctagtctaggtgtgttttgcgatccgatatcgacgtctaaaaacggcccctaactaacgcttagttgcccgctagattagtcccccgttagtgcctagttagacacacgacgaactaggggctagccccgggataacttcgtatagcatacattatacgaagttatgaattccggaccgggttaccgaattcctgcccttaaggccaattgttcaagattcattcaacaattgaaacatctcccatgattaaatcagtataaggttgctatggtcttgcttgacaaagtttttttttgagggaatttcaactaaatttttgagtgaaactatcaaatactgattttaaaaaatttttataaaaggaagcgcagagataaaaggccatctatgctacaaaagtacccaaaaatgtaatcctaaagtatgaattgcattttttttttgtttggacgaaaggaaaggagtattaccacaagaatgatatcatcttcatatttagatcttttttgggtaaagcttgagattctctaaatatagagaaatcagaagaaaaaaaaaccgtgttttggtggttttgatttctagcctccacaataactttgacggcgtcgacaagtctaacggacaccaagcagcgaaccaccagcgccgagccaagcgaagcagacggccgagacgttgacaccttcggcgcggcatctctcgagagttccgctccggcgctccacctccaccgctggcggtttcttattccgttccgttccgcctcctgctctgctcctctccacaccacacggcacgaaaccgttacggcaccggcagcacccagcacgggagaggggattcctttcccaccgttccttccctttccgccccgccgctataaatagccagccccatccccagcttttttccccaatctcatctcctctctcctgttgttcggagcacacgcacaatccgatcgatccccaaatccccttcgtctctcctcgcgagcctcgtggatcccagcttcaaggtacggcgatcgatcatcccccctccttctctctaccttcttttctctagactacatcggatggcgatccatggttagggcctgctagtttcccttcctgttttgtcgatggctgcgaggcacaatagatctgatggcgttatgacggctaacttgtcatgttgttgcgatttatagtccctttaggagatcagtttaatttctcggatggttcgagatcggtggtccatggttagtaccctaagatccgcgctgttagggttcgtagatggaggcgacctgttctgattgttaacttgtcagtacctgggaaatcctgggatggttctagctcgtccgcagatgagatcgatttcatgatcctctgtatcttgtttcgttgcctaggttccgtctaatctatccgtggtatgatgtagatgttttgatcgtgctaactacgtcttgtaaagttaattgtcaggtcataatttttagcatgcctttttttttgtttggttttgtctaattgggctgtcgttctagatcagagtagaagactgttccaaactacctgctggatttattgaacttggatctgtatgtgtgtcacatatcttcataaattcatgattaagatggattgaaatatcttttatctttttggtatggatagttctatatgttggtgtggctttgttagatgtatacatgcttagatacatgaagcaacgtgctgctactgtttagtaattgctgttcatttgtctaataaacagataaggatatgtatttatgttgctgttggttttgctggtactttgttggatacaaatgcttcaatacagaaaacagcatgctgctacgatttaccatttatctaatcttatcatatgtctaatctaataaacaaacatgcttttaaattatcttcatatgcttggatgatggcatacacagcggctatgtgtggttttttaaatacccagcatcatgggcatgcatgacactgctttaatatgctttttatttgcttgagactgtttcttttgtttatactgaccctttagttcggtgactcttctgcaggtcgactttaacttagcctaggatccatggcccagtccaagcacggcctgaccaaggagatgaccatgaagtaccgcatggagggctgcgtggacggccacaagttcgtgatcaccggcgagggcatcggctaccccttcaagggcaagcaggccatcaacctgtgcgtggtggagggcggccccttgcccttcgccgaggacatcttgtccgccgccttcatgtacggcaaccgcgtgttcaccgagtacccccaggacatcgtcgactacttcaagaactcctgccccgccggctacacctgggaccgctccttcctgttcgaggacggcgccgtgtgcatctgcaacgccgacatcaccgtgagcgtggaggagaactgcatgtaccacgagtccaagttctacggcgtgaacttccccgccgacggccccgtgatgaagaagatgaccgacaactgggagccctcctgcgagaagatcatccccgtgcccaagcagggcatcttgaagggcgacgtgagcatgtacctgctgctgaaggacggtggccgcttgcgctgccagttcgacaccgtgtacaaggccaagtccgtgccccgcaagatgcccgactggcacttcatccagcacaagctgacccgcgaggaccgcagcgacgccaagaaccagaagtggcacctgaccgagcacgccatcgcctccggctccgccttgccctccggactcagatctcgatagggtaccaatggccagttaacagatccagctgctgctgttctagggttcacaagtctgcctatttgtcttccccaatggagctatggttgtctggtctggtccttggtcgtgtcccgtttcattgtgtactatttacctgtaatgtgtatccttaagtctggtttgatggtgtctgaaacgttttgctgtggtagagcagcatggaagaactataatgaataagtgatccctaatcattgtgtccaaattttgcttctgctatacccttttgtgctgtttcttatgttttgcttaaaaatttgatctgacaaacaaatttgtctaaattatgctcttgttctgactgtgtactgtacacatttgtattgctaccggtttggcacatagttttctctttgattgcagatcaaacccttctgattgcagattgcttggctatggctgatgtgctcactgttcttctttagcttgtatattgctgatggtggcttggctacggctgaaaaagttgctgctgcgccgacttggcaactgttgctccagtaatgctttgtcctctcttcctagccgccgacttggcacttggcagctgttgctcctgtaatgcgttgttatctcttatctcttgagatgtactatgattttgaggctgtttgacttgtgccagattgccagtgctgatgctatattatctcaggtttttatgctagtatatgttttactgtgtgctgcctgtgtcgagttacgtaatctattgaaccgctatgcgtgttgatgccctgttgttgcttgccagattgatgcccctgttgcttgcagcttgcaagctgtagtgaaatcctaaaattcgaaaccaaatctattctgaacttttgaagatctgtgatgtccggaagaaaagattcaaacagataaacgggactctccagaatctataaaataaatgatcgacaaacgctttgctttggtaggcttcctagttagttagcggaccgaagcttcggtccgggcctagaaggccagcttcggccgcccctcggtaccctgggatctgcccttactttaacgcctctaaccaacacccctttatctttataaggaacaataaacagaatttgccccactgttctaaatcacctaataatatccccagctaaaaacaataaaggtttcctagaattaagacaagcatgactgttcctccaggagggtttggaacattgttgcagtcttgcagatacgggcgaagggtgagaaacagagcggagggctggaggtgacctcggtagtcgacgccggagttgagcttgacaacgacggggcggcccctgatggacttgaggaagtccgatggcgtcttcaccgtcccgccggcgcccgaggcgggcctgtcgctgccgccgccgccgctgctcatcttgcgcgctgtgcccccggcggtgtccctgtgttgcggatcgcgggtgggccaggtggatgcgagggcgacccgtttggactccggccggagccgccggatccctggtcggtgtcagtgccgtttactctgggccccacgtgtcagtaccgtctgtagatgacaacaacccgtcgtccacagtcatgtccaaaatatcctttcttcttttttttcgattcggatatctatcttccttttttttttccaaaaatcttcttgacgcaccagcgcgcacgtttgtggtaaacgccgacacgtcggtcccacgtcgatagaccccacccaccagtgagtagcgtgtacgtattcgggggtgacggacgtgtcgccgtcgtcttgctagtcccattcccatctgagccacacatctctgaacaaaaaaaaggagggaggcctccacgcacatccccctccgtgccacccgccccaaaccctcgcgccgcctccgagacagccgccgcaaccatggccaccgccgccgccgcgtctaccgcgctcactggcgccactaccgctgcgcccaaggcgaggcgccgggcgcacctcctggccacccgccgcgccctcgccgcgcccatcaggtgctcagcggcgtcacccgccatgccgatggctcccccggccaccccgctccggccgtggggccccaccgagccccgcaagggtgctgacatcctcgtcgagtccctcgagcgctgcggcgtccgcgacgtcttcgcctaccccggcggcgcgtccatggagatccaccaggcactcacccgctcccccgtcatcgccaaccacctcttccgccacgagcaaggggaggcctttgccgcctccggctacgcgcgctcctcgggccgcgtcggcgtctgcatcgccacctccggccccggcgccaccaacctagtctccgcgctcgccgacgcgctgctcgattccgtccccatggtcgccatcacgggacaggtggcgcgacgcatgattggcaccgacgccttccaggagacgcccatcgtcgaggtcacccgctccatcaccaagcacaactacctggtcctcgacgtcgacgacatcccccgcgtcgtgcaggaggctttcttcctcgcctcctctggtcgaccagggccggtgcttgtcgacatccccaaggacatccagcagcagatggcggtgcctgtctgggacaagcccatgagtctgcctgggtacattgcgcgccttcccaagccccctgcgactgagttgcttgagcaggtgctgcgtcttgttggtgaatcgcggcgccctgttctttatgtgggcggtggctgcgcagcatctggtgaggagttgcgacgctttgtggagctgactggaatcccggtcacaactactcttatgggcctcggcaacttccccagcgacgacccactgtctctgcgcatgctaggtatgcatgggacggtgtatgcaaattatgcagtggataaggccgatctgttgcttgcacttggtgtgcggtttgatgatcgcgtgacagggaagattgaggcttttgcaagcagggctaagattgtgcacgttgatattgatccggctgagattggcaagaacaagcagccacatgtgtccatctgtgcagatgttaagcttgctttgcagggcatgaatgctcttcttgaaggaagcacatcaaagaagagctttgactttggctcatggaacgatgagttggatcagcagaagagggaattcccccttgggtataaaacatctaatgaggagatccagccacaatatgctattcaggttcttgatgagctgacgaaaggcgaggccatcatcggcacaggtgttgggcagcaccagatgtgggcggcacagtactacacttacaagcggccaaggcagtggttgtcttcagctggtcttggggctatgggatttggtttgccggctgctgctggtgcttctgtggcaaacccaggtgtcactgttgttgacatcgatggagatggtagctttctcatgaacgttcaggagctagctatgatccgaattgagaacctcccagtgaaggtctttgtgctaaacaaccagcacctggggatggtggtgcagttggaggacaggttctataaggccaacagagcgcacacatacttgggaaacccagagaatgaaagtgagatatatccagatttcgtgacgatcgccaaagggttcaacattccagcggtccgtgtgacaaagaagaacgaagtccgcgcagcgataaagaagatgctcgagactccagggccgtacctcttggatataatcgtcccacaccaggagcatgtgttgcctatgatccctagtggtggggctttcaaggatatgatcctggatggtgatggcaggactgtgtactgactagctagtcagttaacagatcctctagtgccgtgggtcgtttaagctgccgctgtacctgtgtcgtctggtgccttctggtgtacctgggaggttgtcgtctatcaagtatctgtggttggtgtcatgagtcagtgagtcccaatactgttcgtgtcctgtgtgcattatacccaaaactgttatgggcaaatcatgaataagcttgatgttcgaacttaaaagtctctgctcaatatggtattatggttgtttttgttcgtctcctaatatttgcctgggatcaaattttattggctggtgttcatttgacctccatgttcttgctaggctccattttttactctacagccataatatgtttgattgtttggtttgttctttgttgtacacctggttctgtcgagcttagttttcgacactggcttacagcttaacatgttgctattttattgggttctgattgctattttattgggttctgattgctagtttttgctgaatccaaaaaccatgttatttatttaagcgatccaggttattattatgatggtggctaagtttttttttttccaagggtaaattttctggattctccagtgtttctgtggccgaattcaatcactagagtcgacctgcaggccggtccgggcctagaaggcccgcgccacttacgcttgattccgatgacttcgtaggttcctagctcaagccgctcgtgtccaagcgtcacttacgattagctaatgattacggcatctaggaccgactagttcttatgtgcttctagtctccaaatgtggttgatagttattttgctctaagatcaacagtaatgaagtataaatcatcgttgtggtgtgctactcggttaattgagcattaacacacacaaacatgacgaggatggtataatctccaaaaatgtgtactttgttaggtgggaccctatagccttgattaatgtgctatgttaggcatgcctggaaacgtgtgacgcatatgttttgtgaacctgttgatattatatgtgcttttatattaccatattttattaaaatactaatatttattactagtaagatataacattctatctagcttaaaaactaaccataaatattccataataactagatttaccaaactaatatactaaatatacataataaatacaaaattaacaagacaataatcaatatttatgagcttaatatatttagacattatggttggtcgacgataatcatgctaacttttcgtaattgcttgattgaaatatgcttagaataatgcctctttgttctacatggcaaatagggaccattatggtgtaacaccctgggaaccacaaacaccccgaaatgctactaaactacacaactaaccttcatatataaaatttcgacagcatctcctttgaaaatttgcatagacgtggaagcaacagagtataaacagatctgcgtttaaacgtgcaagcgctactagacaattcagtacattaaaaacgtccgcaatgtgttattaagttgtctaagcgtcaatttgtttacaccacaatatatcctgcca

SEQ ID NO: 253 - DNA, 19703 bp, synthetic construct
  misc_feature 1..19703: note = PHP98680
  source 1..19703: mol_type = other DNA
gtttacccgccaatatatcctgtcaaacactgcggccgcacttgaccgcggatggagccggagctgtggtgaggccatcgacgggaggtgggggagaacacagtctcagtgttctttgtgagtccgcaaggtttttagcttttctgtattaattaaggttgctgttggctgtagaatacggtcgtggaagagctgtatcggtagctactacgtaagctattatatactggaagtctggagctcgtcgatctccggtcgtcttcctccatttctcctcgtcttgctttgactgctgctaccatttgcttctgttttctgatgaagcatgccatgtcggccaccagtgtttgtgtggtttttgcagggaatggctttcaagtgctgtgattgaatggccctcgtcgtcctcggctgagctcacatggacgcgtcatgtgagtgagatatatgatcatatgatgagtggggttcgggtgagtgcgtacttgaagtaggatcccgctttcactcattcattcattggcctttaaaccgggaaattttcgcgaggagatggagggaagcaagcagggtgacgagtgcagagtgccgcgagcgctttgtcaaaaggcaccgccgtaggcaaaaaaatcaatggccctgactgactcgatggtagtactactgtagagactagagagggttgctccccatatcttcgtgtgacttttactccagcattgcatttccgtcattgagacgttaattaatagcagctttcgggacagatgactgtggccatgtttcgtcacggccgcttcgtgccagctgggggtactatagtactgtgattttgttagtaaaaactttcattaggccaccattgacgaccgggccttcgcttttgctgcgctaattaaccatttcccggcgaccgaagggaacatgaacatgccccgacacatgagggcatgaggactagtgttctccctgtcgttcgttgacttgactagtgatagtttaaacgctcttcaactggaagagcggttactaccggttcactagctagctgctaatcgagctagttaccctatgaggtgacatgaagcgctcacggttactatgacggttagcttcacgactgttggtggcagtagcgtacgacttagctatagttccggacttacctagcatcgagcagctggcttgtggggaccagacaaaaaaggaatggtgcagaattgttaggcgcacctaccaaaagcatctttgcctttattgcaaagataaagcagattcctctagtacaagtggggaacaaaataacgtggaaaagagctgtcctgacagcccactcactaatgcgtatgacgaacgcagtgacgaccacaaaactcgagcaacgagatcatgagccaatcaaagaggagtgatgtagacctaaagcaataatggagccatgacgtaagggcttacgcccatacgaaataattaaaggctgatgtgacctgtcggtctctcagaacctttactttttatgtttggcgtgtatttttaaatttccacggcaatgacgatgtgaccgtcgacccactaaaacattgctttgtcaaaagctaaaaaagatgatgcccgacagccacttgtgtgaagcatgagaagccggtccctccactaagaaaattagtgaagcatcttccagtggtccctccactcacagctcaatcagtgagcaacaggacgaaggaaatgacgtaagccatgacgtctaatcccagggccagcttgcatgcctgcagtgcagcgtgacccggtcgtgcccctctctagagataatgagcattgcatgtctaagttataaaaaattaccacatattttttttgtcacacttgtttgaagtgcagtttatctatctttatacatatatttaaactttactctacgaataatataatctatagtactacaataatatcagtgttttagagaatcatataaatgaacagttagacatggtctaaaggacaattgagtattttgacaacaggactctacagttttatctttttagtgtgcatgtgttctcctttttttttgcaaatagcttcacctatataatacttcatccattttattagtacatccatttagggtttagggttaatggtttttatagactaatttttttagtacatctattttattctattttagcctctaaattaagaaaactaaaactctattttagtttttttatttaataatttagatataaaatagaataaaataaagtgactaaaaattaaacaaataccctttaagaaattaaaaaaactaaggaaacatttttcttgtttcgagtagataatgccagcctgttaaacgccgtcgacgagtctaacggacaccaaccagcgaaccagcagcgtcgcgtcgggccaagcgaagcagacggcacggcatctctgtcgctgcctctggacccctctcgagagttccgctccaccgttggacttgctccgctgtcggcatccagaaattgcgtggcggagcggcagacgtgagccggcacggcaggcggcctcctcctcctctcacggcaccggcagctacgggggattcctttcccaccgctccttcgctttcccttcctcgcccgccgtaataaatagacaccccctccacaccctctttccccaacctcgtgttgttcggagcgcacacacacacaaccagatctcccccaaatccacccgtcggcacctccgcttcaaggtacgccgctcgtcctcccccccccccctctctaccttctctagatcggcgttccggtccatgcatggttagggcccggtagttctacttctgttcatgtttgtgttagatccgtgtttgtgttagatccgtgctgctagcgttcgtacacggatgcgacctgtacgtcagacacgttctgattgctaacttgccagtgtttctctttggggaatcctgggatggctctagccgttccgcagacgggatcgatttcatgattttttttgtttcgttgcatagggtttggtttgcccttttcctttatttcaatatatgccgtgcacttgtttgtcgggtcatcttttcatgcttttttttgtcttggttgtgatgatgtggtctggttgggcggtcgttctagatcggagtagaattctgtttcaaactacctggtggatttattaattttggatctgtatgtgtgtgccatacatattcatagttacgaattgaagatgatggatggaaatatcgatctaggataggtatacatgttgatgcgggttttactgatgcatatacagagatgctttttgttcgcttggttgtgatgatgtggtgtggttgggcggtcgttcattcgttctagatcggagtagaatactgtttcaaactacctggtgtatttattaattttggaactgtatgtgtgtgtcatacatcttcatagttacgagtttaagatggatggaaatatcgatctaggataggtatacatgttgatgtgggttttactgatgcatatacatgatggcatatgcagcatctattcatatgctctaaccttgagtacctatctattataataaacaagtatgttttataattattttgatcttgatatacttggatgatggcatatgcagcagctatatgtggatttttttagccctgccttcatacgctatttatttgcttggtactgtttcttttgtcgatgctcaccctgttgtttggtgttacttctgcaggtcgactctagaggatcaattcgctagcataacttcgtatagcatacattatacgaagttatccagatccaccatggccactgtgaacaactggctcgctttctccctctccccgcaggagctgccgccctcccagacgacggactccacactcatctcggccgccaccgccgaccatgtctccggcgatgtctgcttcaacatcccccaagattggagcatgaggggatcagagctttcggcgctcgtcgcggagccgaagctggaggacttcctcggcggcatctccttctccgagcagcatcacaaggccaactgcaacatgatacccagcactagcagcacagtttgctacgcgagctcaggtgctagcaccggctaccatcaccagctgtaccaccagcccaccagctcagcgctccacttcgcggactccgtaatggtggcttcctcggccggtgtccacgacggcggtgccatgctcagcgcggccgccgctaacggtgtcgctggcgctgccagtgccaacggcggcggcatcgggctgtccatgattaagaactggctgcggagccaaccggcgcccatgcagccgagggtggcggcggctgagggcgcgcaggggctctctttgtccatgaacatggcggggacgacccaaggcgctgctggcatgccacttctcgctggagagcgcgcacgggcgcccgagagtgtatcgacgtcagcacagggtggagccgtcgtcgtcacggcgccgaaggaggatagcggtggcagcggtgttgccggcgctctagtagccgtgagcacggacacgggtggcagcggcggcgcgtcggctgacaacacggcaaggaagacggtggacacgttcgggcagcgcacgtcgatttaccgtggcgtgacaaggcatagatggactgggagatatgaggcacatctttgggataacagttgcagaagggaagggcaaactcgtaagggtcgtcaagtctatttaggtggctatgataaagaggagaaagctgctagggcttatgatcttgctgctctgaagtactggggtgccacaacaacaacaaattttccagtgagtaactacgaaaaggagctcgaggacatgaagcacatgacaaggcaggagtttgtagcgtctctgagaaggaagagcagtggtttctccagaggtgcatccatttacaggggagtgactaggcatcaccaacatggaagatggcaagcacggattggacgagttgcagggaacaaggatctttacttgggcaccttcagcacccaggaggaggcagcggaggcgtacgacatcgcggcgatcaagttccgcggcctcaacgccgtcaccaacttcgacatgagccgctacgacgtgaagagcatcctggacagcagcgccctccccatcggcagcgccgccaagcgcctcaaggaggccgaggccgcagcgtccgcgcagcaccaccacgccggcgtggtgagctacgacgtcggccgcatcgcctcgcagctcggcgacggcggagccctggcggcggcgtacggcgcgcactaccacggcgccgcctggccgaccatcgcgttccagccgggcgccgccagcacaggcctgtaccacccgtacgcgcagcagccaatgcgcggcggcgggtggtgcaagcaggagcaggaccacgcggtgatcgcggccgcgcacagcctgcaggacctccaccacctgaacctgggcgcggccggcgcgcacgactttttctcggcagggcagcaggccgccgccgctgcgatgcacggcctgggtagcatcgacagtgcgtcgctcgagcacagcaccggctccaactccgtcgtctacaacggcggggtcggcgacagcaacggcgccagcgccgtcggcggcagtggcggtggctacatgatgccgatgagcgctgccggagcaaccactacatcggcaatggtgagccacgagcaggtgcatgcacgggcctacgacgaagccaagcaggctgctcagatggggtacgagagctacctggtgaacgcggagaacaatggtggcggaaggatgtctgcatgggggactgtcgtgtctgcagccgcggcggcagcagcaagcagcaacgacaacatggccgccgacgtcgggcatggcggcgcgcagctcttcagtgtctggaacgacactggctccggcgagggtcgcggttccctcctgacctgcggcgacgtggaggaaaaccccggtccgatggcggccaatgcgggcggcggtggagcgggaggaggcagcggcagcggcagcgtggctgcgccggcggtgtgccgccccagcggctcgcggtggacgccgacgccggagcagatcaggatgctgaaggagctctactacggctgcggcatccggtcgcccagctcggagcagatccagcgcatcaccgccatgctgcggcagcacggcaagatcgagggcaagaacgtcttctactggttccagaaccacaaggcccgcgagcgccagaagcgccgcctcaccagcctcgacgtcaacgtgcccgccgccggcgcggccgacgccaccaccagccaactcggcgtcctctcgctgtcgtcgccgccgccttcaggcgcggcgcctccctcgcccaccctcggcttctacgccgccggcaatggcggcggatcggctgtgctgctggacacgagttccgactggggcagcagcggcgctgctatggccaccgagacatgcttcctgcaggactacatgggcgtgacggacacgggcagctcgtcgcagtggccacgcttctcgtcgtcggacacgataatggcggcggccgcggcgcgggcggcgacgacgcgggcgcccgagacgctccctctcttcccgacctgcggcgacgacggcggcagcggtagcagcagctacttgccgttctggggtgccgcgtccacaactgccggcgccacttcttccgttgcgatccaacagcaacaccagctgcaggagcagtacagcttttacagcaacagcaacagcacccagctggccggcaccggcaaccaagacgtatcggcaacagcagcagcagccgccgccctggagctgagcctcagctcatggtgctccccttaccctgctgcagggagtatgtgagaggtaccgacaaagcagcattagtccgttgatcggtggaagaccactcgtcagtgttgagttgaatgtttgatcaataaaatacggcaatgctgtaagggttgttttttatgccattgataatacactgtactgttcagttgttgaactctatttcttagccatgccaagtgcttttcttattttgaataacattacagcaaaaagttgaaagacaaaaaaaaaaacccccgaacagagtgctttgggtcccaagcttctttagactgtgttcggcgttccccctaaatttctccccctatatctcactcacttgtcacatcagcgttctctttccccctatatctccacgctctacagcagttccacctatatcaaacctctataccccaccacaacaatattatatactttcatcttcaactaactcatgtaccttccaatttttttctactaataattatttacgtgcacagaaacttagcaaggagagagagagcgggaatttaaatgctcggcgttaggcttttagtccgctaggtggctagaccgaggttaggacgctagttcactaggggcctagtggtgttttaagagtcaccaccttgctagttggatattacctcttctcttcaaagtatccttgaacgctcaccggttatcaaatctctacactatagctctgtagtcttgctagatagttagttctttagctctctctagaggttcacaaactcaatacaacacacagtggagtagggtattacgctccggcggcccgaaccactctaaatccttgtgtcctcgtgtgctcttccaccattaatgactgtaattgcagggacacgaagagttgtagcgcttttgccaacaagatccgctatatgctagtagagtggaacctgcacagcaacaagcatccaataatctgagaataagaattatgtgtggtgatggttctcatctctgcaactcgccattttcgcgagagaaccaaatccaagttggtgaagatcatgatttgggctcatgggctggcatagtagctattacctttgcaattgtggttcgaatctatccgatattctccttttcagggagagctaatgcttatgcttattgggtattttggtttgacactgcttcacgcccaaaaaaaggcaactatgtctgagttggatatggcccaaaaaaaggcagctatgtctgagttggatatggaagtcttctttcgtttagggtgaagtaagaccaagctcatgagcttattatcttaggtcggaacaaattagttgataggcatggcacatttatcaaattataatgattttaacagaaaagcaacacctctttttcagcagcaccagctttgcaagctgcaattgacactccaagcatagtatttgctccaaactcagcctgcatttcgcacaatatcatatctatttccatttggataaaatatattttccagaaatatgggaacagaatcaagatacagaaaaaagttgtggtagtagtggtaagtggaaacacaagtacagtgaaaagatagcattatttctgaacagtcaaattaaccgaaataagtagtatcacatactgcccctaaattgactacacccaatgtaaagaattgcttgagcatattgagccatcagttgtttgtttgtgtaacggatttgacaatgcagagttcaggagcaaaaaaccgcaaaggagagaaagagggaaaggatctcctagtatcccaccttgtggcgcgccctgtcaagtgcatgatggcctggtcgatctgcgtctgctgctgcggttccatcccaacgagtgcctccgacaccttgtcgttgatcacccgcaccgcgtaggcgacccccctggcgaggaacttccgcctctcggaggccccggccgcgtcggcggcggcgccctcgagcgcgcccacgctagccgtagatgctcggtgcacggccttgttggtgtgcaactcgacctcaacggccggtgcgctacgcccgtcaaggatctggcgcgcccgcaccctcgtgatcacggtgggcgcctcccgcctcatgtggccgacgatgaaaagcgccgggttaggggccttggcgcgcaccgccgtattcagggcctcctcgctcttgcgcgagagcaggtgcttccccaggtactcctgcactgacaaggctgccacagcggtggaatttgtcctcacgacttcgccacgtcgtcctcacctccctggcttcccacgactccgccgtatcgaggtgctcggtgggtcgtcttaatccgaagtccgaactaggaagacgagacagagaggtctgaggaatgggcctcgtttgatgttgagctgaattatttttccagcataagcccaggtcttggtccatgaacaaaattactagaaacccagcccagtactacgatctaaaagagggactgccactggatagctctctctagcattctccacgctccaatacagcggcgtcgtgtctatccgggtctatccgcgaacacgtgagaactctccagaaactgctttctcctccacttcatctctctcgctttccctctataaaaagaccccttctaggaattgagggagacagcaagcaccaagcagcgatccgaagctcaatcaattcactcaaacctcttccccaaatcttcgattagatcttcgttgacaagaagactagaaccgaacctgacatgtccaacctgctcacggttcaccagaaccttccggctcttccagtggacgcgacgtccgatgaagtcaggaagaacctcatggacatgttccgcgacaggcaagcgttcagcgagcacacctggaagatgctgctctccgtctgccgctcctgggctgcatggtgcaagctgaacaacaggaagtggttccccgctgagcccgaggacgtgagggattaccttctgtacctgcaagcgcgaggtttgtttctgcttctacctttgatatatatataataattatcattaattagtagtaatataatatttcaaatatttttttcaaaataaaagaatgtagtatatagcaattgcttttctgtagtttataagtgtgtatattttaatttataacttttctaatatatgaccaaaacatggtgatgcctaggtctggcagtgaagaccatccagcaacaccttggacaactgaacatgcttcacaggcgctccggcctcccgcgccccagcgactcgaacgccgtgagcctcgtcatgcgccgcatcaggaaggaaaacgtcgatgccggcgaaagggcaaagcaggccctcgcgttcgagaggaccgatttcgaccaggtccgcagcctgatggagaacagcgacaggtgccaggacattaggaacctggcgttcctcggaattgcatacaacacgctcctcaggatcgcggaaattgcccgcattcgcgtgaaggacattagccgcaccgacggcggcaggatgcttatccacattggcaggaccaagacgctcgtttccaccgcaggcgtcgaaaaggccctcagcctcggagtgaccaagctcgtcgaacgctggatctccgtgtccggcgtcgcggacgacccaaacaactacctcttctgccgcgtccgcaagaacggggtggctgcccctagcgccaccagccaactcagcacgagggccttggaaggtattttcgaggccacccaccgcctgatctacggcgcgaaggatgacagcggtcaacgctacctcgcatggtccgggcactccgcccgcgttggagctgctagggacatggcccgcgccggtgtttccatccccgaaatcatgcaggcgggtggatggacgaacgtgaacattgtcatgaactacattcgcaaccttgacagcgagacgggcgcaatggttcgcctcctggaagatggtgactgaggtacccaacctagacttgtccatcttctggattggccaacttaattaatgtatgaaataaaaggatgcacacatagtgacatgctaatcactataatgtgggcatcaaagttgtgtgttatgtgtaattactagttatctgaataaaagagaaagagatcatccatatttcttatcctaaatgaatgtcacgtgtctttataattctttgatgaaccagatgcatttcattaaccaaatccatatacatataaatattaatcatatataattaatatcaattgggttagcaaaacaaatctagtctaggtgtgttttgcgatccgatatcgacgtctaaaaacggcccctaactaacgcttagttgcccgctagattagtcccccgttagtgcctagttagacacacgacgaactaggggctagtgccaccttgctagttggatattacctcttctcttcaaagtatccttgaacgctcaccggttatcaaatctctacactatagctctgtagtcttgctagatagttagttctttagctctcgcacgataacttcgtatagcatacattatacgaagttataacagcggaccgggttacgatctgcctcatcaacagctgcagtatttgctagccacatatatatacacagttcgacacgtagttataacggaagagagaagcaaagagagaggcagagtgactgcaaccatcagtagttctatgattttattttttaccgttttgttgctgtttcatggtgtttatttgattgtagggtggaggagaggtgaaagctgacagaagagagtgagcacacatggtgcctttcttgcatgatgtatgatcgagagagttcatgctcgaagctatgcgtgctcacttctctctctgtcagccattagaactcctctatctctcaatctcgatctccctctttctttgttgatctctcccatggtgatatttatttgcttcctacgtgttgtgttctctttcttcagcacacacacaacctgttcatgttaccttagggttaaagtttttgcactttgcgtgaagatggaaagacaaacagtagatgagttttttgaaggtttgacagaagagagtgagcacacacggtggtttcttaccatgagtgtcatgctaggagctgtgcgtgctcaccctctatctgtcagtcactcatcaagcccatctgtcttattagcttgtttccgctgctaataaatattctagaggtaccgttaacagatctactaactatctatactgtaataatgttgtatagccgccggatagctagctagtttagtcattcagcggcgatgggtaataataaagtgtcatccatccatcaccatgcgtggcaacgtgagcaatgacctgattgaacaaattgaaatgaaaagaagaaatatgttatatgtcaacgagatttcctcataatgccactgacgacgtgtgtccaagaaatgtatcagtgatacgtatattcacaatttttttatgacttatactcacaatttgtttttttactacttatactcacaatttgttgtgcgtaccataacaatttcgatcgaatatatatcagaaagttgacgaaagtaagctcactcaaaaagttaaatgggctgcggaagctgcgtcaggcccaagttttggctattctatccggtatccacgattttgatggctgagggacatatgttcgcttcgaattcctgcccttaaggccaattgttcaagattcattcaacaattgaaacatctcccatgattaaatcagtataaggttgctatggtcttgcttgacaaagtttttttttgagggaatttcaactaaatttttgagtgaaactatcaaatactgattttaaaaaatttttataaaaggaagcgcagagataaaaggccatctatgctacaaaagtacccaaaaatgtaatcctaaagtatgaattgcattttttttttgtttggacgaaaggaaaggagtattaccacaagaatgatatcatcttcatatttagatcttttttgggtaaagcttgagattctctaaatatagagaaatcagaagaaaaaaaaaccgtgttttggtggttttgatttctagcctccacaataactttgacggcgtcgacaagtctaacggacaccaagcagcgaaccaccagcgccgagccaagcgaagcagacggccgagacgttgacaccttcggcgcggcatctctcgagagttccgctccggcgctccacctccaccgctggcggtttcttattccgttccgttccgcctcctgctctgctcctctccacaccacacggcacgaaaccgttacggcaccggcagcacccagcacgggagaggggattcctttcccaccgttccttccctttccgccccgccgctataaatagccagccccatccccagcttttttccccaatctcatctcctctctcctgttgttcggagcacacgcacaatccgatcgatccccaaatccccttcgtctctcctcgcgagcctcgtggatcccagcttcaaggtacggcgatcgatcatcccccctccttctctctaccttcttttctctagactacatcggatggcgatccatggttagggcctgctagtttcccttcctgttttgtcgatggctgcgaggcacaatagatctgatggcgttatgacggctaacttgtcatgttgttgcgatttatagtccctttaggagatcagtttaatttctcggatggttcgagatcggtggtccatggttagtaccctaagatccgcgctgttagggttcgtagatggaggcgacctgttctgattgttaacttgtcagtacctgggaaatcctgggatggttctagctcgtccgcagatgagatcgatttcatgatcctctgtatcttgtttcgttgcctaggttccgtctaatctatccgtggtatgatgtagatgttttgatcgtgctaactacgtcttgtaaagttaattgtcaggtcataatttttagcatgcctttttttttgtttggttttgtctaattgggctgtcgttctagatcagagtagaagactgttccaaactacctgctggatttattgaacttggatctgtatgtgtgtcacatatcttcataaattcatgattaagatggattgaaatatcttttatctttttggtatggatagttctatatgttggtgtggctttgttagatgtatacatgcttagatacatgaagcaacgtgctgctactgtttagtaattgctgttcatttgtctaataaacagataaggatatgtatttatgttgctgttggttttgctggtactttgttggatacaaatgcttcaatacagaaaacagcatgctgctacgatttaccatttatctaatcttatcatatgtctaatctaataaacaaacatgcttttaaattatcttcatatgcttggatgatggcatacacagcggctatgtgtggttttttaaatacccagcatcatgggcatgcatgacactgctttaatatgctttttatttgcttgagactgtttcttttgtttatactgaccctttagttcggtgactcttctgcaggtcgactttaacttagcctaggatccatggcccagtccaagcacggcctgaccaaggagatgaccatgaagtaccgcatggagggctgcgtggacggccacaagttcgtgatcaccggcgagggcatcggctaccccttcaagggcaagcaggccatcaacctgtgcgtggtggagggcggccccttgcccttcgccgaggacatcttgtccgccgccttcatgtacggcaaccgcgtgttcaccgagtacccccaggacatcgtcgactacttcaagaactcctgccccgccggctacacctgggaccgctccttcctgttcgaggacggcgccgtgtgcatctgcaacgccgacatcaccgtgagcgtggaggagaactgcatgtaccacgagtccaagttctacggcgtgaacttccccgccgacggccccgtgatgaagaagatgaccgacaactgggagccctcctgcgagaagatcatccccgtgcccaagcagggcatcttgaagggcgacgtgagcatgtacctgctgctgaaggacggtggccgcttgcgctgccagttcgacaccgtgtacaaggccaagtccgtgccccgcaagatgcccgactggcacttcatccagcacaagctgacccgcgaggaccgcagcgacgccaagaaccagaagtggcacctgaccgagcacgccatcgcctccggctccgccttgccctccggactcagatctcgatagggtaccaatggccagttaacagatccagctgctgctgttctagggttcacaagtctgcctatttgtcttccccaatggagctatggttgtctggtctggtccttggtcgtgtcccgtttcattgtgtactatttacctgtaatgtgtatccttaagtctggtttgatggtgtctgaaacgttttgctgtggtagagcagcatggaagaactataatgaataagtgatccctaatcattgtgtccaaattttgcttctgctatacccttttgtgctgtttcttatgttttgcttaaaaatttgatctgacaaacaaatttgtctaaattatgctcttgttctgactgtgtactgtacacatttgtattgctaccggtttggcacatagttttctctttgattgcagatcaaacccttctgattgcagattgcttggctatggctgatgtgctcactgttcttctttagcttgtatattgctgatggtggcttggctacggctgaaaaagttgctgctgcgccgacttggcaactgttgctccagtaatgctttgtcctctcttcctagccgccgacttggcacttggcagctgttgctcctgtaatgcgttgttatctcttatctcttgagatgtactatgattttgaggctgtttgacttgtgccagattgccagtgctgatgctatattatctcaggtttttatgctagtatatgttttactgtgtgctgcctgtgtcgagttacgtaatctattgaaccgctatgcgtgttgatgccctgttgttgcttgccagattgatgcccctgttgcttgcagcttgcaagctgtagtgaaatcctaaaattcgaaaccaaatctattctgaacttttgaagatctgtgatgtccggaagaaaagattcaaacagataaacgggactctccagaatctataaaataaatgatcgacaaacgctttgctttggtaggcttcctagttagttagcggaccgaagcttcggtgaattcaggtgactcttagcgatccgacggcgtcttcaccgccccgccgccgcccgagccggacttgtcgctgccgccgccgctgctcatcttgcgcgcttgtgtccctccctcagtccctgcgttcgcggatcgcgggcgggtgcgacccgtttggactccggccggtagccttcgtgccgacctcgctcggtccaccggtttgtcggggacccacatgtcagtgaaggtacgcgtccacgtccacagaccctactaccccagacgagtccaaatcgctgttccctcacactctcgtgtaccagcgcgcggcggaaagcacctttccaacaaccgccgacacgtcggtcccacgtcggcatgctccaccggtcagtgtttggcgtgtacggctcccggcgacgaacgagtgtggcctaagctttcctactcccatcccatctgagccacacatctctctcacgccacgcgcacaaaacagccaggctcccacgcgcatcaaccggctctccctttccgtgccactcgcccccaagccccaaaccctcgccgccgcctccgagacagccgccgccacctaggccatggccaccgccgccgccgcgtctaccgcgctcactggcgccactaccgctgcgcccaaggcgaggcgccgggcgcacctcctggccacccgccgcgccctcgccgcgcccatcaggtgctcagcggcgtcacccgccatgccgatggctcccccggccaccccgctccggccgtggggccccaccgagccccgcaagggtgctgacatcctcgtcgagtccctcgagcgctgcggcgtccgcgacgtcttcgcctaccccggcggcgcgtcgatggagatccaccaggcactcacccgctcccccgtcatcgccaaccacctcttccgccacgagcaaggggaggcctttgccgcctccggctacgcgcgctcctcgggccgcgtcggcgtctgcatcgccacctccggccccggcgccaccaacctagtctccgcgctcgccgacgcgctgctcgattccgtcccgatggtcgccatcacgggacaggtggcgcgacgcatgattggcaccgacgccttccaggagacgcccatcgtcgaggtcacgcgctccatcaccaagcacaactacctggtcctcgacgtcgacgacatcccccgcgtcgtgcaggaggctttcttcctcgcctcctctggtcgaccagggccggtgcttgtcgacatccccaaggacatccagcagcagatggcggtgcctgtctgggacaagcccatgagtctgcctgggtacattgcgcgccttcccaagccccctgcgactgagttgcttgagcaggtgctgcgtcttgttggtgaatcgcggcgccctgttctttatgtgggcggtggctgcgcagcatctggtgaggagttgcgacgctttgtggagctgactggaatcccggtcacaactactcttatgggcctcggcaacttccccagcgacgacccactgtctctgcgcatgctaggtatgcatgggacggtgtatgcaaattatgcagtggataaggccgatctgttgcttgcacttggtgtgcggtttgatgatcgcgtgacagggaagattgaggcttttgcaagcagggctaagattgtgcacgttgatattgatccggctgagattggcaagaacaagcagccacatgtgtccatctgtgcagatgttaagcttgctttgcagggcatgaatgctcttcttgaaggaagcacatcaaagaagagctttgactttggctcatggaacgatgagttggatcagcagaagagggaattcccccttgggtataaaacatctaatgaggagatccagccacaatatgctattcaggttcttgatgagctgacgaaaggcgaggccatcatcggcacaggtgttgggcagcaccagatgtgggcggcacagtactacacttacaagcggccaaggcagtggttgtcttcagctggtcttggggctatgggatttggtttgccggctgctgctggtgcttctgtggcaaacccaggtgtcactgttgttgacatcgatggagatggtagctttctcatgaacgttcaggagctagctatgatccgaattgagaacctcccagtgaaggtctttgtgctaaacaaccagcacctggggatggtggtgcagttggaggacaggttctataaggccaacagagcgcacacatacttgggaaacccagagaatgaaagtgagatatatccagatttcgtgacgatcgccaaagggttcaacattccagccgtccgtgtgacaaagaagaacgaagtccgcgcagcgataaagaagatgctcgagactccagggccgtacctcttggatataatcgtcccacaccaggagcatgtgttgcctatgatccctagtggtggggctttcaaggatatgatcctggatggtgatggcaggactgtgtactgacttcgaataggtacccggggatcctctagtgccgtgggtcgtttaagctgccgctgtacctgtgtcgtctggtgccttctggtgtacctgggaggttgtcgtctatcaagtatctgtggttggtgtcatgagtcagtgagtcccaatactgttcgtgtcctgtgtgcattatacccaaaactgttatgggcaaatcatgaataagcttgatgttcgaacttaaaagtctctgctcaatatggtattatggttgtttttgttcgtctcctaatatttgcctgggatcaaattttattggctggtgttcatttgacctccatgttcttgctaggctccattttttactctacagccataatatgtttgattgtttggtttgttctttgttgtacacctggttctgtcgagcttagttttcgacactggcttacagcttaacatgttgctattttattgggttctgattgctattttattgggttctgattgctagtttttgctgaatccaaaaaccatgttatttatttaagcgatccaggttattattatgatggtggctaagtttttttttttccaagggtaaattttctggattctccagtgtttctgtggcctgtttctgtggccgaattcaatcactagagtcgacctgcatgattccgatgacttcgtaggttcctagctcaagccgctcgtgtccaagcgtcacttacgattagctaatgattacggcatctaggaccgactagctagctagctaagagctcggtaccgagctcgaattcattccgattaatcgtggcctcttgctcttcaggatgaagagctatgtttaaacgtgcaagcgctactagacaattcagtacattaaaaacgtccgcaatgtgttattaagttgtctaagcgtcaatttgtttacaccacaatatatcctgcca

SEQ ID NO: 254 - DNA, 23160 bp, synthetic construct
  misc_feature 1..23160: note = PHP98681
  source 1..23160: mol_type = other DNA
gtttacccgccaatatatcctgtcaaacactgcggccgcacttgaccgcggatggagccggagctgtggtgaggccatcgacgggaggtgggggagaacacagtctcagtgttctttgtgagtccgcaaggtttttagcttttctgtattaattaaggttgctgttggctgtagaatacggtcgtggaagagctgtatcggtagctactacgtaagctattatatactggaagtctggagctcgtcgatctccggtcgtcttcctccatttctcctcgtcttgctttgactgctgctaccatttgcttctgttttctgatgaagcatgccatgtcggccaccagtgtttgtgtggtttttgcagggaatggctttcaagtgctgtgattgaatggccctcgtcgtcctcggctgagctcacatggacgcgtcatgtgagtgagatatatgatcatatgatgagtggggttcgggtgagtgcgtacttgaagtaggatcccgctttcactcattcattcattggcctttaaaccgggaaattttcgcgaggagatggagggaagcaagcagggtgacgagtgcagagtgccgcgagcgctttgtcaaaaggcaccgccgtaggcaaaaaaatcaatggccctgactgactcgatggtagtactactgtagagactagagagggttgctccccatatcttcgtgtgacttttactccagcattgcatttccgtcattgagacgttaattaatagcagctttcgggacagatgactgtggccatgtttcgtcacggccgcttcgtgccagctgggggtactatagtactgtgattttgttagtaaaaactttcattaggccaccattgacgaccgggccttcgcttttgctgcgctaattaaccatttcccggcgaccgaagggaacatgaacatgccccgacacatgagggcatgaggactagtgttctccctgtcgttcgttgacttgactagtgatagtttaaacgctcttcaactggaagagcggttactaccggttcactagctagctgctaatcgagctagttaccctatgaggtgacatgaagcgctcacggttactatgacggttagcttcacgactgttggtggcagtagcgtacgacttagctatagttccggacttacctagcgtgcagcgtgacccggtcgtgcccctctctagagataatgagcattgcatgtctaagttataaaaaattaccacatattttttttgtcacacttgtttgaagtgcagtttatctatctttatacatatatttaaactttactctacgaataatataatctatagtactacaataatatcagtgttttagagaatcatataaatgaacagttagacatggtctaaaggacaattgagtattttgacaacaggactctacagttttatctttttagtgtgcatgtgttctcctttttttttgcaaatagcttcacctatataatacttcatccattttattagtacatccatttagggtttagggttaatggtttttatagactaatttttttagtacatctattttattctattttagcctctaaattaagaaaactaaaactctattttagtttttttatttaataatttagatataaaatagaataaaataaagtgactaaaaattaaacaaataccctttaagaaattaaaaaaactaaggaaacatttttcttgtttcgagtagataatgccagcctgttaaacgccgtcgacgagtctaacggacaccaaccagcgaaccagcagcgtcgcgtcgggccaagcgaagcagacggcacggcatctctgtcgctgcctctggacccctctcgagagttccgctccaccgttggacttgctccgctgtcggcatccagaaattgcgtggcggagcggcagacgtgagccggcacggcaggcggcctcctcctcctctcacggcaccggcagctacgggggattcctttcccaccgctccttcgctttcccttcctcgcccgccgtaataaatagacaccccctccacaccctctttccccaacctcgtgttgttcggagcgcacacacacacaaccagatctcccccaaatccacccgtcggcacctccgcttcaaggtacgccgctcgtcctcccccccccccctctctaccttctctagatcggcgttccggtccatgcatggttagggcccggtagttctacttctgttcatgtttgtgttagatccgtgtttgtgttagatccgtgctgctagcgttcgtacacggatgcgacctgtacgtcagacacgttctgattgctaacttgccagtgtttctctttggggaatcctgggatggctctagccgttccgcagacgggatcgatttcatgattttttttgtttcgttgcatagggtttggtttgcccttttcctttatttcaatatatgccgtgcacttgtttgtcgggtcatcttttcatgcttttttttgtcttggttgtgatgatgtggtctggttgggcggtcgttctagatcggagtagaattctgtttcaaactacctggtggatttattaattttggatctgtatgtgtgtgccatacatattcatagttacgaattgaagatgatggatggaaatatcgatctaggataggtatacatgttgatgcgggttttactgatgcatatacagagatgctttttgttcgcttggttgtgatgatgtggtgtggttgggcggtcgttcattcgttctagatcggagtagaatactgtttcaaactacctggtgtatttattaattttggaactgtatgtgtgtgtcatacatcttcatagttacgagtttaagatggatggaaatatcgatctaggataggtatacatgttgatgtgggttttactgatgcatatacatgatggcatatgcagcatctattcatatgctctaaccttgagtacctatctattataataaacaagtatgttttataattattttgatcttgatatacttggatgatggcatatgcagcagctatatgtggatttttttagccctgccttcatacgctatttatttgcttggtactgtttcttttgtcgatgctcaccctgttgtttggtgttacttctgcaggtcgactctagaggatcaattcgctagcataacttcgtatagcatacattatacgaagttatccagatccacgttaccaagcggccgcacactgatagtttaaactgaaggcgggaaacgacaatctgatcatgagcggagaattaagggagtcacgttatgacccccgccgatgacgcgggacaagccgttttacgtttggaactgacagaaccgcaacgattgaaggagccactcagccgcgggtttctggagtttaatgagctaagcacatacgtcagaaaccattattgcgcgttcaaaagtcgcctaaggtcactatcagctagcaaatatttcttgtcaaaaatgctccactgacgttccataaattcccctcggtatccaattagagtctcatattcactcccatggcggccaatgcgggcggcggtggagcgggaggaggcagcggcagcggcagcgtggctgcgccggcggtgtgccgccccagcggctcgcggtggacgccgacgccggagcagatcaggatgctgaaggagctctactacggctgcggcatccggtcgcccagctcggagcagatccagcgcatcaccgccatgctgcggcagcacggcaagatcgagggcaagaacgtcttctactggttccagaaccacaaggcccgcgagcgccagaagcgccgcctcaccagcctcgacgtcaacgtgcccgccgccggcgcggccgacgccaccaccagccaactcggcgtcctctcgctgtcgtcgccgccgccttcaggcgcggcgcctccctcgcccaccctcggcttctacgccgccggcaatggcggcggatcggctgtgctgctggacacgagttccgactggggcagcagcggcgctgctatggccaccgagacatgcttcctgcaggactacatgggcgtgacggacacgggcagctcgtcgcagtggccacgcttctcgtcgtcggacacgataatggcggcggccgcggcgcgggcggcgacgacgcgggcgcccgagacgctccctctcttcccgacctgcggcgacgacggcggcagcggtagcagcagctacttgccgttctggggtgccgcgtccacaactgccggcgccacttcttccgttgcgatccaacagcaacaccagctgcaggagcagtacagcttttacagcaacagcaacagcacccagctggccggcaccggcaaccaagacgtatcggcaacagcagcagcagccgccgccctggagctgagcctcagctcatggtgctccccttaccctgctgcagggagtatgtgagagcaacgcgagctgccactgctcttcactgatgtctctggaatggaaggaggaggaagtgagaacagatcattcgacaaagcagcattagtccgttgatcggtggaagaccactcgtcagtgttgagttgaatgtttgatcaataaaatacggcaatgctgtaagggttgttttttatgccattgataatacactgtactgttcagttgttgaactctatttcttagccatgccaagtgcttttcttattttgaataacattacagcaaaaagttgaaagacaaaaaaaaaaacccccgaacagagtgctttgggtcccaagcttctttagactgtgttcggcgttccccctaaatttctccccctatatctcactcacttgtcacatcagcgttctctttccccctatatctccacgctctacagcagttccacctatatcaaacctctataccccaccacaacaatattatatactttcatcttcaactaactcatgtaccttccaatttttttctactaataattatttacgtgcacagaaacttagcaaggagagagagagcgggaatttaaatgctcggcgttaggcttttagtccgctaggtggctagaccgaggttaggacgctagttcactaggggcctagtggtgttttaagacgtcacggtcactacgaatcgaccgaagcttgcatgggccgcatcgagcagctggcttgtggggaccagacaaaaaaggaatggtgcagaattgttaggcgcacctaccaaaagcatctttgcctttattgcaaagataaagcagattcctctagtacaagtggggaacaaaataacgtggaaaagagctgtcctgacagcccactcactaatgcgtatgacgaacgcagtgacgaccacaaaactcgagcaacgagatcatgagccaatcaaagaggagtgatgtagacctaaagcaataatggagccatgacgtaagggcttacgcccatacgaaataattaaaggctgatgtgacctgtcggtctctcagaacctttactttttatgtttggcgtgtatttttaaatttccacggcaatgacgatgtgaccgtcgacccactaaaacattgctttgtcaaaagctaaaaaagatgatgcccgacagccacttgtgtgaagcatgagaagccggtccctccactaagaaaattagtgaagcatcttccagtggtccctccactcacagctcaatcagtgagcaacaggacgaaggaaatgacgtaagccatgacgtctaatcccagggccagcttgcatgcctgcagtgcagcgtgacccggtcgtgcccctctctagagataatgagcattgcatgtctaagttataaaaaattaccacatattttttttgtcacacttgtttgaagtgcagtttatctatctttatacatatatttaaactttactctacgaataatataatctatagtactacaataatatcagtgttttagagaatcatataaatgaacagttagacatggtctaaaggacaattgagtattttgacaacaggactctacagttttatctttttagtgtgcatgtgttctcctttttttttgcaaatagcttcacctatataatacttcatccattttattagtacatccatttagggtttagggttaatggtttttatagactaatttttttagtacatctattttattctattttagcctctaaattaagaaaactaaaactctattttagtttttttatttaataatttagatataaaatagaataaaataaagtgactaaaaattaaacaaataccctttaagaaattaaaaaaactaaggaaacatttttcttgtttcgagtagataatgccagcctgttaaacgccgtcgacgagtctaacggacaccaaccagcgaaccagcagcgtcgcgtcgggccaagcgaagcagacggcacggcatctctgtcgctgcctctggacccctctcgagagttccgctccaccgttggacttgctccgctgtcggcatccagaaattgcgtggcggagcggcagacgtgagccggcacggcaggcggcctcctcctcctctcacggcaccggcagctacgggggattcctttcccaccgctccttcgctttcccttcctcgcccgccgtaataaatagacaccccctccacaccctctttccccaacctcgtgttgttcggagcgcacacacacacaaccagatctcccccaaatccacccgtcggcacctccgcttcaaggtacgccgctcgtcctcccccccccccctctctaccttctctagatcggcgttccggtccatgcatggttagggcccggtagttctacttctgttcatgtttgtgttagatccgtgtttgtgttagatccgtgctgctagcgttcgtacacggatgcgacctgtacgtcagacacgttctgattgctaacttgccagtgtttctctttggggaatcctgggatggctctagccgttccgcagacgggatcgatttcatgattttttttgtttcgttgcatagggtttggtttgcccttttcctttatttcaatatatgccgtgcacttgtttgtcgggtcatcttttcatgcttttttttgtcttggttgtgatgatgtggtctggttgggcggtcgttctagatcggagtagaattctgtttcaaactacctggtggatttattaattttggatctgtatgtgtgtgccatacatattcatagttacgaattgaagatgatggatggaaatatcgatctaggataggtatacatgttgatgcgggttttactgatgcatatacagagatgctttttgttcgcttggttgtgatgatgtggtgtggttgggcggtcgttcattcgttctagatcggagtagaatactgtttcaaactacctggtgtatttattaattttggaactgtatgtgtgtgtcatacatcttcatagttacgagtttaagatggatggaaatatcgatctaggataggtatacatgttgatgtgggttttactgatgcatatacatgatggcatatgcagcatctattcatatgctctaaccttgagtacctatctattataataaacaagtatgttttataattattttgatcttgatatacttggatgatggcatatgcagcagctatatgtggatttttttagccctgccttcatacgctatttatttgcttggtactgtttcttttgtcgatgctcaccctgttgtttggtgttacttctgcaggtcgactttaacttagcctaggatccatggccactgtgaacaactggctcgctttctccctctccccgcaggagctgccgccctcccagacgacggactccacactcatctcggccgccaccgccgaccatgtctccggcgatgtctgcttcaacatcccccaagattggagcatgaggggatcagagctttcggcgctcgtcgcggagccgaagctggaggacttcctcggcggcatctccttctccgagcagcatcacaaggccaactgcaacatgatacccagcactagcagcacagtttgctacgcgagctcaggtgctagcaccggctaccatcaccagctgtaccaccagcccaccagctcagcgctccacttcgcggactccgtaatggtggcttcctcggccggtgtccacgacggcggtgccatgctcagcgcggccgccgctaacggtgtcgctggcgctgccagtgccaacggcggcggcatcgggctgtccatgattaagaactggctgcggagccaaccggcgcccatgcagccgagggtggcggcggctgagggcgcgcaggggctctctttgtccatgaacatggcggggacgacccaaggcgctgctggcatgccacttctcgctggagagcgcgcacgggcgcccgagagtgtatcgacgtcagcacagggtggagccgtcgtcgtcacggcgccgaaggaggatagcggtggcagcggtgttgccggcgctctagtagccgtgagcacggacacgggtggcagcggcggcgcgtcggctgacaacacggcaaggaagacggtggacacgttcgggcagcgcacgtcgatttaccgtggcgtgacaaggcatagatggactgggagatatgaggcacatctttgggataacagttgcagaagggaagggcaaactcgtaagggtcgtcaagtctatttaggtggctatgataaagaggagaaagctgctagggcttatgatcttgctgctctgaagtactggggtgccacaacaacaacaaattttccagtgagtaactacgaaaaggagctcgaggacatgaagcacatgacaaggcaggagtttgtagcgtctctgagaaggaagagcagtggtttctccagaggtgcatccatttacaggggagtgactaggcatcaccaacatggaagatggcaagcacggattggacgagttgcagggaacaaggatctttacttgggcaccttcagcacccaggaggaggcagcggaggcgtacgacatcgcggcgatcaagttccgcggcctcaacgccgtcaccaacttcgacatgagccgctacgacgtgaagagcatcctggacagcagcgccctccccatcggcagcgccgccaagcgcctcaaggaggccgaggccgcagcgtccgcgcagcaccaccacgccggcgtggtgagctacgacgtcggccgcatcgcctcgcagctcggcgacggcggagccctggcggcggcgtacggcgcgcactaccacggcgccgcctggccgaccatcgcgttccagccgggcgccgccagcacaggcctgtaccacccgtacgcgcagcagccaatgcgcggcggcgggtggtgcaagcaggagcaggaccacgcggtgatcgcggccgcgcacagcctgcaggacctccaccacctgaacctgggcgcggccggcgcgcacgactttttctcggcagggcagcaggccgccgccgctgcgatgcacggcctgggtagcatcgacagtgcgtcgctcgagcacagcaccggctccaactccgtcgtctacaacggcggggtcggcgacagcaacggcgccagcgccgtcggcggcagtggcggtggctacatgatgccgatgagcgctgccggagcaaccactacatcggcaatggtgagccacgagcaggtgcatgcacgggcctacgacgaagccaagcaggctgctcagatggggtacgagagctacctggtgaacgcggagaacaatggtggcggaaggatgtctgcatgggggactgtcgtgtctgcagccgcggcggcagcagcaagcagcaacgacaacatggccgccgacgtcgggcatggcggcgcgcagctcttcagtgtctggaacgacacttaagcgtacctagtggtacctgacatcttatagtctgcaacctctcgtgtctgaattcctatctttatcaagtgttattgcttccacgactataggacagctttcgtcgaaagcttttgctcatgtgatctcgaaggattcatctagtctgatttttcgtgacttgtatcggttttattggattcatccaacatatatcaataaaaaatgagttgtgtttcctttcttcctagttcagttaaaattatttccctcctgcgcttgtgctgtaattgtctgtgtacctgttgtttgtgactgtgttagttcccttggatatgatttcgtatttgatatgtacatggagatagcttagcttcattattggagtatgaagttagtatgacatagtcactctcctggaaaattgacactgcaaaccatatttttattctgaaccacaaatcctagtcagtccgctggcatatgccgtccgtttgctgaatccagaacgtgggtttggagatgtacggctgagatgcctctatgcgaaggggatttcgtggtgaaacgagatgggagtagagcaacgcccgtggaagatgcttcaaacttccacacttttgagcaacgatcggcagtagtaaggtagacgatttcaagatcaaagcatatgaagataaacaacatcaacaacaaaatttgttggggttctatagagagaaacagagctacatacatacactgttttgtatctaccatctgagatgatgaaaagatgaaaaactaaagaatgccccggcgccaacgccaggacacgccgcgcgcgcgtcacccgagccatctcttgacccagccggcgctgtatatttacacacgttgcagcatcgatcaccacctgttcgatcgcgtcgccgtcaccggcgcgccgcgacttattgaactagtctagggcgcggctaacaacctagcttagattgccttgtctaaacccttaggctaacgcgccactctagaaggccgatctcccccgaacgcgccagatccgatatcgatgggccctggccgaagcttggtcacccgcaccttgctagttggatattacctcttctcttcaaagtatccttgaacgctcaccggttatcaaatctctacactatagctctgtagtcttgctagatagttagttctttagctctctctagaggttcacaaactcaatacaacacacagtggagtagggtattacgctccggcggcccgaaccactctaaatccttgtgtcctcgtgtgctcttccaccattaatgactgtaattgcagggacacgaagagttgtagcgcttttgccaacaagatccgctatatgctagtagagtggaacctgcacagcaacaagcatccaataatctgagaataagaattatgtgtggtgatggttctcatctctgcaactcgccattttcgcgagagaaccaaatccaagttggtgaagatcatgatttgggctcatgggctggcatagtagctattacctttgcaattgtggttcgaatctatccgatattctccttttcagggagagctaatgcttatgcttattgggtattttggtttgacactgcttcacgcccaaaaaaaggcaactatgtctgagttggatatggcccaaaaaaaggcagctatgtctgagttggatatggaagtcttctttcgtttagggtgaagtaagaccaagctcatgagcttattatcttaggtcggaacaaattagttgataggcatggcacatttatcaaattataatgattttaacagaaaagcaacacctctttttcagcagcaccagctttgcaagctgcaattgacactccaagcatagtatttgctccaaactcagcctgcatttcgcacaatatcatatctatttccatttggataaaatatattttccagaaatatgggaacagaatcaagatacagaaaaaagttgtggtagtagtggtaagtggaaacacaagtacagtgaaaagatagcattatttctgaacagtcaaattaaccgaaataagtagtatcacatactgcccctaaattgactacacccaatgtaaagaattgcttgagcatattgagccatcagttgtttgtttgtgtaacggatttgacaatgcagagttcaggagcaaaaaaccgcaaaggagagaaagagggaaaggatctcctagtatcccaccttgtggcgcgccctgtcaagtgcatgatggcctggtcgatctgcgtctgctgctgcggttccatcccaacgagtgcctccgacaccttgtcgttgatcacccgcaccgcgtaggcgacccccctggcgaggaacttccgcctctcggaggccccggccgcgtcggcggcggcgccctcgagcgcgcccacgctagccgtagatgctcggtgcacggccttgttggtgtgcaactcgacctcaacggccggtgcgctacgcccgtcaaggatctggcgcgcccgcaccctcgtgatcacggtgggcgcctcccgcctcatgtggccgacgatgaaaagcgccgggttaggggccttggcgcgcaccgccgtattcagggcctcctcgctcttgcgcgagagcaggtgcttccccaggtactcctgcactgacaaggctgccacagcggtggaatttgtcctcacgacttcgccacgtcgtcctcacctccctggcttcccacgactccgccgtatcgaggtgctcggtgggtcgtcttaatccgaagtccgaactaggaagacgagacagagaggtctgaggaatgggcctcgtttgatgttgagctgaattatttttccagcataagcccaggtcttggtccatgaacaaaattactagaaacccagcccagtactacgatctaaaagagggactgccactggatagctctctctagcattctccacgctccaatacagcggcgtcgtgtctatccgggtctatccgcgaacacgtgagaactctccagaaactgctttctcctccacttcatctctctcgctttccctctataaaaagaccccttctaggaattgagggagacagcaagcaccaagcagcgatccgaagctcaatcaattcactcaaacctcttccccaaatcttcgattagatcttcgttgacaagaagactagaaccgaacctgacatgtccaacctgctcacggttcaccagaaccttccggctcttccagtggacgcgacgtccgatgaagtcaggaagaacctcatggacatgttccgcgacaggcaagcgttcagcgagcacacctggaagatgctgctctccgtctgccgctcctgggctgcatggtgcaagctgaacaacaggaagtggttccccgctgagcccgaggacgtgagggattaccttctgtacctgcaagcgcgaggtttgtttctgcttctacctttgatatatatataataattatcattaattagtagtaatataatatttcaaatatttttttcaaaataaaagaatgtagtatatagcaattgcttttctgtagtttataagtgtgtatattttaatttataacttttctaatatatgaccaaaacatggtgatgcctaggtctggcagtgaagaccatccagcaacaccttggacaactgaacatgcttcacaggcgctccggcctcccgcgccccagcgactcgaacgccgtgagcctcgtcatgcgccgcatcaggaaggaaaacgtcgatgccggcgaaagggcaaagcaggccctcgcgttcgagaggaccgatttcgaccaggtccgcagcctgatggagaacagcgacaggtgccaggacattaggaacctggcgttcctcggaattgcatacaacacgctcctcaggatcgcggaaattgcccgcattcgcgtgaaggacattagccgcaccgacggcggcaggatgcttatccacattggcaggaccaagacgctcgtttccaccgcaggcgtcgaaaaggccctcagcctcggagtgaccaagctcgtcgaacgctggatctccgtgtccggcgtcgcggacgacccaaacaactacctcttctgccgcgtccgcaagaacggggtggctgcccctagcgccaccagccaactcagcacgagggccttggaaggtattttcgaggccacccaccgcctgatctacggcgcgaaggatgacagcggtcaacgctacctcgcatggtccgggcactccgcccgcgttggagctgctagggacatggcccgcgccggtgtttccatccccgaaatcatgcaggcgggtggatggacgaacgtgaacattgtcatgaactacattcgcaaccttgacagcgagacgggcgcaatggttcgcctcctggaagatggtgactgaggtacccaacctagacttgtccatcttctggattggccaacttaattaatgtatgaaataaaaggatgcacacatagtgacatgctaatcactataatgtgggcatcaaagttgtgtgttatgtgtaattactagttatctgaataaaagagaaagagatcatccatatttcttatcctaaatgaatgtcacgtgtctttataattctttgatgaaccagatgcatttcattaaccaaatccatatacatataaatattaatcatatataattaatatcaattgggttagcaaaacaaatctagtctaggtgtgttttgcgatccgatatcgacgtctaaaaacggcccctaactaacgcttagttgcccgctagattagtcccccgttagtgcctagttagacacacgacgaactaggggctagtgccaccttgctagttggatattacctcttctcttcaaagtatccttgaacgctcaccggttatcaaatctctacactatagctctgtagtcttgctagatagttagttctttagctctcgcacgataacttcgtatagcatacattatacgaagttataacagcggaccgggttacgatctgcctcatcaacagctgcagtatttgctagccacatatatatacacagttcgacacgtagttataacggaagagagaagcaaagagagaggcagagtgactgcaaccatcagtagttctatgattttattttttaccgttttgttgctgtttcatggtgtttatttgattgtagggtggaggagaggtgaaagctgacagaagagagtgagcacacatggtgcctttcttgcatgatgtatgatcgagagagttcatgctcgaagctatgcgtgctcacttctctctctgtcagccattagaactcctctatctctcaatctcgatctccctctttctttgttgatctctcccatggtgatatttatttgcttcctacgtgttgtgttctctttcttcagcacacacacaacctgttcatgttaccttagggttaaagtttttgcactttgcgtgaagatggaaagacaaacagtagatgagttttttgaaggtttgacagaagagagtgagcacacacggtggtttcttaccatgagtgtcatgctaggagctgtgcgtgctcaccctctatctgtcagtcactcatcaagcccatctgtcttattagcttgtttccgctgctaataaatattctagaggtaccgttaacagatctactaactatctatactgtaataatgttgtatagccgccggatagctagctagtttagtcattcagcggcgatgggtaataataaagtgtcatccatccatcaccatgcgtggcaacgtgagcaatgacctgattgaacaaattgaaatgaaaagaagaaatatgttatatgtcaacgagatttcctcataatgccactgacgacgtgtgtccaagaaatgtatcagtgatacgtatattcacaatttttttatgacttatactcacaatttgtttttttactacttatactcacaatttgttgtgcgtaccataacaatttcgatcgaatatatatcagaaagttgacgaaagtaagctcactcaaaaagttaaatgggctgcggaagctgcgtcaggcccaagttttggctattctatccggtatccacgattttgatggctgagggacatatgttcgcttcgaattcctgcccttaaggccaattgttcaagattcattcaacaattgaaacatctcccatgattaaatcagtataaggttgctatggtcttgcttgacaaagtttttttttgagggaatttcaactaaatttttgagtgaaactatcaaatactgattttaaaaaatttttataaaaggaagcgcagagataaaaggccatctatgctacaaaagtacccaaaaatgtaatcctaaagtatgaattgcattttttttttgtttggacgaaaggaaaggagtattaccacaagaatgatatcatcttcatatttagatcttttttgggtaaagcttgagattctctaaatatagagaaatcagaagaaaaaaaaaccgtgttttggtggttttgatttctagcctccacaataactttgacggcgtcgacaagtctaacggacaccaagcagcgaaccaccagcgccgagccaagcgaagcagacggccgagacgttgacaccttcggcgcggcatctctcgagagttccgctccggcgctccacctccaccgctggcggtttcttattccgttccgttccgcctcctgctctgctcctctccacaccacacggcacgaaaccgttacggcaccggcagcacccagcacgggagaggggattcctttcccaccgttccttccctttccgccccgccgctataaatagccagccccatccccagcttttttccccaatctcatctcctctctcctgttgttcggagcacacgcacaatccgatcgatccccaaatccccttcgtctctcctcgcgagcctcgtggatcccagcttcaaggtacggcgatcgatcatcccccctccttctctctaccttcttttctctagactacatcggatggcgatccatggttagggcctgctagtttcccttcctgttttgtcgatggctgcgaggcacaatagatctgatggcgttatgacggctaacttgtcatgttgttgcgatttatagtccctttaggagatcagtttaatttctcggatggttcgagatcggtggtccatggttagtaccctaagatccgcgctgttagggttcgtagatggaggcgacctgttctgattgttaacttgtcagtacctgggaaatcctgggatggttctagctcgtccgcagatgagatcgatttcatgatcctctgtatcttgtttcgttgcctaggttccgtctaatctatccgtggtatgatgtagatgttttgatcgtgctaactacgtcttgtaaagttaattgtcaggtcataatttttagcatgcctttttttttgtttggttttgtctaattgggctgtcgttctagatcagagtagaagactgttccaaactacctgctggatttattgaacttggatctgtatgtgtgtcacatatcttcataaattcatgattaagatggattgaaatatcttttatctttttggtatggatagttctatatgttggtgtggctttgttagatgtatacatgcttagatacatgaagcaacgtgctgctactgtttagtaattgctgttcatttgtctaataaacagataaggatatgtatttatgttgctgttggttttgctggtactttgttggatacaaatgcttcaatacagaaaacagcatgctgctacgatttaccatttatctaatcttatcatatgtctaatctaataaacaaacatgcttttaaattatcttcatatgcttggatgatggcatacacagcggctatgtgtggttttttaaatacccagcatcatgggcatgcatgacactgctttaatatgctttttatttgcttgagactgtttcttttgtttatactgaccctttagttcggtgactcttctgcaggtcgactttaacttagcctaggatccatggcccagtccaagcacggcctgaccaaggagatgaccatgaagtaccgcatggagggctgcgtggacggccacaagttcgtgatcaccggcgagggcatcggctaccccttcaagggcaagcaggccatcaacctgtgcgtggtggagggcggccccttgcccttcgccgaggacatcttgtccgccgccttcatgtacggcaaccgcgtgttcaccgagtacccccaggacatcgtcgactacttcaagaactcctgccccgccggctacacctgggaccgctccttcctgttcgaggacggcgccgtgtgcatctgcaacgccgacatcaccgtgagcgtggaggagaactgcatgtaccacgagtccaagttctacggcgtgaacttccccgccgacggccccgtgatgaagaagatgaccgacaactgggagccctcctgcgagaagatcatccccgtgcccaagcagggcatcttgaagggcgacgtgagcatgtacctgctgctgaaggacggtggccgcttgcgctgccagttcgacaccgtgtacaaggccaagtccgtgccccgcaagatgcccgactggcacttcatccagcacaagctgacccgcgaggaccgcagcgacgccaagaaccagaagtggcacctgaccgagcacgccatcgcctccggctccgccttgccctccggactcagatctcgatagggtaccaatggccagttaacagatccagctgctgctgttctagggttcacaagtctgcctatttgtcttccccaatggagctatggttgtctggtctggtccttggtcgtgtcccgtttcattgtgtactatttacctgtaatgtgtatccttaagtctggtttgatggtgtctgaaacgttttgctgtggtagagcagcatggaagaactataatgaataagtgatccctaatcattgtgtccaaattttgcttctgctatacccttttgtgctgtttcttatgttttgcttaaaaatttgatctgacaaacaaatttgtctaaattatgctcttgttctgactgtgtactgtacacatttgtattgctaccggtttggcacatagttttctctttgattgcagatcaaacccttctgattgcagattgcttggctatggctgatgtgctcactgttcttctttagcttgtatattgctgatggtggcttggctacggctgaaaaagttgctgctgcgccgacttggcaactgttgctccagtaatgctttgtcctctcttcctagccgccgacttggcacttggcagctgttgctcctgtaatgcgttgttatctcttatctcttgagatgtactatgattttgaggctgtttgacttgtgccagattgccagtgctgatgctatattatctcaggtttttatgctagtatatgttttactgtgtgctgcctgtgtcgagttacgtaatctattgaaccgctatgcgtgttgatgccctgttgttgcttgccagattgatgcccctgttgcttgcagcttgcaagctgtagtgaaatcctaaaattcgaaaccaaatctattctgaacttttgaagatctgtgatgtccggaagaaaagattcaaacagataaacgggactctccagaatctataaaataaatgatcgacaaacgctttgctttggtaggcttcctagttagttagcggaccgaagcttcggtgaattcaggtgactcttagcgatccgacggcgtcttcaccgccccgccgccgcccgagccggacttgtcgctgccgccgccgctgctcatcttgcgcgcttgtgtccctccctcagtccctgcgttcgcggatcgcgggcgggtgcgacccgtttggactccggccggtagccttcgtgccgacctcgctcggtccaccggtttgtcggggacccacatgtcagtgaaggtacgcgtccacgtccacagaccctactaccccagacgagtccaaatcgctgttccctcacactctcgtgtaccagcgcgcggcggaaagcacctttccaacaaccgccgacacgtcggtcccacgtcggcatgctccaccggtcagtgtttggcgtgtacggctcccggcgacgaacgagtgtggcctaagctttcctactcccatcccatctgagccacacatctctctcacgccacgcgcacaaaacagccaggctcccacgcgcatcaaccggctctccctttccgtgccactcgcccccaagccccaaaccctcgccgccgcctccgagacagccgccgccacctaggccatggccaccgccgccgccgcgtctaccgcgctcactggcgccactaccgctgcgcccaaggcgaggcgccgggcgcacctcctggccacccgccgcgccctcgccgcgcccatcaggtgctcagcggcgtcacccgccatgccgatggctcccccggccaccccgctccggccgtggggccccaccgagccccgcaagggtgctgacatcctcgtcgagtccctcgagcgctgcggcgtccgcgacgtcttcgcctaccccggcggcgcgtcgatggagatccaccaggcactcacccgctcccccgtcatcgccaaccacctcttccgccacgagcaaggggaggcctttgccgcctccggctacgcgcgctcctcgggccgcgtcggcgtctgcatcgccacctccggccccggcgccaccaacctagtctccgcgctcgccgacgcgctgctcgattccgtcccgatggtcgccatcacgggacaggtggcgcgacgcatgattggcaccgacgccttccaggagacgcccatcgtcgaggtcacgcgctccatcaccaagcacaactacctggtcctcgacgtcgacgacatcccccgcgtcgtgcaggaggctttcttcctcgcctcctctggtcgaccagggccggtgcttgtcgacatccccaaggacatccagcagcagatggcggtgcctgtctgggacaagcccatgagtctgcctgggtacattgcgcgccttcccaagccccctgcgactgagttgcttgagcaggtgctgcgtcttgttggtgaatcgcggcgccctgttctttatgtgggcggtggctgcgcagcatctggtgaggagttgcgacgctttgtggagctgactggaatcccggtcacaactactcttatgggcctcggcaacttccccagcgacgacccactgtctctgcgcatgctaggtatgcatgggacggtgtatgcaaattatgcagtggataaggccgatctgttgcttgcacttggtgtgcggtttgatgatcgcgtgacagggaagattgaggcttttgcaagcagggctaagattgtgcacgttgatattgatccggctgagattggcaagaacaagcagccacatgtgtccatctgtgcagatgttaagcttgctttgcagggcatgaatgctcttcttgaaggaagcacatcaaagaagagctttgactttggctcatggaacgatgagttggatcagcagaagagggaattcccccttgggtataaaacatctaatgaggagatccagccacaatatgctattcaggttcttgatgagctgacgaaaggcgaggccatcatcggcacaggtgttgggcagcaccagatgtgggcggcacagtactacacttacaagcggccaaggcagtggttgtcttcagctggtcttggggctatgggatttggtttgccggctgctgctggtgcttctgtggcaaacccaggtgtcactgttgttgacatcgatggagatggtagctttctcatgaacgttcaggagctagctatgatccgaattgagaacctcccagtgaaggtctttgtgctaaacaaccagcacctggggatggtggtgcagttggaggacaggttctataaggccaacagagcgcacacatacttgggaaacccagagaatgaaagtgagatatatccagatttcgtgacgatcgccaaagggttcaacattccagccgtccgtgtgacaaagaagaacgaagtccgcgcagcgataaagaagatgctcgagactccagggccgtacctcttggatataatcgtcccacaccaggagcatgtgttgcctatgatccctagtggtggggctttcaaggatatgatcctggatggtgatggcaggactgtgtactgacttcgaataggtacccggggatcctctagtgccgtgggtcgtttaagctgccgctgtacctgtgtcgtctggtgccttctggtgtacctgggaggttgtcgtctatcaagtatctgtggttggtgtcatgagtcagtgagtcccaatactgttcgtgtcctgtgtgcattatacccaaaactgttatgggcaaatcatgaataagcttgatgttcgaacttaaaagtctctgctcaatatggtattatggttgtttttgttcgtctcctaatatttgcctgggatcaaattttattggctggtgttcatttgacctccatgttcttgctaggctccattttttactctacagccataatatgtttgattgtttggtttgttctttgttgtacacctggttctgtcgagcttagttttcgacactggcttacagcttaacatgttgctattttattgggttctgattgctattttattgggttctgattgctagtttttgctgaatccaaaaaccatgttatttatttaagcgatccaggttattattatgatggtggctaagtttttttttttccaagggtaaattttctggattctccagtgtttctgtggcctgtttctgtggccgaattcaatcactagagtcgacctgcatgattccgatgacttcgtaggttcctagctcaagccgctcgtgtccaagcgtcacttacgattagctaatgattacggcatctaggaccgactagctagctagctaagagctcggtaccgagctcgaattcattccgattaatcgtggcctcttgctcttcaggatgaagagctatgtttaaacgtgcaagcgctactagacaattcagtacattaaaaacgtccgcaatgtgttattaagttgtctaagcgtcaatttgtttacaccacaatatatcctgcca

SEQ ID NO: 255 - DNA, 24377 bp, synthetic construct
  misc_feature 1..24377: note = PHP98328
  source 1..24377: mol_type = other DNA
gtttacccgccaatatatcctgtcaaacactgatagtttaaactgaaggcgggaaacgacaatctgatcatgagcggagaattaagggagtcacgttatgacccccgccgatgacgcgggacaagccgttttacgtttggaactgacagaaccgcaacgttgaaggagccactcagcaagctggtacgattgtaatacgactcactatagggcgaattgagcgctgtttaaacgctcttcaactggaagagcggttacgctgtttaaacgctcttcaactggaagagcggttactaccggttcactagctagctgctaatcgagctagttaccctatgaggtgacatgaagcgctcacggttactatgacggttagcttcacgactgttggtggcagtagcgtacgacttagctatagttccggacttacccttaagcgatttaaatctgcggttaccgaattcgagctcggtacctagtacccttgtacttttggtttcacctgcatagagaaaacccacaagaatatgacagtctgatttgtcagtctcattctcaagcaacatttctctatccgttactttcatggtgaataacacaatccatcatcaatactttgtgttactcagaaactgaaagttattccgagtcttgcatatctttggacctactcgtttttctaccattattgctgattgttaagctctcgctacttgaatcggcattgttggagtgggaaggttcaaaaaattggagttatgactagttgtctctttctatgtacgatggagaaaatgaataaacaactgagaaaatggctcttgtttagttgatgatgctcttaagctttccactggttgccatatatgatttgggcatttcactttgatcttaatgggccttgtaaagcccaagactcatgattatctttagttgatgctcttaattaggtgtgggcaaataattcaaactgtatgtacccgaccaaaaccaaagcaaaaataatcgaaccaaaccgaaaatttaaaaataaccgaatgaaaactaaatcctataactgaaagaactgaaaccgaatcaaaatatttaatgtaaccaaaaatatccgaaatataattatattgtcaaaaatattaataatttctagattaaataattaaaaatacttaaaaatttatataaaatagtaaaaatactcgaaaataaccacaaatattcaaaaacaaccgaaatatcccaaaatattcaaagcaaaataaccgaatggataccaaattttaaaaccgaaaaaactggaacaaaaccaaaatcgaaccaaaatttcaaaaatcgaataaatactaaactttagaacaaaaaaaaacgataaccgaatgtatacgaaccaaagccgaattagataaccgaacgtccaggactactcttaatctttccgccacttatgatttgggctattactttgtttataatgagccttttcaagctcaagttcatgattgtccgtgagatgagaaactgacttgttggattcgaaaccctagctagtattggttaatacttaatacataaatgacctgcattgacatcatcatccaagaaaataaaaattgtatgcttgagatatttagttttcctagctaggttttctttattttagtaccgaatctttaggtgtgccacgttaatttagacccattttttcatacttaccaactgagtctagtttaatcatgactataatcgtataaaatgattcagtcgacgtcattgcgaacgtatataaaatcatccaaattgacgtcattccaaagaggtaagcatgcttatctaagagtccgagcatactaaacaagacgacattttatttgcactccaaatcaaattttgtattgcctaaagaaaaacaatcaaactcaagtttcttaaaattaatttcattcaaactaatcactttcaatatctcacatattattcatgccatttctatttgtctaaacatgatttaaaaaaaaaagtaaaatacaaagattactatgcaaaaactctataaaaaaaaattcaaatttcttatttatttgtgacatcaaattttcaaaataatttttttaattatcggttgatccggtcagtcgataaaaacataaactttcagcgaccgttaaaactttcctactaccgatttagagaaaatcttagcttgaaacgtaattgtaacctgccttcatgcaagtcgcaagatatgtcatcctaagttgtatatgttttctcaaaagatgtatttacttgagaaaatacgtttcaacgttgatggacaaccaattaagaatcaagcacctttcgtaatcaatttaggcttatcgtctaaggtatactgatttacgacagttgactagacttataaggaacaaaataatagaatagtttctaaacacttcacctaatcatagagactaagatggtaattcgtaaacgacaaagcctagtgacactgtccattgtaaaattccacatcatattagtattaaacatatacatgtagtttcctgaacacatgtagtatcaaacacacttcgtggcttcttcctcgaaacctgcggccgcgctatagttccggacttacccttaagataacttcgtatagcatacattatacgaagttatgggcccacgcgtgaagagcggttaccagagctggtcacctttgtccaccaagatggaactgtcttcggccagaatggccatctggattcagcaggcctagaaggccatttatcgctatcaactttgtatagaaaagttgggccgaattcgagctcggtacggccagaatggcccggaccgaagcttgcggccgcacactgatagtttaaacccgcgtgcgccgtggaatccgcctggatcgctgggggcgtttccaactgatcccccgcggccttccgtcgaatccgcctggatcggccgccacttggcaggccgcgaaggatctcagcccaggaaaagcccacggctccaaggcgcaaatgaaagaggagaagagaaaatcgtgagaaaactcactggaggagaaaaatggctatagtaaaattagtgaaatacccaatccggaaaaaacgtctagtgcttcgcctacttcctcaaacaaaagagacgcgcgaagggcagagcctcagccacccagcagtaatagcagccgtggtgcccgttgagattccccgcgccgttccgtcgaatcgatcagccgcgcgcccggcgcccctgcacatatattatacccaatgcccacacctcacaaccacttgctaacgcgcgcggcggtgacctaggctgcggtggactggtcatcgctccccgccgacgtgttcctagccaccaccggtctcgactactacatgagcctccgcgccgcgtgccgcccctgccgcgccgccaccgcggacccgcgcggtccggaccggcgcttccatccccgccggtggatcatgctcgaactgaatatccatgtttcaagagatattgttaagtccaaagctttcaaactgaatatccatgtttcatcgaaatagggtacaaaactttcgagtttgtggatgttcaacccaaaatccataacatacaacggttcagcctatttcttgagttgacagttcgcaattcctagtggcaatgaatacatgctagctactcccctttaactaatgaatacttggctcgaaacctctcgaccattgagcttaatgagtccagccgagtttgattttgaactggtcaacgaaacatttgagtcaagccgagcataattctgagttcgttaataaaacaactttaaccactcaagcaacgagctactcgtttaacaccatcccctcttctccccttggtccttggtccatccctctttttgacctaactcaatatccacccacattccttgacacacaagcaaaaccactcttgactcgcgtcctcctctcatatggcatatatgttaatttattaacgatcgagttaaacaaaccaattttgtagttaaattgagtcgagcccatgtcgcttttgaacatgatatactattaacgagtcgagctaactgttgtaactagtgtgttatcttaattggttctaccaattcgagccaagctaactactccctccgttacataaagattggcacggatatccggctctactcacacggacatgtggtcataatgcaaaagatgcaaatgaacaattctgaacaggagatttgatatcagaacctttggttatgtggcatgtgcctttaaccgtgtggagctaacaatttaacttaatccgtattataatctcacgcacactgtgcttgattcttcttgctttgcttcccttggtgcgggtgcacatctcagagcatacggacggtatagaaagaaggtgcagtgcgtcccagactaaccaaactttttttttggctatacaaaatgcacggttgtttgttgcacgcaacgacgattgttccttttgccaaagtaaataaataagcatctctcgtcgaagatcattatttttctaattctctacctcgtgaaagctggaagtggccacgtcaccggcaaaactaaccaacggtaatatctcccggaaaaatccaccgagccagcccttcgctagcgccaaagaagttcaccgcgcgcacggccaaaatccacgcaagaccagcgaaatctcgtggtctccactctctgctcgcccggcgcggcgagaagataatctcatggccaccgcacggccacatcagcgagccaccgcagcatccccgtgaggacattgaccccaccccatcgccctcggctcagactcaaacccatcaaaaatccgcgcgcgcccacggtgccagccactccgtggccagagcgcggccacctcggcaacccccatccgccttcccggcacctcacagcgcgcgcgccaatggcgactcggcttaagattccccgtggataaggactcgaacgtaagcgcttacgacgtaagcgcttacgtcgcgcgcgttcgggcctcctatttaaacgcctctcgctcccgctttactccacagcaacaaccgctccaacacttcagttctcactccacagctcagagtcagagctactagcagaattcttgtaaggttcccttccctcctcccctcacacccctgttcgtgttccttcggatcggatctcagtggtgatgttagacgtccgcggctgcctacgtagtggcattgccgcccgaaaggtttgtttaggtggggtagatccgaaacaggccggatctggaccatgtccgcggcggggcggcgggacttgatcgcgtagctgtcgtgtgcatttctccctaccagtggcggaatcggcgatgtggacctaagggctaaggcttatctgctgccttgaccatttcgtcgctgacaaaaacaaagtgacaatcatgccgttctctgtttgtttatctggatcgttattacgctgtgaatcctgcgatatgtggctaagtgatttttcttctttttctgggggcagtttagcctttgacccagtcctaggtgtggtcactaggactgtgtagcatgatgagtgaggttgcagcaggctgattgctagtggacgtttttttccccaatttgttaggttttcacgctccaggttgtgcaagtaattttgctagtgattgtgtgatccatcttcaacgttgaaccttgtttttccccctaaaacccccaacaggaaatcttgccccgacttctattgcaaaaattgtaacgcttagcaccctgattgactcaattcctgtcactaggcatgctcggtcaaaagcagatgatttaccacttagaaactgccctgcccctgctttccacatagcatttcgaactttttgactactattgacacccccctaacttgccgaactatttctctcttcagctactatttacctagttataattacataaatgtttgtgtgtatcttgtgcagcccgggggatctcgactctagaggatcgctcaggaaggccgctgagatagaggcatggcggccaatgcgggcggcggtggagcgggaggaggcagcggcagcggcagcgtggctgcgccggcggtgtgccgccccagcggctcgcggtggacgccgacgccggagcagatcaggatgctgaaggagctctactacggctgcggcatccggtcgcccagctcggagcagatccagcgcatcaccgccatgctgcggcagcacggcaagatcgagggcaagaacgtcttctactggttccagaaccacaaggcccgcgagcgccagaagcgccgcctcaccagcctcgacgtcaacgtgcccgccgccggcgcggccgacgccaccaccagccaactcggcgtcctctcgctgtcgtcgccgccgccttcaggcgcggcgcctccctcgcccaccctcggcttctacgccgccggcaatggcggcggatcggctgtgctgctggacacgagttccgactggggcagcagcggcgctgccatggccaccgagacatgcttcctgcaggactacatgggcgtgacggacacgggcagctcgtcgcagtggccacgcttctcgtcgtcggacacgataatggcggcggccgcggcgcgggcggcgacgacgcgggcgcccgagacgctccctctcttcccgacctgcggcgacgacggcggcagcggtagcagcagctacttgccgttctggggtgccgcgtccacaactgccggcgccacttcttccgttgcgatccagcagcaacaccagctgcaggagcagtacagcttttacagcaacagcaacagcacccagctggccggcaccggcaaccaagacgtatcggcaacagcagcagcagccgccgccctggagctgagcctcagctcatggtgctccccttaccctgctgcagggagtatgtgagagcaacgcgagctgccactgctcttcactgatgtctctggaatggaaggaggaggaagtgagcatagcgttggtgcgttgctgtcaagggcgaattcacatggttaacctagacttgtccatcttctggattggccaacttaattaatgtatgaaataaaaggatgcacacatagtgacatgctaatcactataatgtgggcatcaaagttgtgtgttatgtgtaattactagttatctgaataaaagagaaagagatcatccatatttcttatcctaaatgaatgtcacgtgtctttataattctttgatgaaccagatgcatttcattaaccaaatccatatacatataaatattaatcatatataattaatatcaattgggttagcaaaacaaatctagtctaggtgtgttttgcgaatgcggccgccaccgcggtggagctcgaattccggtccgggcctagaaggccagcttcaagtttgtacaaaaaagcaggctccggccagaatggcccggaccgggttaccgaattcgagctcggtaccatttaaattgcgcccgccacggccgtggaggtcgtattccggtcagcttgcatccctgcagtgcagcgtgacccggtcgtgcccctctctagagataatgagcattgcatgtctaagttataaaaaattaccacatattttttttgtcacacttgtttgaagtgcagtttatctatctttatacatatatttaaactttactctacgaataatataatctatagtactacaataatatcagtgttttagagaatcatataaatgaacagttagacatggtctaaaggacaattgagtattttgacaacaggactctacagttttatctttttagtgtgcatgtgttctcctttttttttgcaaatagcttcacctatataatacttcatccattttattagtacatccatttagggtttagggttaatggtttttatagactaatttttttagtacatctattttattctattttagcctctaaattaagaaaactaaaactctattttagtttttttatttaataatttagatataaaatagaataaaataaagtgactaaaaattaaacaaataccctttaagaaattaaaaaaactaaggaaacatttttcttgtttcgagtagataatgccagcctgttaaacgccgtcgacgagtctaacggacaccaaccagcgaaccagcagcgtcgcgtcgggccaagcgaagcagacggcacggcatctctgtcgctgcctctggacccctctcgagagttccgctccaccgttggacttgctccgctgtcggcatccagaaattgcgtggcggagcggcagacgtgagccggcacggcaggcggcctcctcctcctctcacggcaccggcagctacgggggattcctttcccaccgctccttcgctttcccttcctcgcccgccgtaataaatagacaccccctccacaccctctttccccaacctcgtgttgttcggagcgcacacacacacaaccagatctcccccaaatccacccgtcggcacctccgcttcaaggtacgccgctcgtcctcccccccccccctctctaccttctctagatcggcgttccggtccatgcatggttagggcccggtagttctacttctgttcatgtttgtgttagatccgtgtttgtgttagatccgtgctgctagcgttcgtacacggatgcgacctgtacgtcagacacgttctgattgctaacttgccagtgtttctctttggggaatcctgggatggctctagccgttccgcagacgggatcgatttcatgattttttttgtttcgttgcatagggtttggtttgcccttttcctttatttcaatatatgccgtgcacttgtttgtcgggtcatcttttcatgcttttttttgtcttggttgtgatgatgtggtctggttgggcggtcgttctagatcggagtagaattctgtttcaaactacctggtggatttattaattttggatctgtatgtgtgtgccatacatattcatagttacgaattgaagatgatggatggaaatatcgatctaggataggtatacatgttgatgcgggttttactgatgcatatacagagatgctttttgttcgcttggttgtgatgatgtggtgtggttgggcggtcgttcattcgttctagatcggagtagaatactgtttcaaactacctggtgtatttattaattttggaactgtatgtgtgtgtcatacatcttcatagttacgagtttaagatggatggaaatatcgatctaggataggtatacatgttgatgtgggttttactgatgcatatacatgatggcatatgcagcatctattcatatgctctaaccttgagtacctatctattataataaacaagtatgttttataattattttgatcttgatatacttggatgatggcatatgcagcagctatatgtggatttttttagccctgccttcatacgctatttatttgcttggtactgtttcttttgtcgatgctcaccctgttgtttggtgttacttctgcaggtcgactctagaggatccatggccactgtgaacaactggctcgctttctccctctccccgcaggagctgccgccctcccagacgacggactccacactcatctcggccgccaccgccgaccatgtctccggcgatgtctgcttcaacatcccccaagattggagcatgaggggatcagagctttcggcgctcgtcgcggagccgaagctggaggacttcctcggcggcatctccttctccgagcagcatcacaaggccaactgcaacatgatacccagcactagcagcacagtttgctacgcgagctcaggtgctagcaccggctaccatcaccagctgtaccaccagcccaccagctcagcgctccacttcgcggactccgtaatggtggcttcctcggccggtgtccacgacggcggtgccatgctcagcgcggccgccgctaacggtgtcgctggcgctgccagtgccaacggcggcggcatcgggctgtccatgattaagaactggctgcggagccaaccggcgcccatgcagccgagggtggcggcggctgagggcgcgcaggggctctctttgtccatgaacatggcggggacgacccaaggcgctgctggcatgccacttctcgctggagagcgcgcacgggcgcccgagagtgtatcgacgtcagcacagggtggagccgtcgtcgtcacggcgccgaaggaggatagcggtggcagcggtgttgccggcgctctagtagccgtgagcacggacacgggtggcagcggcggcgcgtcggctgacaacacggcaaggaagacggtggacacgttcgggcagcgcacgtcgatttaccgtggcgtgacaaggcatagatggactgggagatatgaggcacatctttgggataacagttgcagaagggaagggcaaactcgtaagggtcgtcaagtctatttaggtggctatgataaagaggagaaagctgctagggcttatgatcttgctgctctgaagtactggggtgccacaacaacaacaaattttccagtgagtaactacgaaaaggagctcgaggacatgaagcacatgacaaggcaggagtttgtagcgtctctgagaaggaagagcagtggtttctccagaggtgcatccatttacaggggagtgactaggcatcaccaacatggaagatggcaagcacggattggacgagttgcagggaacaaggatctttacttgggcaccttcagcacccaggaggaggcagcggaggcgtacgacatcgcggcgatcaagttccgcggcctcaacgccgtcaccaacttcgacatgagccgctacgacgtgaagagcatcctggacagcagcgccctccccatcggcagcgccgccaagcgcctcaaggaggccgaggccgcagcgtccgcgcagcaccaccacgccggcgtggtgagctacgacgtcggccgcatcgcctcgcagctcggcgacggcggagccctggcggcggcgtacggcgcgcactaccacggcgccgcctggccgaccatcgcgttccagccgggcgccgccagcacaggcctgtaccacccgtacgcgcagcagccaatgcgcggcggcgggtggtgcaagcaggagcaggaccacgcggtgatcgcggccgcgcacagcctgcaggacctccaccacctgaacctgggcgcggccggcgcgcacgactttttctcggcagggcagcaggccgccgccgctgcgatgcacggcctgggtagcatcgacagtgcgtcgctcgagcacagcaccggctccaactccgtcgtctacaacggcggggtcggcgacagcaacggcgccagcgccgtcggcggcagtggcggtggctacatgatgccgatgagcgctgccggagcaaccactacatcggcaatggtgagccacgagcaggtgcatgcacgggcctacgacgaagccaagcaggctgctcagatggggtacgagagctacctggtgaacgcggagaacaatggtggcggaaggatgtctgcatgggggactgtcgtgtctgcagccgcggcggcagcagcaagcagcaacgacaacatggccgccgacgtcgggcatggcggcgcgcagctcttcagtgtctggaacgacacttaagcgtacgtgccggcctggctctccgaaagggcgtattccagcacactggcggccgttactagacccaacctagacttgtccatcttctggattggccaacttaattaatgtatgaaataaaaggatgcacacatagtgacatgctaatcactataatgtgggcatcaaagttgtgtgttatgtgtaattactagttatctgaataaaagagaaagagatcatccatatttcttatcctaaatgaatgtcacgtgtctttataattctttgatgaaccagatgcatttcattaaccaaatccatatacatataaatattaatcatatataattaatatcaattgggttagcaaaacaaatctagtctaggtgtgttttgcgaatgcggcctccgggcacccagctttcttgtacaaagtggccgttaacggatcggccagaatggcccggaccgggttaccgaattcgagctcggtaccctggttcacaaactcaatacaacacacagtggagtagggtattacgctccggcggcccgaaccactctaaatccttgtgtcctcgtgtgctcttccaccattaatgactgtaattgcagggacacgaagagttgtagcgcttttgccaacaagatccgctatatgctagtagagtggaacctgcacagcaacaagcatccaataatctgagaataagaattatgtgtggtgatggttctcatctctgcaactcgccattttcgcgagagaaccaaatccaagttggtgaagatcatgatttgggctcatgggctggcatagtagctattacctttgcaattgtggttcgaatctatccgatattctccttttcagggagagctaatgcttatgcttattgggtattttggtttgacactgcttcacgcccaaaaaaaggcaactatgtctgagttggatatggcccaaaaaaaggcagctatgtctgagttggatatggaagtcttctttcgtttagggtgaagtaagaccaagctcatgagcttattatcttaggtcggaacaaattagttgataggcatggcacatttatcaaattataatgattttaacagaaaagcaacacctctttttcagcagcaccagctttgcaagctgcaattgacactccaagcatagtatttgctccaaactcagcctgcatttcgcacaatatcatatctatttccatttggataaaatatattttccagaaatatgggaacagaatcaagatacagaaaaaagttgtggtagtagtggtaagtggaaacacaagtacagtgaaaagatagcattatttctgaacagtcaaattaaccgaaataagtagtatcacatactgcccctaaattgactacacccaatgtaaagaattgcttgagcatattgagccatcagttgtttgtttgtgtaacggatttgacaatgcagagttcaggagcaaaaaaccgcaaaggagagaaagagggaaaggatctcctagtatcccaccttgtggcgcgccctgtcaagtgcatgatggcctggtcgatctgcgtctgctgctgcggttccatcccaacgagtgcctccgacaccttgtcgttgatcacccgcaccgcgtaggcgacccccctggcgaggaacttccgcctctcggaggccccggccgcgtcggcggcggcgccctcgagcgcgcccacgctagccgtagatgctcggtgcacggccttgttggtgtgcaactcgacctcaacggccggtgcgctacgcccgtcaaggatctggcgcgcccgcaccctcgtgatcacggtgggcgcctcccgcctcatgtggccgacgatgaaaagcgccgggttaggggccttggcgcgcaccgccgtattcagggcctcctcgctcttgcgcgagagcaggtgcttccccaggtactcctgcactgacaaggctgccacagcggtggaatttgtcctcacgacttcgccacgtcgtcctcacctccctggcttcccacgactccgccgtatcgaggtgctcggtgggtcgtcttaatccgaagtccgaactaggaagacgagacagagaggtctgaggaatgggcctcgtttgatgttgagctgaattatttttccagcataagcccaggtcttggtccatgaacaaaattactagaaacccagcccagtactacgatctaaaagagggactgccactggatagctctctctagcattctccacgctccaatacagcggcgtcgtgtctatccgggtctatccgcgaacacgtgagaactctccagaaactgctttctcctccacttcatctctctcgctttccctctataaaaagaccccttctaggaattgagggagacagcaagcaccaagcagcgatccgaagctcaatcaattcactcaaacctcttccccaaatcttcgattagatcttcgttgacaagaagactagaaccgaacctgacatgtccaacctgctcacggttcaccagaaccttccggctcttccagtggacgcgacgtccgatgaagtcaggaagaacctcatggacatgttccgcgacaggcaagcgttcagcgagcacacctggaagatgctgctctccgtctgccgctcctgggctgcatggtgcaagctgaacaacaggaagtggttccccgctgagcccgaggacgtgagggattaccttctgtacctgcaagcgcgaggtttgtttctgcttctacctttgatatatatataataattatcattaattagtagtaatataatatttcaaatatttttttcaaaataaaagaatgtagtatatagcaattgcttttctgtagtttataagtgtgtatattttaatttataacttttctaatatatgaccaaaacatggtgatgcctaggtctggcagtgaagaccatccagcaacaccttggacaactgaacatgcttcacaggcgctccggcctcccgcgccccagcgactcgaacgccgtgagcctcgtcatgcgccgcatcaggaaggaaaacgtcgatgccggcgaaagggcaaagcaggccctcgcgttcgagaggaccgatttcgaccaggtccgcagcctgatggagaacagcgacaggtgccaggacattaggaacctggcgttcctcggaattgcatacaacacgctcctcaggatcgcggaaattgcccgcattcgcgtgaaggacattagccgcaccgacggcggcaggatgcttatccacattggcaggaccaagacgctcgtttccaccgcaggcgtcgaaaaggccctcagcctcggagtgaccaagctcgtcgaacgctggatctccgtgtccggcgtcgcggacgacccaaacaactacctcttctgccgcgtccgcaagaacggggtggctgcccctagcgccaccagccaactcagcacgagggccttggaaggtattttcgaggccacccaccgcctgatctacggcgcgaaggatgacagcggtcaacgctacctcgcatggtccgggcactccgcccgcgttggagctgctagggacatggcccgcgccggtgtttccatccccgaaatcatgcaggcgggtggatggacgaacgtgaacattgtcatgaactacattcgcaaccttgacagcgagacgggcgcaatggttcgcctcctggaagatggtgactgaggtacccaacctagacttgtccatcttctggattggccaacttaattaatgtatgaaataaaaggatgcacacatagtgacatgctaatcactataatgtgggcatcaaagttgtgtgttatgtgtaattactagttatctgaataaaagagaaagagatcatccatatttcttatcctaaatgaatgtcacgtgtctttataattctttgatgaaccagatgcatttcattaaccaaatccatatacatataaatattaatcatatataattaatatcaattgggttagcaaaacaaatctagtctaggtgtgttttgcgatccgatatcgaattggccacggtaccagctgctgctgttctagggttcacaagtctgcctatttgtcttccccaatggagctatggttgtctggtctggtccttggtcgtgtcccgtttcattgtgtactatttacctgtaatgtgtatccttaagtctggtttgatggtgtctgaaacgttttgctgtggtagagcagcatggaagaactataatgaataagtgatccctaatcattgtgtccaaattttgcttctgctatacccttttgtgctgtttcttatgttttgcttaaaaatttgatctgacaaacaaatttgtctaaattatgctcttgttctgactgtgtactgtacacatttgtattgctaccggtttggcacatagttttctctttgattgcagatcaaacccttctgattgcagattgcttggctatggctgatgtgctcactgttcttctttagcttgtatattgctgatggtggcttggctacggctgaaaaagttgctgctgcgccgacttggcaactgttgctccagtaatgctttgtcctctcttcctagccgccgacttggcacttggcagctgttgctcctgtaatgcgttgttatctcttatctcttgagatgtactatgattttgaggctgtttgacttgtgccagattgccagtgctgatgctatattatctcaggtttttatgctagtatatgttttactgtgtgctgcctgtgtcgagttacgtaatctattgaaccgctatgcgtgttgatgccctgttgttgcttgccagattgatgcccctgttgcttgcagcttgcaagctgtagtgaaatcctaaaattccaaaccaaatctattctgaacttttgaagatctgtgatgtccggaagaaaagattcaaacagataaacgggactctccagaatctataaaataaatgatcgacaaacgctttgctttggtaggcttcaagcttggtcacccggtccgggcctagaaggccagcttcggccgccccgggcaactttattatacaaagttgatagataaatcagatatctggttcctaaggacccggcggaccgattaaactgattcggtccgacgcgttacctaataacttcgtatagcatacattatacgaagttattagctaactaactagtaagcttaagccatgggtcgacggatccgttaactagcgtggcatttggcaccgccgcacactatgcgagctaggagtgctagtttacagatgaaactatgaaaccaagaaaacacaattgtccgtagctagcgcgtggcgtcgtgtcaagcttcacacagtatcttcgttcttcactataaatcgcgcctgttgttcgtgagacccaccaccgtggataacagtcccctaataataagcgatcaacagcactgctgatggctgaacaccgaggcgccgccgcgcgtaaccatccgccggagcagcccgtcgtgccggcgaacgacgccttccccgaccgcgcccagcagctctgcctcgacgccgggcgcgcgctcgcgatgtgcggcgtgctcgtcgccgtccctcccgcattttacgcgtcgacgtcgcggacgacaccgcacttgccttcgtcggcttcgtcctctggatcatcggtgcgtggctgtgcctcctggcgctcacgcccttggctccacgggcggtgagggcgggcggggccgccgccagcaccttgctgatcaggtgcctgtccctttcatgaactactagcgcccgcgcccgcggccgccgggcacaagagaacacatcgatgttcgctgcgtacgtcagcaataaggcactctttgtcagtagtcgagtgcatatgttgggtgtttgccctgggagatttcaagtgttgtggccattatcccgcaggataaaaaatcggcggcttttggattgatacggaaaataacgatgtttcatgctcgtgttgtgtgtgtgacatcttgtcagccaagtttttaaccgttgctactccccctctgtgggctcagtgtgtggaccggaatacgtcgtacataggccgtagcctaagcccaatatgccgtttttcaggttggcctgtgtgacgacaagcgggtctcaaaagcccatcacgcaactggcctgcaattattggaggagagcgcgtcgagttggttccagaggctgcgtggtggggccggactctgcgacgacctctcgttcgcgtccgatttggttgccgtgagccgtgacgtaacgcctccttccgttcctccctatataagttccacccccgggtccggtttccccaagccccagtgacccccgatcccgatcgcgaaatctccgcacccgccggcaagggaccgaagcaagcctctctcccgaccgtcgcatcaaggtacgcgtccgctcgatctgtcctcttccttctcgatttgacttgctgtggtgcccgatcacgggatcagaatcgcaccagtgtagatttcgcatgttctaagatgtgttagtttccaggctaatccagttctcttgacgcccgatccgatcgagctccgtgtttatttcagcctaatcgtagtattcccctaaaatttcctcattagggggttcgcaagattgttggtcgacaggttcacttatgctcgatcgcttacttttagtcgattcatgctgcgtactattgttgccccccgtggttttatcttttctcgtgtgaaatccagtagatatagtagatatcgtagcattaggttttaattcaatcgattgattattgtatcatcaaaattgagaagttcgaatcatgcctatcatgctgcctcaaccgaaatcctgtatattgaagtttcaattcaattgattgatcattcattagattcaaccaaaatctagaaggttagatgacgcatgtcatgctgcctgcgtagtttacctttgatctgtttatgattaccttatcagtaggatatttgtgattttgggaagtagcactaactgattcatgctgacatgatgttccctttcagattatactgttgagtcctatctaattgatgctttgtatgctatatgaatacgtcatggtaaattagcagttaattagcatattagcaattgggcgtacctcatcaggattgctcttgtagatgtgtgtggtgatgtttcttgttcaattcatgttctgctttaaaagtatgtgttctctgtttgttaattaagattcatggttataatgatttggacctaattaatcagggttgcccttttagatgcgtggttacttgttgagttcatttttttcctgctatagttgtatgcgtttgttcattcatggttagatttgatttgtttcttctctattccatgccttccatatacttcaattgtagcttaacatgagatttctgtatatgcaggtcgaccgccggggatccacacgacaccatggcccagtccaagcacggcctgaccaaggagatgaccatgaagtaccgcatggagggctgcgtggacggccacaagttcgtgatcaccggcgagggcatcggctaccccttcaagggcaagcaggccatcaacctgtgcgtggtggagggcggccccttgcccttcgccgaggacatcttgtccgccgccttcatgtacggcaaccgcgtgttcaccgagtacccccaggacatcgtcgactacttcaagaactcctgccccgccggctacacctgggaccgctccttcctgttcgaggacggcgccgtgtgcatctgcaacgccgacatcaccgtgagcgtggaggagaactgcatgtaccacgagtccaagttctacggcgtgaacttccccgccgacggccccgtgatgaagaagatgaccgacaactgggagccctcctgcgagaagatcatccccgtgcccaagcagggcatcttgaagggcgacgtgagcatgtacctgctgctgaaggacggtggccgcttgcgctgccagttcgacaccgtgtacaaggccaagtccgtgccccgcaagatgcccgactggcacttcatccagcacaagctgacccgcgaggaccgcagcgacgccaagaaccagaagtggcacctgaccgagcacgccatcgcctccggctccgccttgccctccggactcagatctcgatagagtcaacctagacttgtccatcttctggattggccaacttaattaatgtatgaaataaaaggatgcacacatagtgacatgctaatcactataatgtgggcatcaaagttgtgtgttatgtgtaattactagttatctgaataaaagagaaagagatcatccatatttcttatcctaaatgaatgtcacgtgtctttataattctttgatgaaccagatgcatttcattaaccaaatccatatacatataaatattaatcatatataattaatatcaattgggttagcaaaacaaatctagtctaggtgtgttttgcgaattgcggcgcccttactttaacgcctctaaccaacacccctttatctttataaggaacaataaacagaatttgccccactgttctaaatcacctaataatatccccagctaaaaacaataaaggtttcctagaattaagacaagcatgactgttcctccaggagggtttggaacattgttgcagtcttgcagatacgggcgaagggtgagaaacagagcggagggctggaggtgacctcggtagtcgacgccggagttgagcttgacaacgacggggcggcccctgatggacttgaggaagtccgatggcgtcttcaccgtcccgccggcgcccgaggcgggcctgtcgctgccgccgccgccgctgctcatcttgcgcgctgtgcccccggcggtgtccctgtgttgcggatcgcgggtgggccaggtggatgcgagggcgacccgtttggactccggccggagccgccggatccctggtcggtgtcagtgccgtttactctgggccccacgtgtcagtaccgtctgtagatgacaacaacccgtcgtccacagtcatgtccaaaatatcctttcttcttttttttcgattcggatatctatcttccttttttttttccaaaaatcttcttgacgcaccagcgcgcacgtttgtggtaaacgccgacacgtcggtcccacgtcgatagaccccacccaccagtgagtagcgtgtacgtattcgggggtgacggacgtgtcgccgtcgtcttgctagtcccattcccatctgagccacacatctctgaacaaaaaaaaggagggaggcctccacgcacatccccctccgtgccacccgccccaaaccctcgcgccgcctccgagacagccgccgcaaccatggccaccgccgccgccgcgtctaccgcgctcactggcgccactaccgctgcgcccaaggcgaggcgccgggcgcacctcctggccacccgccgcgccctcgccgcgcccatcaggtgctcagcggcgtcacccgccatgccgatggctcccccggccaccccgctccggccgtggggccccaccgagccccgcaagggtgctgacatcctcgtcgagtccctcgagcgctgcggcgtccgcgacgtcttcgcctaccccggcggcgcgtccatggagatccaccaggcactcacccgctcccccgtcatcgccaaccacctcttccgccacgagcaaggggaggcctttgccgcctccggctacgcgcgctcctcgggccgcgtcggcgtctgcatcgccacctccggccccggcgccaccaacctagtctccgcgctcgccgacgcgctgctcgattccgtccccatggtcgccatcacgggacaggtggcgcgacgcatgattggcaccgacgccttccaggagacgcccatcgtcgaggtcacccgctccatcaccaagcacaactacctggtcctcgacgtcgacgacatcccccgcgtcgtgcaggaggctttcttcctcgcctcctctggtcgaccagggccggtgcttgtcgacatccccaaggacatccagcagcagatggcggtgcctgtctgggacaagcccatgagtctgcctgggtacattgcgcgccttcccaagccccctgcgactgagttgcttgagcaggtgctgcgtcttgttggtgaatcgcggcgccctgttctttatgtgggcggtggctgcgcagcatctggtgaggagttgcgacgctttgtggagctgactggaatcccggtcacaactactcttatgggcctcggcaacttccccagcgacgacccactgtctctgcgcatgctaggtatgcatgggacggtgtatgcaaattatgcagtggataaggccgatctgttgcttgcacttggtgtgcggtttgatgatcgcgtgacagggaagattgaggcttttgcaagcagggctaagattgtgcacgttgatattgatccggctgagattggcaagaacaagcagccacatgtgtccatctgtgcagatgttaagcttgctttgcagggcatgaatgctcttcttgaaggaagcacatcaaagaagagctttgactttggctcatggaacgatgagttggatcagcagaagagggaattcccccttgggtataaaacatctaatgaggagatccagccacaatatgctattcaggttcttgatgagctgacgaaaggcgaggccatcatcggcacaggtgttgggcagcaccagatgtgggcggcacagtactacacttacaagcggccaaggcagtggttgtcttcagctggtcttggggctatgggatttggtttgccggctgctgctggtgcttctgtggcaaacccaggtgtcactgttgttgacatcgatggagatggtagctttctcatgaacgttcaggagctagctatgatccgaattgagaacctcccagtgaaggtctttgtgctaaacaaccagcacctggggatggtggtgcagttggaggacaggttctataaggccaacagagcgcacacatacttgggaaacccagagaatgaaagtgagatatatccagatttcgtgacgatcgccaaagggttcaacattccagcggtccgtgtgacaaagaagaacgaagtccgcgcagcgataaagaagatgctcgagactccagggccgtacctcttggatataatcgtcccacaccaggagcatgtgttgcctatgatccctagtggtggggctttcaaggatatgatcctggatggtgatggcaggactgtgtactgactagctagtcagttaacagatctgccagatcctcggtgtacaaataacccgtcttatcctatgagacgggccggcgtcagtgtgttctggaggaatttttatgtcagagcctttttctttgtgtgcttgatgtagatgccaagggaagcttattggctgttgaagcttgatgcaaaataaattatggaactctgttttttgtttatctaataataactagcaaatatgcttccattgcattgaaactaacagccttttgtgtttccaagttttattttgtgacaatgtcatctatttcaattagttgtggaatcggaaacttgcaggactaacttggaaactccaatccctcagcatcctggactttttcctggtgtaatccatgtagatattattttaatcatcattttagttctggaggtttttccatctccggttttgctcccctttcttcaaaaaaaaaaaaaaaatgccgtaggcgccgcaacgcccacctgttgttcaaactcatgggcacgagtggctcgaagattttatacaacaattgctgtagtttcaccgttgctggtgaagaagcatttttttaaaaaaatatagtggtattcattttaattagtttagttgtgcagcgagcaaaatttggacatgctctgctcggaatctgatcgacctagacacagattagcagcagtagctttgtcatctgttccaagagttgcgatctgatagaagaaaaaaaaaccttcccttcaatgtaaaaccgaaactaacaagaaagaagcacagtgccgtttaggcaagtatggagtacgtattaagcatgtagaaggccatgcatgaaccactaacaagaaagaagcgcagtgccattcaggcaagcataagcatgtagattggcatgcatgaacaactaacagtagatcgtctctggtctgattagaagttttttgggaagccaagaaatcatgtacaactggttccatctcaaattccgtggcaaaaagaggcctaagcaacatacctcgagtagatcacattcaagcttggtcacccggtccgtcaatattctgattccgatgacttcgtaggttcctagctcaagccgctcgtgtccaagcgtcacttacgattagctaatgattacggcatctaggaccgactagtggcgcgccgactagctagctaaggtaccgagctcgaattcattccgattaatcgtggcctcttgctcttcaggatgaagagctatgtttaaacgtgcaagcgctactagacaattcagtacattaaaaacgtccgcaatgtgttattaagttgtctaagcgtcaatttgtttacaccacaatatatcctgcca

SEQ ID NO: 256 - DNA, 23023 bp, synthetic construct
  misc_feature 1..23023: note = PHP98329
  source 1..23023: mol_type = other DNA
gtttacccgccaatatatcctgtcaaacactgatagtttaaactgaaggcgggaaacgacaatctgatcatgagcggagaattaagggagtcacgttatgacccccgccgatgacgcgggacaagccgttttacgtttggaactgacagaaccgcaacgttgaaggagccactcagcaagctggtacgattgtaatacgactcactatagggcgaattgagcgctgtttaaacgctcttcaactggaagagcggttacgctgtttaaacgctcttcaactggaagagcggttactaccggttcactagctagctgctaatcgagctagttaccctatgaggtgacatgaagcgctcacggttactatgacggttagcttcacgactgttggtggcagtagcgtacgacttagctatagttccggacttacccttaagcgatttaaatctgcggttaccgaattcgagctcggtacctagtacccttgtacttttggtttcacctgcatagagaaaacccacaagaatatgacagtctgatttgtcagtctcattctcaagcaacatttctctatccgttactttcatggtgaataacacaatccatcatcaatactttgtgttactcagaaactgaaagttattccgagtcttgcatatctttggacctactcgtttttctaccattattgctgattgttaagctctcgctacttgaatcggcattgttggagtgggaaggttcaaaaaattggagttatgactagttgtctctttctatgtacgatggagaaaatgaataaacaactgagaaaatggctcttgtttagttgatgatgctcttaagctttccactggttgccatatatgatttgggcatttcactttgatcttaatgggccttgtaaagcccaagactcatgattatctttagttgatgctcttaattaggtgtgggcaaataattcaaactgtatgtacccgaccaaaaccaaagcaaaaataatcgaaccaaaccgaaaatttaaaaataaccgaatgaaaactaaatcctataactgaaagaactgaaaccgaatcaaaatatttaatgtaaccaaaaatatccgaaatataattatattgtcaaaaatattaataatttctagattaaataattaaaaatacttaaaaatttatataaaatagtaaaaatactcgaaaataaccacaaatattcaaaaacaaccgaaatatcccaaaatattcaaagcaaaataaccgaatggataccaaattttaaaaccgaaaaaactggaacaaaaccaaaatcgaaccaaaatttcaaaaatcgaataaatactaaactttagaacaaaaaaaaacgataaccgaatgtatacgaaccaaagccgaattagataaccgaacgtccaggactactcttaatctttccgccacttatgatttgggctattactttgtttataatgagccttttcaagctcaagttcatgattgtccgtgagatgagaaactgacttgttggattcgaaaccctagctagtattggttaatacttaatacataaatgacctgcattgacatcatcatccaagaaaataaaaattgtatgcttgagatatttagttttcctagctaggttttctttattttagtaccgaatctttaggtgtgccacgttaatttagacccattttttcatacttaccaactgagtctagtttaatcatgactataatcgtataaaatgattcagtcgacgtcattgcgaacgtatataaaatcatccaaattgacgtcattccaaagaggtaagcatgcttatctaagagtccgagcatactaaacaagacgacattttatttgcactccaaatcaaattttgtattgcctaaagaaaaacaatcaaactcaagtttcttaaaattaatttcattcaaactaatcactttcaatatctcacatattattcatgccatttctatttgtctaaacatgatttaaaaaaaaaagtaaaatacaaagattactatgcaaaaactctataaaaaaaaattcaaatttcttatttatttgtgacatcaaattttcaaaataatttttttaattatcggttgatccggtcagtcgataaaaacataaactttcagcgaccgttaaaactttcctactaccgatttagagaaaatcttagcttgaaacgtaattgtaacctgccttcatgcaagtcgcaagatatgtcatcctaagttgtatatgttttctcaaaagatgtatttacttgagaaaatacgtttcaacgttgatggacaaccaattaagaatcaagcacctttcgtaatcaatttaggcttatcgtctaaggtatactgatttacgacagttgactagacttataaggaacaaaataatagaatagtttctaaacacttcacctaatcatagagactaagatggtaattcgtaaacgacaaagcctagtgacactgtccattgtaaaattccacatcatattagtattaaacatatacatgtagtttcctgaacacatgtagtatcaaacacacttcgtggcttcttcctcgaaacctgcggccgcgctatagttccggacttacccttaagataacttcgtatagcatacattatacgaagttatgggcccacgcgtgaagagcggttaccagagctggtcacctttgtccaccaagatggaactgtcttcggccagaatggccatctggattcagcaggcctagaaggccatttatcgctatcaactttgtatagaaaagttgggccgaattcgagctcggtacggccagaatggcccggaccgaagcttgcggccgcacactgatagtttaaacctggtaattattggctgtaggattataaacagagcctaaatagctggaatagctctagccctcaatccaaactaatgatatctatacttatgcaactctaaatttttattctaaaagtaatatttcatttttgtcaacgagattctctactctattccacaatcttttgaagcaatatttaccttaaatctgtactctataccaataatcatatattctattatttatttttatctctctcctaaggagcatccccctatgtctgcatggcccccgcctcgggtcccaatctcttgctctgctagtagcacagaagaaaacactagaaatgacttgcttgacttagagtatcagataaacatcatgtttacttaactttaatttgtatcggtttctactatttttataatatttttgtctctatagatactacgtgcaacagtataatcaacctagtttaatccagagcgaaggattttttactaagtacgtgactccatatgcacagcgttccttttatggttcctcactgggcacagcataaacgaaccctgtccaatgttttcagcgcgaacaaacagaaattccatcagcgaacaaacaacatacatgcgagatgaaaataaataataaaaaaagctccgtctcgataggccggcacgaatcgagagcctccatagccagttttttccatcggaacggcgggtctcgacgtaagcgcttacgacgtaagcgcttacgtaattatatgcaccacacgcctataaagccaaccaacccgtcggaggggcgcaagccagacagaagacagcccgtcagcccctctcgtttttcatccgccttcgcctccaaccgcgtgcgctccacgcctcctccaggaagtgagcgcagtcccctttcccctccttccaattcaattcgtcttctcgttcgcagccctaggatttgggggtctggaggggtttgatcgtttctcgccgtgaatctgctttggtgtaaaccaacggatctcggatcgtagtcttcagaagatcccggattttgcggtttggcccctcctggattcaattcgtcgtatcgttcgcagccctaggatttggggatctggaggggtttgatcgtttctcgccgcgaatctgctctggtgtaaaccaacggatctcgggtcgtagtcttcagaaggtcccggattttgcggtttggcccctcctggattcaattcgtcgtatcgttcgcagccctaggatttggggatctggaggggtttgatcctttctcgccgcgaatctgctctggtataaccaacggatctcgggtcgtagtcttcagaaggtcccggattttgcggtttggtggttcttgctctatgaatcagagggatggttcttcccggatttatgccttgcggccactctgtcgaatcatggggtttcgacccgattcgtaggcgtgctccctgttttggatgggaagtaggcgtgtttgtagtattcgtgcttcgattcgtcaacggagattagaagacctgggatgggatttgaggaaatctaggtatctgtctagcacgtttctagatctattcttcagctgttatatgagagtaattttggaaccctggtggggtatgtttgaccgagtattctgtagattattgtccgtgacttgctggctgttaccgtccttatctctgcatcatctatctgtgctagtttctgcgtgcttctcaaatatttccggcctgtgtagcatgtgactgataatatgattttggcagcccgggggatctcgactctagaggatcgctcaggaaggccgctgagatagaggcatggcggccaatgcgggcggcggtggagcgggaggaggcagcggcagcggcagcgtggctgcgccggcggtgtgccgccccagcggctcgcggtggacgccgacgccggagcagatcaggatgctgaaggagctctactacggctgcggcatccggtcgcccagctcggagcagatccagcgcatcaccgccatgctgcggcagcacggcaagatcgagggcaagaacgtcttctactggttccagaaccacaaggcccgcgagcgccagaagcgccgcctcaccagcctcgacgtcaacgtgcccgccgccggcgcggccgacgccaccaccagccaactcggcgtcctctcgctgtcgtcgccgccgccttcaggcgcggcgcctccctcgcccaccctcggcttctacgccgccggcaatggcggcggatcggctgtgctgctggacacgagttccgactggggcagcagcggcgctgccatggccaccgagacatgcttcctgcaggactacatgggcgtgacggacacgggcagctcgtcgcagtggccacgcttctcgtcgtcggacacgataatggcggcggccgcggcgcgggcggcgacgacgcgggcgcccgagacgctccctctcttcccgacctgcggcgacgacggcggcagcggtagcagcagctacttgccgttctggggtgccgcgtccacaactgccggcgccacttcttccgttgcgatccagcagcaacaccagctgcaggagcagtacagcttttacagcaacagcaacagcacccagctggccggcaccggcaaccaagacgtatcggcaacagcagcagcagccgccgccctggagctgagcctcagctcatggtgctccccttaccctgctgcagggagtatgtgagagcaacgcgagctgccactgctcttcactgatgtctctggaatggaaggaggaggaagtgagcatagcgttggtgcgttgctgtcaagggcgaattcacatggttaacctagacttgtccatcttctggattggccaacttaattaatgtatgaaataaaaggatgcacacatagtgacatgctaatcactataatgtgggcatcaaagttgtgtgttatgtgtaattactagttatctgaataaaagagaaagagatcatccatatttcttatcctaaatgaatgtcacgtgtctttataattctttgatgaaccagatgcatttcattaaccaaatccatatacatataaatattaatcatatataattaatatcaattgggttagcaaaacaaatctagtctaggtgtgttttgcgaatgcggccgccaccgcggtggagctcgaattccggtccgggcctagaaggccagcttcaagtttgtacaaaaaagcaggctccggccagaatggcccggaccgggttaccgaattcgagctcggtaccatttaaattgcgcccgccacggccgtggaggtcgtattccggtcagcttgcatccctgcagtgcagcgtgacccggtcgtgcccctctctagagataatgagcattgcatgtctaagttataaaaaattaccacatattttttttgtcacacttgtttgaagtgcagtttatctatctttatacatatatttaaactttactctacgaataatataatctatagtactacaataatatcagtgttttagagaatcatataaatgaacagttagacatggtctaaaggacaattgagtattttgacaacaggactctacagttttatctttttagtgtgcatgtgttctcctttttttttgcaaatagcttcacctatataatacttcatccattttattagtacatccatttagggtttagggttaatggtttttatagactaatttttttagtacatctattttattctattttagcctctaaattaagaaaactaaaactctattttagtttttttatttaataatttagatataaaatagaataaaataaagtgactaaaaattaaacaaataccctttaagaaattaaaaaaactaaggaaacatttttcttgtttcgagtagataatgccagcctgttaaacgccgtcgacgagtctaacggacaccaaccagcgaaccagcagcgtcgcgtcgggccaagcgaagcagacggcacggcatctctgtcgctgcctctggacccctctcgagagttccgctccaccgttggacttgctccgctgtcggcatccagaaattgcgtggcggagcggcagacgtgagccggcacggcaggcggcctcctcctcctctcacggcaccggcagctacgggggattcctttcccaccgctccttcgctttcccttcctcgcccgccgtaataaatagacaccccctccacaccctctttccccaacctcgtgttgttcggagcgcacacacacacaaccagatctcccccaaatccacccgtcggcacctccgcttcaaggtacgccgctcgtcctcccccccccccctctctaccttctctagatcggcgttccggtccatgcatggttagggcccggtagttctacttctgttcatgtttgtgttagatccgtgtttgtgttagatccgtgctgctagcgttcgtacacggatgcgacctgtacgtcagacacgttctgattgctaacttgccagtgtttctctttggggaatcctgggatggctctagccgttccgcagacgggatcgatttcatgattttttttgtttcgttgcatagggtttggtttgcccttttcctttatttcaatatatgccgtgcacttgtttgtcgggtcatcttttcatgcttttttttgtcttggttgtgatgatgtggtctggttgggcggtcgttctagatcggagtagaattctgtttcaaactacctggtggatttattaattttggatctgtatgtgtgtgccatacatattcatagttacgaattgaagatgatggatggaaatatcgatctaggataggtatacatgttgatgcgggttttactgatgcatatacagagatgctttttgttcgcttggttgtgatgatgtggtgtggttgggcggtcgttcattcgttctagatcggagtagaatactgtttcaaactacctggtgtatttattaattttggaactgtatgtgtgtgtcatacatcttcatagttacgagtttaagatggatggaaatatcgatctaggataggtatacatgttgatgtgggttttactgatgcatatacatgatggcatatgcagcatctattcatatgctctaaccttgagtacctatctattataataaacaagtatgttttataattattttgatcttgatatacttggatgatggcatatgcagcagctatatgtggatttttttagccctgccttcatacgctatttatttgcttggtactgtttcttttgtcgatgctcaccctgttgtttggtgttacttctgcaggtcgactctagaggatccatggccactgtgaacaactggctcgctttctccctctccccgcaggagctgccgccctcccagacgacggactccacactcatctcggccgccaccgccgaccatgtctccggcgatgtctgcttcaacatcccccaagattggagcatgaggggatcagagctttcggcgctcgtcgcggagccgaagctggaggacttcctcggcggcatctccttctccgagcagcatcacaaggccaactgcaacatgatacccagcactagcagcacagtttgctacgcgagctcaggtgctagcaccggctaccatcaccagctgtaccaccagcccaccagctcagcgctccacttcgcggactccgtaatggtggcttcctcggccggtgtccacgacggcggtgccatgctcagcgcggccgccgctaacggtgtcgctggcgctgccagtgccaacggcggcggcatcgggctgtccatgattaagaactggctgcggagccaaccggcgcccatgcagccgagggtggcggcggctgagggcgcgcaggggctctctttgtccatgaacatggcggggacgacccaaggcgctgctggcatgccacttctcgctggagagcgcgcacgggcgcccgagagtgtatcgacgtcagcacagggtggagccgtcgtcgtcacggcgccgaaggaggatagcggtggcagcggtgttgccggcgctctagtagccgtgagcacggacacgggtggcagcggcggcgcgtcggctgacaacacggcaaggaagacggtggacacgttcgggcagcgcacgtcgatttaccgtggcgtgacaaggcatagatggactgggagatatgaggcacatctttgggataacagttgcagaagggaagggcaaactcgtaagggtcgtcaagtctatttaggtggctatgataaagaggagaaagctgctagggcttatgatcttgctgctctgaagtactggggtgccacaacaacaacaaattttccagtgagtaactacgaaaaggagctcgaggacatgaagcacatgacaaggcaggagtttgtagcgtctctgagaaggaagagcagtggtttctccagaggtgcatccatttacaggggagtgactaggcatcaccaacatggaagatggcaagcacggattggacgagttgcagggaacaaggatctttacttgggcaccttcagcacccaggaggaggcagcggaggcgtacgacatcgcggcgatcaagttccgcggcctcaacgccgtcaccaacttcgacatgagccgctacgacgtgaagagcatcctggacagcagcgccctccccatcggcagcgccgccaagcgcctcaaggaggccgaggccgcagcgtccgcgcagcaccaccacgccggcgtggtgagctacgacgtcggccgcatcgcctcgcagctcggcgacggcggagccctggcggcggcgtacggcgcgcactaccacggcgccgcctggccgaccatcgcgttccagccgggcgccgccagcacaggcctgtaccacccgtacgcgcagcagccaatgcgcggcggcgggtggtgcaagcaggagcaggaccacgcggtgatcgcggccgcgcacagcctgcaggacctccaccacctgaacctgggcgcggccggcgcgcacgactttttctcggcagggcagcaggccgccgccgctgcgatgcacggcctgggtagcatcgacagtgcgtcgctcgagcacagcaccggctccaactccgtcgtctacaacggcggggtcggcgacagcaacggcgccagcgccgtcggcggcagtggcggtggctacatgatgccgatgagcgctgccggagcaaccactacatcggcaatggtgagccacgagcaggtgcatgcacgggcctacgacgaagccaagcaggctgctcagatggggtacgagagctacctggtgaacgcggagaacaatggtggcggaaggatgtctgcatgggggactgtcgtgtctgcagccgcggcggcagcagcaagcagcaacgacaacatggccgccgacgtcgggcatggcggcgcgcagctcttcagtgtctggaacgacacttaagcgtacgtgccggcctggctctccgaaagggcgtattccagcacactggcggccgttactagacccaacctagacttgtccatcttctggattggccaacttaattaatgtatgaaataaaaggatgcacacatagtgacatgctaatcactataatgtgggcatcaaagttgtgtgttatgtgtaattactagttatctgaataaaagagaaagagatcatccatatttcttatcctaaatgaatgtcacgtgtctttataattctttgatgaaccagatgcatttcattaaccaaatccatatacatataaatattaatcatatataattaatatcaattgggttagcaaaacaaatctagtctaggtgtgttttgcgaatgcggcctccgggcacccagctttcttgtacaaagtggccgttaacggatcggccagaatggcccggaccgggttaccgaattcgagctcggtaccctggttcacaaactcaatacaacacacagtggagtagggtattacgctccggcggcccgaaccactctaaatccttgtgtcctcgtgtgctcttccaccattaatgactgtaattgcagggacacgaagagttgtagcgcttttgccaacaagatccgctatatgctagtagagtggaacctgcacagcaacaagcatccaataatctgagaataagaattatgtgtggtgatggttctcatctctgcaactcgccattttcgcgagagaaccaaatccaagttggtgaagatcatgatttgggctcatgggctggcatagtagctattacctttgcaattgtggttcgaatctatccgatattctccttttcagggagagctaatgcttatgcttattgggtattttggtttgacactgcttcacgcccaaaaaaaggcaactatgtctgagttggatatggcccaaaaaaaggcagctatgtctgagttggatatggaagtcttctttcgtttagggtgaagtaagaccaagctcatgagcttattatcttaggtcggaacaaattagttgataggcatggcacatttatcaaattataatgattttaacagaaaagcaacacctctttttcagcagcaccagctttgcaagctgcaattgacactccaagcatagtatttgctccaaactcagcctgcatttcgcacaatatcatatctatttccatttggataaaatatattttccagaaatatgggaacagaatcaagatacagaaaaaagttgtggtagtagtggtaagtggaaacacaagtacagtgaaaagatagcattatttctgaacagtcaaattaaccgaaataagtagtatcacatactgcccctaaattgactacacccaatgtaaagaattgcttgagcatattgagccatcagttgtttgtttgtgtaacggatttgacaatgcagagttcaggagcaaaaaaccgcaaaggagagaaagagggaaaggatctcctagtatcccaccttgtggcgcgccctgtcaagtgcatgatggcctggtcgatctgcgtctgctgctgcggttccatcccaacgagtgcctccgacaccttgtcgttgatcacccgcaccgcgtaggcgacccccctggcgaggaacttccgcctctcggaggccccggccgcgtcggcggcggcgccctcgagcgcgcccacgctagccgtagatgctcggtgcacggccttgttggtgtgcaactcgacctcaacggccggtgcgctacgcccgtcaaggatctggcgcgcccgcaccctcgtgatcacggtgggcgcctcccgcctcatgtggccgacgatgaaaagcgccgggttaggggccttggcgcgcaccgccgtattcagggcctcctcgctcttgcgcgagagcaggtgcttccccaggtactcctgcactgacaaggctgccacagcggtggaatttgtcctcacgacttcgccacgtcgtcctcacctccctggcttcccacgactccgccgtatcgaggtgctcggtgggtcgtcttaatccgaagtccgaactaggaagacgagacagagaggtctgaggaatgggcctcgtttgatgttgagctgaattatttttccagcataagcccaggtcttggtccatgaacaaaattactagaaacccagcccagtactacgatctaaaagagggactgccactggatagctctctctagcattctccacgctccaatacagcggcgtcgtgtctatccgggtctatccgcgaacacgtgagaactctccagaaactgctttctcctccacttcatctctctcgctttccctctataaaaagaccccttctaggaattgagggagacagcaagcaccaagcagcgatccgaagctcaatcaattcactcaaacctcttccccaaatcttcgattagatcttcgttgacaagaagactagaaccgaacctgacatgtccaacctgctcacggttcaccagaaccttccggctcttccagtggacgcgacgtccgatgaagtcaggaagaacctcatggacatgttccgcgacaggcaagcgttcagcgagcacacctggaagatgctgctctccgtctgccgctcctgggctgcatggtgcaagctgaacaacaggaagtggttccccgctgagcccgaggacgtgagggattaccttctgtacctgcaagcgcgaggtttgtttctgcttctacctttgatatatatataataattatcattaattagtagtaatataatatttcaaatatttttttcaaaataaaagaatgtagtatatagcaattgcttttctgtagtttataagtgtgtatattttaatttataacttttctaatatatgaccaaaacatggtgatgcctaggtctggcagtgaagaccatccagcaacaccttggacaactgaacatgcttcacaggcgctccggcctcccgcgccccagcgactcgaacgccgtgagcctcgtcatgcgccgcatcaggaaggaaaacgtcgatgccggcgaaagggcaaagcaggccctcgcgttcgagaggaccgatttcgaccaggtccgcagcctgatggagaacagcgacaggtgccaggacattaggaacctggcgttcctcggaattgcatacaacacgctcctcaggatcgcggaaattgcccgcattcgcgtgaaggacattagccgcaccgacggcggcaggatgcttatccacattggcaggaccaagacgctcgtttccaccgcaggcgtcgaaaaggccctcagcctcggagtgaccaagctcgtcgaacgctggatctccgtgtccggcgtcgcggacgacccaaacaactacctcttctgccgcgtccgcaagaacggggtggctgcccctagcgccaccagccaactcagcacgagggccttggaaggtattttcgaggccacccaccgcctgatctacggcgcgaaggatgacagcggtcaacgctacctcgcatggtccgggcactccgcccgcgttggagctgctagggacatggcccgcgccggtgtttccatccccgaaatcatgcaggcgggtggatggacgaacgtgaacattgtcatgaactacattcgcaaccttgacagcgagacgggcgcaatggttcgcctcctggaagatggtgactgaggtacccaacctagacttgtccatcttctggattggccaacttaattaatgtatgaaataaaaggatgcacacatagtgacatgctaatcactataatgtgggcatcaaagttgtgtgttatgtgtaattactagttatctgaataaaagagaaagagatcatccatatttcttatcctaaatgaatgtcacgtgtctttataattctttgatgaaccagatgcatttcattaaccaaatccatatacatataaatattaatcatatataattaatatcaattgggttagcaaaacaaatctagtctaggtgtgttttgcgatccgatatcgaattggccacggtaccagctgctgctgttctagggttcacaagtctgcctatttgtcttccccaatggagctatggttgtctggtctggtccttggtcgtgtcccgtttcattgtgtactatttacctgtaatgtgtatccttaagtctggtttgatggtgtctgaaacgttttgctgtggtagagcagcatggaagaactataatgaataagtgatccctaatcattgtgtccaaattttgcttctgctatacccttttgtgctgtttcttatgttttgcttaaaaatttgatctgacaaacaaatttgtctaaattatgctcttgttctgactgtgtactgtacacatttgtattgctaccggtttggcacatagttttctctttgattgcagatcaaacccttctgattgcagattgcttggctatggctgatgtgctcactgttcttctttagcttgtatattgctgatggtggcttggctacggctgaaaaagttgctgctgcgccgacttggcaactgttgctccagtaatgctttgtcctctcttcctagccgccgacttggcacttggcagctgttgctcctgtaatgcgttgttatctcttatctcttgagatgtactatgattttgaggctgtttgacttgtgccagattgccagtgctgatgctatattatctcaggtttttatgctagtatatgttttactgtgtgctgcctgtgtcgagttacgtaatctattgaaccgctatgcgtgttgatgccctgttgttgcttgccagattgatgcccctgttgcttgcagcttgcaagctgtagtgaaatcctaaaattccaaaccaaatctattctgaacttttgaagatctgtgatgtccggaagaaaagattcaaacagataaacgggactctccagaatctataaaataaatgatcgacaaacgctttgctttggtaggcttcaagcttggtcacccggtccgggcctagaaggccagcttcggccgccccgggcaactttattatacaaagttgatagataaatcagatatctggttcctaaggacccggcggaccgattaaactgattcggtccgacgcgttacctaataacttcgtatagcatacattatacgaagttattagctaactaactagtaagcttaagccatgggtcgacggatccgttaactagcgtggcatttggcaccgccgcacactatgcgagctaggagtgctagtttacagatgaaactatgaaaccaagaaaacacaattgtccgtagctagcgcgtggcgtcgtgtcaagcttcacacagtatcttcgttcttcactataaatcgcgcctgttgttcgtgagacccaccaccgtggataacagtcccctaataataagcgatcaacagcactgctgatggctgaacaccgaggcgccgccgcgcgtaaccatccgccggagcagcccgtcgtgccggcgaacgacgccttccccgaccgcgcccagcagctctgcctcgacgccgggcgcgcgctcgcgatgtgcggcgtgctcgtcgccgtccctcccgcattttacgcgtcgacgtcgcggacgacaccgcacttgccttcgtcggcttcgtcctctggatcatcggtgcgtggctgtgcctcctggcgctcacgcccttggctccacgggcggtgagggcgggcggggccgccgccagcaccttgctgatcaggtgcctgtccctttcatgaactactagcgcccgcgcccgcggccgccgggcacaagagaacacatcgatgttcgctgcgtacgtcagcaataaggcactctttgtcagtagtcgagtgcatatgttgggtgtttgccctgggagatttcaagtgttgtggccattatcccgcaggataaaaaatcggcggcttttggattgatacggaaaataacgatgtttcatgctcgtgttgtgtgtgtgacatcttgtcagccaagtttttaaccgttgctactccccctctgtgggctcagtgtgtggaccggaatacgtcgtacataggccgtagcctaagcccaatatgccgtttttcaggttggcctgtgtgacgacaagcgggtctcaaaagcccatcacgcaactggcctgcaattattggaggagagcgcgtcgagttggttccagaggctgcgtggtggggccggactctgcgacgacctctcgttcgcgtccgatttggttgccgtgagccgtgacgtaacgcctccttccgttcctccctatataagttccacccccgggtccggtttccccaagccccagtgacccccgatcccgatcgcgaaatctccgcacccgccggcaagggaccgaagcaagcctctctcccgaccgtcgcatcaaggtacgcgtccgctcgatctgtcctcttccttctcgatttgacttgctgtggtgcccgatcacgggatcagaatcgcaccagtgtagatttcgcatgttctaagatgtgttagtttccaggctaatccagttctcttgacgcccgatccgatcgagctccgtgtttatttcagcctaatcgtagtattcccctaaaatttcctcattagggggttcgcaagattgttggtcgacaggttcacttatgctcgatcgcttacttttagtcgattcatgctgcgtactattgttgccccccgtggttttatcttttctcgtgtgaaatccagtagatatagtagatatcgtagcattaggttttaattcaatcgattgattattgtatcatcaaaattgagaagttcgaatcatgcctatcatgctgcctcaaccgaaatcctgtatattgaagtttcaattcaattgattgatcattcattagattcaaccaaaatctagaaggttagatgacgcatgtcatgctgcctgcgtagtttacctttgatctgtttatgattaccttatcagtaggatatttgtgattttgggaagtagcactaactgattcatgctgacatgatgttccctttcagattatactgttgagtcctatctaattgatgctttgtatgctatatgaatacgtcatggtaaattagcagttaattagcatattagcaattgggcgtacctcatcaggattgctcttgtagatgtgtgtggtgatgtttcttgttcaattcatgttctgctttaaaagtatgtgttctctgtttgttaattaagattcatggttataatgatttggacctaattaatcagggttgcccttttagatgcgtggttacttgttgagttcatttttttcctgctatagttgtatgcgtttgttcattcatggttagatttgatttgtttcttctctattccatgccttccatatacttcaattgtagcttaacatgagatttctgtatatgcaggtcgaccgccggggatccacacgacaccatggcccagtccaagcacggcctgaccaaggagatgaccatgaagtaccgcatggagggctgcgtggacggccacaagttcgtgatcaccggcgagggcatcggctaccccttcaagggcaagcaggccatcaacctgtgcgtggtggagggcggccccttgcccttcgccgaggacatcttgtccgccgccttcatgtacggcaaccgcgtgttcaccgagtacccccaggacatcgtcgactacttcaagaactcctgccccgccggctacacctgggaccgctccttcctgttcgaggacggcgccgtgtgcatctgcaacgccgacatcaccgtgagcgtggaggagaactgcatgtaccacgagtccaagttctacggcgtgaacttccccgccgacggccccgtgatgaagaagatgaccgacaactgggagccctcctgcgagaagatcatccccgtgcccaagcagggcatcttgaagggcgacgtgagcatgtacctgctgctgaaggacggtggccgcttgcgctgccagttcgacaccgtgtacaaggccaagtccgtgccccgcaagatgcccgactggcacttcatccagcacaagctgacccgcgaggaccgcagcgacgccaagaaccagaagtggcacctgaccgagcacgccatcgcctccggctccgccttgccctccggactcagatctcgatagagtcaacctagacttgtccatcttctggattggccaacttaattaatgtatgaaataaaaggatgcacacatagtgacatgctaatcactataatgtgggcatcaaagttgtgtgttatgtgtaattactagttatctgaataaaagagaaagagatcatccatatttcttatcctaaatgaatgtcacgtgtctttataattctttgatgaaccagatgcatttcattaaccaaatccatatacatataaatattaatcatatataattaatatcaattgggttagcaaaacaaatctagtctaggtgtgttttgcgaattgcggcgcccttactttaacgcctctaaccaacacccctttatctttataaggaacaataaacagaatttgccccactgttctaaatcacctaataatatccccagctaaaaacaataaaggtttcctagaattaagacaagcatgactgttcctccaggagggtttggaacattgttgcagtcttgcagatacgggcgaagggtgagaaacagagcggagggctggaggtgacctcggtagtcgacgccggagttgagcttgacaacgacggggcggcccctgatggacttgaggaagtccgatggcgtcttcaccgtcccgccggcgcccgaggcgggcctgtcgctgccgccgccgccgctgctcatcttgcgcgctgtgcccccggcggtgtccctgtgttgcggatcgcgggtgggccaggtggatgcgagggcgacccgtttggactccggccggagccgccggatccctggtcggtgtcagtgccgtttactctgggccccacgtgtcagtaccgtctgtagatgacaacaacccgtcgtccacagtcatgtccaaaatatcctttcttcttttttttcgattcggatatctatcttccttttttttttccaaaaatcttcttgacgcaccagcgcgcacgtttgtggtaaacgccgacacgtcggtcccacgtcgatagaccccacccaccagtgagtagcgtgtacgtattcgggggtgacggacgtgtcgccgtcgtcttgctagtcccattcccatctgagccacacatctctgaacaaaaaaaaggagggaggcctccacgcacatccccctccgtgccacccgccccaaaccctcgcgccgcctccgagacagccgccgcaaccatggccaccgccgccgccgcgtctaccgcgctcactggcgccactaccgctgcgcccaaggcgaggcgccgggcgcacctcctggccacccgccgcgccctcgccgcgcccatcaggtgctcagcggcgtcacccgccatgccgatggctcccccggccaccccgctccggccgtggggccccaccgagccccgcaagggtgctgacatcctcgtcgagtccctcgagcgctgcggcgtccgcgacgtcttcgcctaccccggcggcgcgtccatggagatccaccaggcactcacccgctcccccgtcatcgccaaccacctcttccgccacgagcaaggggaggcctttgccgcctccggctacgcgcgctcctcgggccgcgtcggcgtctgcatcgccacctccggccccggcgccaccaacctagtctccgcgctcgccgacgcgctgctcgattccgtccccatggtcgccatcacgggacaggtggcgcgacgcatgattggcaccgacgccttccaggagacgcccatcgtcgaggtcacccgctccatcaccaagcacaactacctggtcctcgacgtcgacgacatcccccgcgtcgtgcaggaggctttcttcctcgcctcctctggtcgaccagggccggtgcttgtcgacatccccaaggacatccagcagcagatggcggtgcctgtctgggacaagcccatgagtctgcctgggtacattgcgcgccttcccaagccccctgcgactgagttgcttgagcaggtgctgcgtcttgttggtgaatcgcggcgccctgttctttatgtgggcggtggctgcgcagcatctggtgaggagttgcgacgctttgtggagctgactggaatcccggtcacaactactcttatgggcctcggcaacttccccagcgacgacccactgtctctgcgcatgctaggtatgcatgggacggtgtatgcaaattatgcagtggataaggccgatctgttgcttgcacttggtgtgcggtttgatgatcgcgtgacagggaagattgaggcttttgcaagcagggctaagattgtgcacgttgatattgatccggctgagattggcaagaacaagcagccacatgtgtccatctgtgcagatgttaagcttgctttgcagggcatgaatgctcttcttgaaggaagcacatcaaagaagagctttgactttggctcatggaacgatgagttggatcagcagaagagggaattcccccttgggtataaaacatctaatgaggagatccagccacaatatgctattcaggttcttgatgagctgacgaaaggcgaggccatcatcggcacaggtgttgggcagcaccagatgtgggcggcacagtactacacttacaagcggccaaggcagtggttgtcttcagctggtcttggggctatgggatttggtttgccggctgctgctggtgcttctgtggcaaacccaggtgtcactgttgttgacatcgatggagatggtagctttctcatgaacgttcaggagctagctatgatccgaattgagaacctcccagtgaaggtctttgtgctaaacaaccagcacctggggatggtggtgcagttggaggacaggttctataaggccaacagagcgcacacatacttgggaaacccagagaatgaaagtgagatatatccagatttcgtgacgatcgccaaagggttcaacattccagcggtccgtgtgacaaagaagaacgaagtccgcgcagcgataaagaagatgctcgagactccagggccgtacctcttggatataatcgtcccacaccaggagcatgtgttgcctatgatccctagtggtggggctttcaaggatatgatcctggatggtgatggcaggactgtgtactgactagctagtcagttaacagatctgccagatcctcggtgtacaaataacccgtcttatcctatgagacgggccggcgtcagtgtgttctggaggaatttttatgtcagagcctttttctttgtgtgcttgatgtagatgccaagggaagcttattggctgttgaagcttgatgcaaaataaattatggaactctgttttttgtttatctaataataactagcaaatatgcttccattgcattgaaactaacagccttttgtgtttccaagttttattttgtgacaatgtcatctatttcaattagttgtggaatcggaaacttgcaggactaacttggaaactccaatccctcagcatcctggactttttcctggtgtaatccatgtagatattattttaatcatcattttagttctggaggtttttccatctccggttttgctcccctttcttcaaaaaaaaaaaaaaaatgccgtaggcgccgcaacgcccacctgttgttcaaactcatgggcacgagtggctcgaagattttatacaacaattgctgtagtttcaccgttgctggtgaagaagcatttttttaaaaaaatatagtggtattcattttaattagtttagttgtgcagcgagcaaaatttggacatgctctgctcggaatctgatcgacctagacacagattagcagcagtagctttgtcatctgttccaagagttgcgatctgatagaagaaaaaaaaaccttcccttcaatgtaaaaccgaaactaacaagaaagaagcacagtgccgtttaggcaagtatggagtacgtattaagcatgtagaaggccatgcatgaaccactaacaagaaagaagcgcagtgccattcaggcaagcataagcatgtagattggcatgcatgaacaactaacagtagatcgtctctggtctgattagaagttttttgggaagccaagaaatcatgtacaactggttccatctcaaattccgtggcaaaaagaggcctaagcaacatacctcgagtagatcacattcaagcttggtcacccggtccgtcaatattctgattccgatgacttcgtaggttcctagctcaagccgctcgtgtccaagcgtcacttacgattagctaatgattacggcatctaggaccgactagtggcgcgccgactagctagctaaggtaccgagctcgaattcattccgattaatcgtggcctcttgctcttcaggatgaagagctatgtttaaacgtgcaagcgctactagacaattcagtacattaaaaacgtccgcaatgtgttattaagttgtctaagcgtcaatttgtttacaccacaatatatcctgcca

SEQ ID NO: 257 - DNA, 26157 bp, synthetic construct
  misc_feature 1..26157: note = PHP98327
  source 1..26157: mol_type = other DNA
gtttacccgccaatatatcctgtcaaacactgatagtttaaactgaaggcgggaaacgacaatctgatcatgagcggagaattaagggagtcacgttatgacccccgccgatgacgcgggacaagccgttttacgtttggaactgacagaaccgcaacgttgaaggagccactcagcaagctggtacgattgtaatacgactcactatagggcgaattgagcgctgtttaaacgctcttcaactggaagagcggttacgctgtttaaacgctcttcaactggaagagcggttactaccggttcactagctagctgctaatcgagctagttaccctatgaggtgacatgaagcgctcacggttactatgacggttagcttcacgactgttggtggcagtagcgtacgacttagctatagttccggacttacccttaagcgatttaaatctgcggttaccgaattcgagctcggtacctagtacccttgtacttttggtttcacctgcatagagaaaacccacaagaatatgacagtctgatttgtcagtctcattctcaagcaacatttctctatccgttactttcatggtgaataacacaatccatcatcaatactttgtgttactcagaaactgaaagttattccgagtcttgcatatctttggacctactcgtttttctaccattattgctgattgttaagctctcgctacttgaatcggcattgttggagtgggaaggttcaaaaaattggagttatgactagttgtctctttctatgtacgatggagaaaatgaataaacaactgagaaaatggctcttgtttagttgatgatgctcttaagctttccactggttgccatatatgatttgggcatttcactttgatcttaatgggccttgtaaagcccaagactcatgattatctttagttgatgctcttaattaggtgtgggcaaataattcaaactgtatgtacccgaccaaaaccaaagcaaaaataatcgaaccaaaccgaaaatttaaaaataaccgaatgaaaactaaatcctataactgaaagaactgaaaccgaatcaaaatatttaatgtaaccaaaaatatccgaaatataattatattgtcaaaaatattaataatttctagattaaataattaaaaatacttaaaaatttatataaaatagtaaaaatactcgaaaataaccacaaatattcaaaaacaaccgaaatatcccaaaatattcaaagcaaaataaccgaatggataccaaattttaaaaccgaaaaaactggaacaaaaccaaaatcgaaccaaaatttcaaaaatcgaataaatactaaactttagaacaaaaaaaaacgataaccgaatgtatacgaaccaaagccgaattagataaccgaacgtccaggactactcttaatctttccgccacttatgatttgggctattactttgtttataatgagccttttcaagctcaagttcatgattgtccgtgagatgagaaactgacttgttggattcgaaaccctagctagtattggttaatacttaatacataaatgacctgcattgacatcatcatccaagaaaataaaaattgtatgcttgagatatttagttttcctagctaggttttctttattttagtaccgaatctttaggtgtgccacgttaatttagacccattttttcatacttaccaactgagtctagtttaatcatgactataatcgtataaaatgattcagtcgacgtcattgcgaacgtatataaaatcatccaaattgacgtcattccaaagaggtaagcatgcttatctaagagtccgagcatactaaacaagacgacattttatttgcactccaaatcaaattttgtattgcctaaagaaaaacaatcaaactcaagtttcttaaaattaatttcattcaaactaatcactttcaatatctcacatattattcatgccatttctatttgtctaaacatgatttaaaaaaaaaagtaaaatacaaagattactatgcaaaaactctataaaaaaaaattcaaatttcttatttatttgtgacatcaaattttcaaaataatttttttaattatcggttgatccggtcagtcgataaaaacataaactttcagcgaccgttaaaactttcctactaccgatttagagaaaatcttagcttgaaacgtaattgtaacctgccttcatgcaagtcgcaagatatgtcatcctaagttgtatatgttttctcaaaagatgtatttacttgagaaaatacgtttcaacgttgatggacaaccaattaagaatcaagcacctttcgtaatcaatttaggcttatcgtctaaggtatactgatttacgacagttgactagacttataaggaacaaaataatagaatagtttctaaacacttcacctaatcatagagactaagatggtaattcgtaaacgacaaagcctagtgacactgtccattgtaaaattccacatcatattagtattaaacatatacatgtagtttcctgaacacatgtagtatcaaacacacttcgtggcttcttcctcgaaacctgcggccgcgctatagttccggacttacccttaagataacttcgtatagcatacattatacgaagttatgggcccacgcgtgaagagcggttaccagagctggtcacctttgtccaccaagatggaactgtcttcggccagaatggccatctggattcagcaggcctagaaggccatttatcgctatcaactttgtatagaaaagttgggccgaattcgagctcggtacggccagaatggcccggaccgaagcttgcggccgcacactgatagtttaaacccgcgtgcgccgtggaatccgcctggatcgctgggggcgtttccaactgatcccccgcggccttccgtcgaatccgcctggatcggccgccacttggcaggccgcgaaggatctcagcccaggaaaagcccacggctccaaggcgcaaatgaaagaggagaagagaaaatcgtgagaaaactcactggaggagaaaaatggctatagtaaaattagtgaaatacccaatccggaaaaaacgtctagtgcttcgcctacttcctcaaacaaaagagacgcgcgaagggcagagcctcagccacccagcagtaatagcagccgtggtgcccgttgagattccccgcgccgttccgtcgaatcgatcagccgcgcgcccggcgcccctgcacatatattatacccaatgcccacacctcacaaccacttgctaacgcgcgcggcggtgacctaggctgcggtggactggtcatcgctccccgccgacgtgttcctagccaccaccggtctcgactactacatgagcctccgcgccgcgtgccgcccctgccgcgccgccaccgcggacccgcgcggtccggaccggcgcttccatccccgccggtggatcatgctcgaactgaatatccatgtttcaagagatattgttaagtccaaagctttcaaactgaatatccatgtttcatcgaaatagggtacaaaactttcgagtttgtggatgttcaacccaaaatccataacatacaacggttcagcctatttcttgagttgacagttcgcaattcctagtggcaatgaatacatgctagctactcccctttaactaatgaatacttggctcgaaacctctcgaccattgagcttaatgagtccagccgagtttgattttgaactggtcaacgaaacatttgagtcaagccgagcataattctgagttcgttaataaaacaactttaaccactcaagcaacgagctactcgtttaacaccatcccctcttctccccttggtccttggtccatccctctttttgacctaactcaatatccacccacattccttgacacacaagcaaaaccactcttgactcgcgtcctcctctcatatggcatatatgttaatttattaacgatcgagttaaacaaaccaattttgtagttaaattgagtcgagcccatgtcgcttttgaacatgatatactattaacgagtcgagctaactgttgtaactagtgtgttatcttaattggttctaccaattcgagccaagctaactactccctccgttacataaagattggcacggatatccggctctactcacacggacatgtggtcataatgcaaaagatgcaaatgaacaattctgaacaggagatttgatatcagaacctttggttatgtggcatgtgcctttaaccgtgtggagctaacaatttaacttaatccgtattataatctcacgcacactgtgcttgattcttcttgctttgcttcccttggtgcgggtgcacatctcagagcatacggacggtatagaaagaaggtgcagtgcgtcccagactaaccaaactttttttttggctatacaaaatgcacggttgtttgttgcacgcaacgacgattgttccttttgccaaagtaaataaataagcatctctcgtcgaagatcattatttttctaattctctacctcgtgaaagctggaagtggccacgtcaccggcaaaactaaccaacggtaatatctcccggaaaaatccaccgagccagcccttcgctagcgccaaagaagttcaccgcgcgcacggccaaaatccacgcaagaccagcgaaatctcgtggtctccactctctgctcgcccggcgcggcgagaagataatctcatggccaccgcacggccacatcagcgagccaccgcagcatccccgtgaggacattgaccccaccccatcgccctcggctcagactcaaacccatcaaaaatccgcgcgcgcccacggtgccagccactccgtggccagagcgcggccacctcggcaacccccatccgccttcccggcacctcacagcgcgcgcgccaatggcgactcggcttaagattccccgtggataaggactcgaacgtaagcgcttacgacgtaagcgcttacgtcgcgcgcgttcgggcctcctatttaaacgcctctcgctcccgctttactccacagcaacaaccgctccaacacttcagttctcactccacagctcagagtcagagctactagcagaattcttgtaaggttcccttccctcctcccctcacacccctgttcgtgttccttcggatcggatctcagtggtgatgttagacgtccgcggctgcctacgtagtggcattgccgcccgaaaggtttgtttaggtggggtagatccgaaacaggccggatctggaccatgtccgcggcggggcggcgggacttgatcgcgtagctgtcgtgtgcatttctccctaccagtggcggaatcggcgatgtggacctaagggctaaggcttatctgctgccttgaccatttcgtcgctgacaaaaacaaagtgacaatcatgccgttctctgtttgtttatctggatcgttattacgctgtgaatcctgcgatatgtggctaagtgatttttcttctttttctgggggcagtttagcctttgacccagtcctaggtgtggtcactaggactgtgtagcatgatgagtgaggttgcagcaggctgattgctagtggacgtttttttccccaatttgttaggttttcacgctccaggttgtgcaagtaattttgctagtgattgtgtgatccatcttcaacgttgaaccttgtttttccccctaaaacccccaacaggaaatcttgccccgacttctattgcaaaaattgtaacgcttagcaccctgattgactcaattcctgtcactaggcatgctcggtcaaaagcagatgatttaccacttagaaactgccctgcccctgctttccacatagcatttcgaactttttgactactattgacacccccctaacttgccgaactatttctctcttcagctactatttacctagttataattacataaatgtttgtgtgtatcttgtgcagcccgggggatctcgactctagaggatcgctcaggaaggccgctgagatagaggcatggcggccaatgcgggcggcggtggagcgggaggaggcagcggcagcggcagcgtggctgcgccggcggtgtgccgccccagcggctcgcggtggacgccgacgccggagcagatcaggatgctgaaggagctctactacggctgcggcatccggtcgcccagctcggagcagatccagcgcatcaccgccatgctgcggcagcacggcaagatcgagggcaagaacgtcttctactggttccagaaccacaaggcccgcgagcgccagaagcgccgcctcaccagcctcgacgtcaacgtgcccgccgccggcgcggccgacgccaccaccagccaactcggcgtcctctcgctgtcgtcgccgccgccttcaggcgcggcgcctccctcgcccaccctcggcttctacgccgccggcaatggcggcggatcggctgtgctgctggacacgagttccgactggggcagcagcggcgctgccatggccaccgagacatgcttcctgcaggactacatgggcgtgacggacacgggcagctcgtcgcagtggccacgcttctcgtcgtcggacacgataatggcggcggccgcggcgcgggcggcgacgacgcgggcgcccgagacgctccctctcttcccgacctgcggcgacgacggcggcagcggtagcagcagctacttgccgttctggggtgccgcgtccacaactgccggcgccacttcttccgttgcgatccagcagcaacaccagctgcaggagcagtacagcttttacagcaacagcaacagcacccagctggccggcaccggcaaccaagacgtatcggcaacagcagcagcagccgccgccctggagctgagcctcagctcatggtgctccccttaccctgctgcagggagtatgtgagagcaacgcgagctgccactgctcttcactgatgtctctggaatggaaggaggaggaagtgagcatagcgttggtgcgttgctgtcaagggcgaattcacatggttaacctagacttgtccatcttctggattggccaacttaattaatgtatgaaataaaaggatgcacacatagtgacatgctaatcactataatgtgggcatcaaagttgtgtgttatgtgtaattactagttatctgaataaaagagaaagagatcatccatatttcttatcctaaatgaatgtcacgtgtctttataattctttgatgaaccagatgcatttcattaaccaaatccatatacatataaatattaatcatatataattaatatcaattgggttagcaaaacaaatctagtctaggtgtgttttgcgaatgcggccgccaccgcggtggagctcgaattccggtccgggcctagaaggccagcttcaagtttgtacaaaaaagcaggctccggccagaatctcactgactagctaaacagcggccgcatcgagcagctggcttgtggggaccagacaaaaaaggaatggtgcagaattgttaggcgcacctaccaaaagcatctttgcctttattgcaaagataaagcagattcctctagtacaagtggggaacaaaataacgtggaaaagagctgtcctgacagcccactcactaatgcgtatgacgaacgcagtgacgaccacaaaactcgagcaacgagatcatgagccaatcaaagaggagtgatgtagacctaaagcaataatggagccatgacgtaagggcttacgcccatacgaaataattaaaggctgatgtgacctgtcggtctctcagaacctttactttttatgtttggcgtgtatttttaaatttccacggcaatgacgatgtgaccgtcgacccactaaaacattgctttgtcaaaagctaaaaaagatgatgcccgacagccacttgtgtgaagcatgagaagccggtccctccactaagaaaattagtgaagcatcttccagtggtccctccactcacagctcaatcagtgagcaacaggacgaaggaaatgacgtaagccatgacgtctaatcccagggcccggtgaccaatcgaattagcttggcgcgtggaccgaagcttgcatgcctgcagtgcagcgtgacccggtcgtgcccctctctagagataatgagcattgcatgtctaagttataaaaaattaccacatattttttttgtcacacttgtttgaagtgcagtttatctatctttatacatatatttaaactttactctacgaataatataatctatagtactacaataatatcagtgttttagagaatcatataaatgaacagttagacatggtctaaaggacaattgagtattttgacaacaggactctacagttttatctttttagtgtgcatgtgttctcctttttttttgcaaatagcttcacctatataatacttcatccattttattagtacatccatttagggtttagggttaatggtttttatagactaatttttttagtacatctattttattctattttagcctctaaattaagaaaactaaaactctattttagtttttttatttaataatttagatataaaatagaataaaataaagtgactaaaaattaaacaaataccctttaagaaattaaaaaaactaaggaaacatttttcttgtttcgagtagataatgccagcctgttaaacgccgtcgacgagtctaacggacaccaaccagcgaaccagcagcgtcgcgtcgggccaagcgaagcagacggcacggcatctctgtcgctgcctctggacccctctcgagagttccgctccaccgttggacttgctccgctgtcggcatccagaaattgcgtggcggagcggcagacgtgagccggcacggcaggcggcctcctcctcctctcacggcaccggcagctacgggggattcctttcccaccgctccttcgctttcccttcctcgcccgccgtaataaatagacaccccctccacaccctctttccccaacctcgtgttgttcggagcgcacacacacacaaccagatctcccccaaatccacccgtcggcacctccgcttcaaggtacgccgctcgtcctcccccccccccctctctaccttctctagatcggcgttccggtccatgcatggttagggcccggtagttctacttctgttcatgtttgtgttagatccgtgtttgtgttagatccgtgctgctagcgttcgtacacggatgcgacctgtacgtcagacacgttctgattgctaacttgccagtgtttctctttggggaatcctgggatggctctagccgttccgcagacgggatcgatttcatgattttttttgtttcgttgcatagggtttggtttgcccttttcctttatttcaatatatgccgtgcacttgtttgtcgggtcatcttttcatgcttttttttgtcttggttgtgatgatgtggtctggttgggcggtcgttctagatcggagtagaattctgtttcaaactacctggtggatttattaattttggatctgtatgtgtgtgccatacatattcatagttacgaattgaagatgatggatggaaatatcgatctaggataggtatacatgttgatgcgggttttactgatgcatatacagagatgctttttgttcgcttggttgtgatgatgtggtgtggttgggcggtcgttcattcgttctagatcggagtagaatactgtttcaaactacctggtgtatttattaattttggaactgtatgtgtgtgtcatacatcttcatagttacgagtttaagatggatggaaatatcgatctaggataggtatacatgttgatgtgggttttactgatgcatatacatgatggcatatgcagcatctattcatatgctctaaccttgagtacctatctattataataaacaagtatgttttataattattttgatcttgatatacttggatgatggcatatgcagcagctatatgtggatttttttagcactgccttcatacgctatttatttgcttggtactgtttcttttgtcgatgctcaccctgttgtttggtgttacttctgcaggtcgactttaacttagcctaggatccatggccactgtgaacaactggctcgctttctccctctccccgcaggagctgccgccctcccagacgacggactccacactcatctcggccgccaccgccgaccatgtctccggcgatgtctgcttcaacatcccccaagattggagcatgaggggatcagagctttcggcgctcgtcgcggagccgaagctggaggacttcctcggcggcatctccttctccgagcagcatcacaaggccaactgcaacatgatacccagcactagcagcacagtttgctacgcgagctcaggtgctagcaccggctaccatcaccagctgtaccaccagcccaccagctcagcgctccacttcgcggactccgtaatggtggcttcctcggccggtgtccacgacggcggtgccatgctcagcgcggccgccgctaacggtgtcgctggcgctgccagtgccaacggcggcggcatcgggctgtccatgattaagaactggctgcggagccaaccggcgcccatgcagccgagggtggcggcggctgagggcgcgcaggggctctctttgtccatgaacatggcggggacgacccaaggcgctgctggcatgccacttctcgctggagagcgcgcacgggcgcccgagagtgtatcgacgtcagcacagggtggagccgtcgtcgtcacggcgccgaaggaggatagcggtggcagcggtgttgccggcgctctagtagccgtgagcacggacacgggtggcagcggcggcgcgtcggctgacaacacggcaaggaagacggtggacacgttcgggcagcgcacgtcgatttaccgtggcgtgacaaggcatagatggactgggagatatgaggcacatctttgggataacagttgcagaagggaagggcaaactcgtaagggtcgtcaagtctatttaggtggctatgataaagaggagaaagctgctagggcttatgatcttgctgctctgaagtactggggtgccacaacaacaacaaattttccagtgagtaactacgaaaaggagctcgaggacatgaagcacatgacaaggcaggagtttgtagcgtctctgagaaggaagagcagtggtttctccagaggtgcatccatttacaggggagtgactaggcatcaccaacatggaagatggcaagcacggattggacgagttgcagggaacaaggatctttacttgggcaccttcagcacccaggaggaggcagcggaggcgtacgacatcgcggcgatcaagttccgcggcctcaacgccgtcaccaacttcgacatgagccgctacgacgtgaagagcatcctggacagcagcgccctccccatcggcagcgccgccaagcgcctcaaggaggccgaggccgcagcgtccgcgcagcaccaccacgccggcgtggtgagctacgacgtcggccgcatcgcctcgcagctcggcgacggcggagccctggcggcggcgtacggcgcgcactaccacggcgccgcctggccgaccatcgcgttccagccgggcgccgccagcacaggcctgtaccacccgtacgcgcagcagccaatgcgcggcggcgggtggtgcaagcaggagcaggaccacgcggtgatcgcggccgcgcacagcctgcaggacctccaccacctgaacctgggcgcggccggcgcgcacgactttttctcggcagggcagcaggccgccgccgctgcgatgcacggcctgggtagcatcgacagtgcgtcgctcgagcacagcaccggctccaactccgtcgtctacaacggcggggtcggcgacagcaacggcgccagcgccgtcggcggcagtggcggtggctacatgatgccgatgagcgctgccggagcaaccactacatcggcaatggtgagccacgagcaggtgcatgcacgggcctacgacgaagccaagcaggctgctcagatggggtacgagagctacctggtgaacgcggagaacaatggtggcggaaggatgtctgcatgggggactgtcgtgtctgcagccgcggcggcagcagcaagcagcaacgacaacatggccgccgacgtcgggcatggcggcgcgcagctcttcagtgtctggaacgacacttaagcgtacctagtggtacctgacatcttatagtctgcaacctctcgtgtctgaattcctatctttatcaagtgttattgcttccacgactataggacagctttcgtcgaaagcttttgctcatgtgatctcgaaggattcatctagtctgatttttcgtgacttgtatcggttttattggattcatccaacatatatcaataaaaaatgagttgtgtttcctttcttcctagttcagttaaaattatttccctcctgcgcttgtgctgtaattgtctgtgtacctgttgtttgtgactgtgttagttcccttggatatgatttcgtatttgatatgtacatggagatagcttagcttcattattggagtatgaagttagtatgacatagtcactctcctggaaaattgacactgcaaaccatatttttattctgaaccacaaatcctagtcagtccgctggcatatgccgtccgtttgctgaatccagaacgtgggtttggagatgtacggctgagatgcctctatgcgaaggggatttcgtggtgaaacgagatgggagtagagcaacgcccgtggaagatgcttcaaacttccacacttttgagcaacgatcggcagtagtaaggtagacgatttcaagatcaaagcatatgaagataaacaacatcaacaacaaaatttgttggggttctatagagagaaacagagctacatacatacactgttttgtatctaccatctgagatgatgaaaagatgaaaaactaaagaatgccccggcgccaacgccaggacacgccgcgcgcgcgtcacccgagccatctcttgacccagccggcgctgtatatttacacacgttgcagcatcgatcaccacctgttcgatcgcgtcgccgtcaccggcgcgccgcgacttattgaactagtctagggcgcggctaacaacctagcttagattgccttgtctaaacccttaggctaacgcgccactctagaaggccgatctcccccgaacgcgccagatccgatatcgatgggccctggccgaagcttggtcacccggtccgggcctagaaggccgatctcccgggcacccagctttcttgtacaaagtggccgttaacggatcggccagaatggcccggaccgggttaccccgcggttcaaagccaatgactgttgttaggtccagtttctaaggacgaatcatccaatcactggttctttctgaacaaaacaaagagctatagagttacgttactgtagccgagacagagcctgcaatctggttatgccacatactaggttctttcttaaagttgactcactctatcctaagttctacttacaaggagctacaacaaattggtcataaccggagagcgttcaaggaggtaatatcccatcttactctgtagcaaggctacaaaaggagagctaaagaactaggctacaaaaagagagctaaagaactaactatctagcaagactacagagctatagtgtagagatttcataaccggtgagcgttcaaggatactttgaagagaagaggtaatatctcaactagcaagactacaaaaaaatggagatataaaactaactgtctaacaagactacagagctatagtagagatagatacgttcgacacttaagcatgagaattcgagctcggtaccctggttcacaaactcaatacaacacacagtggagtagggtattacgctccggcggcccgaaccactctaaatccttgtgtcctcgtgtgctcttccaccattaatgactgtaattgcagggacacgaagagttgtagcgcttttgccaacaagatccgctatatgctagtagagtggaacctgcacagcaacaagcatccaataatctgagaataagaattatgtgtggtgatggttctcatctctgcaactcgccattttcgcgagagaaccaaatccaagttggtgaagatcatgatttgggctcatgggctggcatagtagctattacctttgcaattgtggttcgaatctatccgatattctccttttcagggagagctaatgcttatgcttattgggtattttggtttgacactgcttcacgcccaaaaaaaggcaactatgtctgagttggatatggcccaaaaaaaggcagctatgtctgagttggatatggaagtcttctttcgtttagggtgaagtaagaccaagctcatgagcttattatcttaggtcggaacaaattagttgataggcatggcacatttatcaaattataatgattttaacagaaaagcaacacctctttttcagcagcaccagctttgcaagctgcaattgacactccaagcatagtatttgctccaaactcagcctgcatttcgcacaatatcatatctatttccatttggataaaatatattttccagaaatatgggaacagaatcaagatacagaaaaaagttgtggtagtagtggtaagtggaaacacaagtacagtgaaaagatagcattatttctgaacagtcaaattaaccgaaataagtagtatcacatactgcccctaaattgactacacccaatgtaaagaattgcttgagcatattgagccatcagttgtttgtttgtgtaacggatttgacaatgcagagttcaggagcaaaaaaccgcaaaggagagaaagagggaaaggatctcctagtatcccaccttgtggcgcgccctgtcaagtgcatgatggcctggtcgatctgcgtctgctgctgcggttccatcccaacgagtgcctccgacaccttgtcgttgatcacccgcaccgcgtaggcgacccccctggcgaggaacttccgcctctcggaggccccggccgcgtcggcggcggcgccctcgagcgcgcccacgctagccgtagatgctcggtgcacggccttgttggtgtgcaactcgacctcaacggccggtgcgctacgcccgtcaaggatctggcgcgcccgcaccctcgtgatcacggtgggcgcctcccgcctcatgtggccgacgatgaaaagcgccgggttaggggccttggcgcgcaccgccgtattcagggcctcctcgctcttgcgcgagagcaggtgcttccccaggtactcctgcactgacaaggctgccacagcggtggaatttgtcctcacgacttcgccacgtcgtcctcacctccctggcttcccacgactccgccgtatcgaggtgctcggtgggtcgtcttaatccgaagtccgaactaggaagacgagacagagaggtctgaggaatgggcctcgtttgatgttgagctgaattatttttccagcataagcccaggtcttggtccatgaacaaaattactagaaacccagcccagtactacgatctaaaagagggactgccactggatagctctctctagcattctccacgctccaatacagcggcgtcgtgtctatccgggtctatccgcgaacacgtgagaactctccagaaactgctttctcctccacttcatctctctcgctttccctctataaaaagaccccttctaggaattgagggagacagcaagcaccaagcagcgatccgaagctcaatcaattcactcaaacctcttccccaaatcttcgattagatcttcgttgacaagaagactagaaccgaacctgacatgtccaacctgctcacggttcaccagaaccttccggctcttccagtggacgcgacgtccgatgaagtcaggaagaacctcatggacatgttccgcgacaggcaagcgttcagcgagcacacctggaagatgctgctctccgtctgccgctcctgggctgcatggtgcaagctgaacaacaggaagtggttccccgctgagcccgaggacgtgagggattaccttctgtacctgcaagcgcgaggtttgtttctgcttctacctttgatatatatataataattatcattaattagtagtaatataatatttcaaatatttttttcaaaataaaagaatgtagtatatagcaattgcttttctgtagtttataagtgtgtatattttaatttataacttttctaatatatgaccaaaacatggtgatgcctaggtctggcagtgaagaccatccagcaacaccttggacaactgaacatgcttcacaggcgctccggcctcccgcgccccagcgactcgaacgccgtgagcctcgtcatgcgccgcatcaggaaggaaaacgtcgatgccggcgaaagggcaaagcaggccctcgcgttcgagaggaccgatttcgaccaggtccgcagcctgatggagaacagcgacaggtgccaggacattaggaacctggcgttcctcggaattgcatacaacacgctcctcaggatcgcggaaattgcccgcattcgcgtgaaggacattagccgcaccgacggcggcaggatgcttatccacattggcaggaccaagacgctcgtttccaccgcaggcgtcgaaaaggccctcagcctcggagtgaccaagctcgtcgaacgctggatctccgtgtccggcgtcgcggacgacccaaacaactacctcttctgccgcgtccgcaagaacggggtggctgcccctagcgccaccagccaactcagcacgagggccttggaaggtattttcgaggccacccaccgcctgatctacggcgcgaaggatgacagcggtcaacgctacctcgcatggtccgggcactccgcccgcgttggagctgctagggacatggcccgcgccggtgtttccatccccgaaatcatgcaggcgggtggatggacgaacgtgaacattgtcatgaactacattcgcaaccttgacagcgagacgggcgcaatggttcgcctcctggaagatggtgactgaggtacccaacctagacttgtccatcttctggattggccaacttaattaatgtatgaaataaaaggatgcacacatagtgacatgctaatcactataatgtgggcatcaaagttgtgtgttatgtgtaattactagttatctgaataaaagagaaagagatcatccatatttcttatcctaaatgaatgtcacgtgtctttataattctttgatgaaccagatgcatttcattaaccaaatccatatacatataaatattaatcatatataattaatatcaattgggttagcaaaacaaatctagtctaggtgtgttttgcgatccgatatcgaattggccacggtaccagctgctgctgttctagggttcacaagtctgcctatttgtcttccccaatggagctatggttgtctggtctggtccttggtcgtgtcccgtttcattgtgtactatttacctgtaatgtgtatccttaagtctggtttgatggtgtctgaaacgttttgctgtggtagagcagcatggaagaactataatgaataagtgatccctaatcattgtgtccaaattttgcttctgctatacccttttgtgctgtttcttatgttttgcttaaaaatttgatctgacaaacaaatttgtctaaattatgctcttgttctgactgtgtactgtacacatttgtattgctaccggtttggcacatagttttctctttgattgcagatcaaacccttctgattgcagattgcttggctatggctgatgtgctcactgttcttctttagcttgtatattgctgatggtggcttggctacggctgaaaaagttgctgctgcgccgacttggcaactgttgctccagtaatgctttgtcctctcttcctagccgccgacttggcacttggcagctgttgctcctgtaatgcgttgttatctcttatctcttgagatgtactatgattttgaggctgtttgacttgtgccagattgccagtgctgatgctatattatctcaggtttttatgctagtatatgttttactgtgtgctgcctgtgtcgagttacgtaatctattgaaccgctatgcgtgttgatgccctgttgttgcttgccagattgatgcccctgttgcttgcagcttgcaagctgtagtgaaatcctaaaattccaaaccaaatctattctgaacttttgaagatctgtgatgtccggaagaaaagattcaaacagataaacgggactctccagaatctataaaataaatgatcgacaaacgctttgctttggtaggcttcaagcttggtcacccggtccgggcctagaaggccagcttcggccgccccgggcaactttattatacaaagttgatagataaatcagatatctggttcctaaggacccggcggaccgattaaactgattcggtccgacgcgttacctaataacttcgtatagcatacattatacgaagttattagctaactaactagtaagcttaagccatgggtcgacggatccgttaactagcgtggcatttggcaccgccgcacactatgcgagctaggagtgctagtttacagatgaaactatgaaaccaagaaaacacaattgtccgtagctagcgcgtggcgtcgtgtcaagcttcacacagtatcttcgttcttcactataaatcgcgcctgttgttcgtgagacccaccaccgtggataacagtcccctaataataagcgatcaacagcactgctgatggctgaacaccgaggcgccgccgcgcgtaaccatccgccggagcagcccgtcgtgccggcgaacgacgccttccccgaccgcgcccagcagctctgcctcgacgccgggcgcgcgctcgcgatgtgcggcgtgctcgtcgccgtccctcccgcattttacgcgtcgacgtcgcggacgacaccgcacttgccttcgtcggcttcgtcctctggatcatcggtgcgtggctgtgcctcctggcgctcacgcccttggctccacgggcggtgagggcgggcggggccgccgccagcaccttgctgatcaggtgcctgtccctttcatgaactactagcgcccgcgcccgcggccgccgggcacaagagaacacatcgatgttcgctgcgtacgtcagcaataaggcactctttgtcagtagtcgagtgcatatgttgggtgtttgccctgggagatttcaagtgttgtggccattatcccgcaggataaaaaatcggcggcttttggattgatacggaaaataacgatgtttcatgctcgtgttgtgtgtgtgacatcttgtcagccaagtttttaaccgttgctactccccctctgtgggctcagtgtgtggaccggaatacgtcgtacataggccgtagcctaagcccaatatgccgtttttcaggttggcctgtgtgacgacaagcgggtctcaaaagcccatcacgcaactggcctgcaattattggaggagagcgcgtcgagttggttccagaggctgcgtggtggggccggactctgcgacgacctctcgttcgcgtccgatttggttgccgtgagccgtgacgtaacgcctccttccgttcctccctatataagttccacccccgggtccggtttccccaagccccagtgacccccgatcccgatcgcgaaatctccgcacccgccggcaagggaccgaagcaagcctctctcccgaccgtcgcatcaaggtacgcgtccgctcgatctgtcctcttccttctcgatttgacttgctgtggtgcccgatcacgggatcagaatcgcaccagtgtagatttcgcatgttctaagatgtgttagtttccaggctaatccagttctcttgacgcccgatccgatcgagctccgtgtttatttcagcctaatcgtagtattcccctaaaatttcctcattagggggttcgcaagattgttggtcgacaggttcacttatgctcgatcgcttacttttagtcgattcatgctgcgtactattgttgccccccgtggttttatcttttctcgtgtgaaatccagtagatatagtagatatcgtagcattaggttttaattcaatcgattgattattgtatcatcaaaattgagaagttcgaatcatgcctatcatgctgcctcaaccgaaatcctgtatattgaagtttcaattcaattgattgatcattcattagattcaaccaaaatctagaaggttagatgacgcatgtcatgctgcctgcgtagtttacctttgatctgtttatgattaccttatcagtaggatatttgtgattttgggaagtagcactaactgattcatgctgacatgatgttccctttcagattatactgttgagtcctatctaattgatgctttgtatgctatatgaatacgtcatggtaaattagcagttaattagcatattagcaattgggcgtacctcatcaggattgctcttgtagatgtgtgtggtgatgtttcttgttcaattcatgttctgctttaaaagtatgtgttctctgtttgttaattaagattcatggttataatgatttggacctaattaatcagggttgcccttttagatgcgtggttacttgttgagttcatttttttcctgctatagttgtatgcgtttgttcattcatggttagatttgatttgtttcttctctattccatgccttccatatacttcaattgtagcttaacatgagatttctgtatatgcaggtcgaccgccggggatccacacgacaccatggcccagtccaagcacggcctgaccaaggagatgaccatgaagtaccgcatggagggctgcgtggacggccacaagttcgtgatcaccggcgagggcatcggctaccccttcaagggcaagcaggccatcaacctgtgcgtggtggagggcggccccttgcccttcgccgaggacatcttgtccgccgccttcatgtacggcaaccgcgtgttcaccgagtacccccaggacatcgtcgactacttcaagaactcctgccccgccggctacacctgggaccgctccttcctgttcgaggacggcgccgtgtgcatctgcaacgccgacatcaccgtgagcgtggaggagaactgcatgtaccacgagtccaagttctacggcgtgaacttccccgccgacggccccgtgatgaagaagatgaccgacaactgggagccctcctgcgagaagatcatccccgtgcccaagcagggcatcttgaagggcgacgtgagcatgtacctgctgctgaaggacggtggccgcttgcgctgccagttcgacaccgtgtacaaggccaagtccgtgccccgcaagatgcccgactggcacttcatccagcacaagctgacccgcgaggaccgcagcgacgccaagaaccagaagtggcacctgaccgagcacgccatcgcctccggctccgccttgccctccggactcagatctcgatagagtcaacctagacttgtccatcttctggattggccaacttaattaatgtatgaaataaaaggatgcacacatagtgacatgctaatcactataatgtgggcatcaaagttgtgtgttatgtgtaattactagttatctgaataaaagagaaagagatcatccatatttcttatcctaaatgaatgtcacgtgtctttataattctttgatgaaccagatgcatttcattaaccaaatccatatacatataaatattaatcatatataattaatatcaattgggttagcaaaacaaatctagtctaggtgtgttttgcgaattgcggcgcccttactttaacgcctctaaccaacacccctttatctttataaggaacaataaacagaatttgccccactgttctaaatcacctaataatatccccagctaaaaacaataaaggtttcctagaattaagacaagcatgactgttcctccaggagggtttggaacattgttgcagtcttgcagatacgggcgaagggtgagaaacagagcggagggctggaggtgacctcggtagtcgacgccggagttgagcttgacaacgacggggcggcccctgatggacttgaggaagtccgatggcgtcttcaccgtcccgccggcgcccgaggcgggcctgtcgctgccgccgccgccgctgctcatcttgcgcgctgtgcccccggcggtgtccctgtgttgcggatcgcgggtgggccaggtggatgcgagggcgacccgtttggactccggccggagccgccggatccctggtcggtgtcagtgccgtttactctgggccccacgtgtcagtaccgtctgtagatgacaacaacccgtcgtccacagtcatgtccaaaatatcctttcttcttttttttcgattcggatatctatcttccttttttttttccaaaaatcttcttgacgcaccagcgcgcacgtttgtggtaaacgccgacacgtcggtcccacgtcgatagaccccacccaccagtgagtagcgtgtacgtattcgggggtgacggacgtgtcgccgtcgtcttgctagtcccattcccatctgagccacacatctctgaacaaaaaaaaggagggaggcctccacgcacatccccctccgtgccacccgccccaaaccctcgcgccgcctccgagacagccgccgcaaccatggccaccgccgccgccgcgtctaccgcgctcactggcgccactaccgctgcgcccaaggcgaggcgccgggcgcacctcctggccacccgccgcgccctcgccgcgcccatcaggtgctcagcggcgtcacccgccatgccgatggctcccccggccaccccgctccggccgtggggccccaccgagccccgcaagggtgctgacatcctcgtcgagtccctcgagcgctgcggcgtccgcgacgtcttcgcctaccccggcggcgcgtccatggagatccaccaggcactcacccgctcccccgtcatcgccaaccacctcttccgccacgagcaaggggaggcctttgccgcctccggctacgcgcgctcctcgggccgcgtcggcgtctgcatcgccacctccggccccggcgccaccaacctagtctccgcgctcgccgacgcgctgctcgattccgtccccatggtcgccatcacgggacaggtggcgcgacgcatgattggcaccgacgccttccaggagacgcccatcgtcgaggtcacccgctccatcaccaagcacaactacctggtcctcgacgtcgacgacatcccccgcgtcgtgcaggaggctttcttcctcgcctcctctggtcgaccagggccggtgcttgtcgacatccccaaggacatccagcagcagatggcggtgcctgtctgggacaagcccatgagtctgcctgggtacattgcgcgccttcccaagccccctgcgactgagttgcttgagcaggtgctgcgtcttgttggtgaatcgcggcgccctgttctttatgtgggcggtggctgcgcagcatctggtgaggagttgcgacgctttgtggagctgactggaatcccggtcacaactactcttatgggcctcggcaacttccccagcgacgacccactgtctctgcgcatgctaggtatgcatgggacggtgtatgcaaattatgcagtggataaggccgatctgttgcttgcacttggtgtgcggtttgatgatcgcgtgacagggaagattgaggcttttgcaagcagggctaagattgtgcacgttgatattgatccggctgagattggcaagaacaagcagccacatgtgtccatctgtgcagatgttaagcttgctttgcagggcatgaatgctcttcttgaaggaagcacatcaaagaagagctttgactttggctcatggaacgatgagttggatcagcagaagagggaattcccccttgggtataaaacatctaatgaggagatccagccacaatatgctattcaggttcttgatgagctgacgaaaggcgaggccatcatcggcacaggtgttgggcagcaccagatgtgggcggcacagtactacacttacaagcggccaaggcagtggttgtcttcagctggtcttggggctatgggatttggtttgccggctgctgctggtgcttctgtggcaaacccaggtgtcactgttgttgacatcgatggagatggtagctttctcatgaacgttcaggagctagctatgatccgaattgagaacctcccagtgaaggtctttgtgctaaacaaccagcacctggggatggtggtgcagttggaggacaggttctataaggccaacagagcgcacacatacttgggaaacccagagaatgaaagtgagatatatccagatttcgtgacgatcgccaaagggttcaacattccagcggtccgtgtgacaaagaagaacgaagtccgcgcagcgataaagaagatgctcgagactccagggccgtacctcttggatataatcgtcccacaccaggagcatgtgttgcctatgatccctagtggtggggctttcaaggatatgatcctggatggtgatggcaggactgtgtactgactagctagtcagttaacagatctgccagatcctcggtgtacaaataacccgtcttatcctatgagacgggccggcgtcagtgtgttctggaggaatttttatgtcagagcctttttctttgtgtgcttgatgtagatgccaagggaagcttattggctgttgaagcttgatgcaaaataaattatggaactctgttttttgtttatctaataataactagcaaatatgcttccattgcattgaaactaacagccttttgtgtttccaagttttattttgtgacaatgtcatctatttcaattagttgtggaatcggaaacttgcaggactaacttggaaactccaatccctcagcatcctggactttttcctggtgtaatccatgtagatattattttaatcatcattttagttctggaggtttttccatctccggttttgctcccctttcttcaaaaaaaaaaaaaaaatgccgtaggcgccgcaacgcccacctgttgttcaaactcatgggcacgagtggctcgaagattttatacaacaattgctgtagtttcaccgttgctggtgaagaagcatttttttaaaaaaatatagtggtattcattttaattagtttagttgtgcagcgagcaaaatttggacatgctctgctcggaatctgatcgacctagacacagattagcagcagtagctttgtcatctgttccaagagttgcgatctgatagaagaaaaaaaaaccttcccttcaatgtaaaaccgaaactaacaagaaagaagcacagtgccgtttaggcaagtatggagtacgtattaagcatgtagaaggccatgcatgaaccactaacaagaaagaagcgcagtgccattcaggcaagcataagcatgtagattggcatgcatgaacaactaacagtagatcgtctctggtctgattagaagttttttgggaagccaagaaatcatgtacaactggttccatctcaaattccgtggcaaaaagaggcctaagcaacatacctcgagtagatcacattcaagcttggtcacccggtccgtcaatattctgattccgatgacttcgtaggttcctagctcaagccgctcgtgtccaagcgtcacttacgattagctaatgattacggcatctaggaccgactagtggcgcgccgactagctagctaaggtaccgagctcgaattcattccgattaatcgtggcctcttgctcttcaggatgaagagctatgtttaaacgtgcaagcgctactagacaattcagtacattaaaaacgtccgcaatgtgttattaagttgtctaagcgtcaatttgtttacaccacaatatatcctgcca

SEQ ID NO: 258 - DNA, 24803 bp, synthetic construct
  misc_feature 1..24803: note = PHP98370
  source 1..24803: mol_type = other DNA
gtttacccgccaatatatcctgtcaaacactgatagtttaaactgaaggcgggaaacgacaatctgatcatgagcggagaattaagggagtcacgttatgacccccgccgatgacgcgggacaagccgttttacgtttggaactgacagaaccgcaacgttgaaggagccactcagcaagctggtacgattgtaatacgactcactatagggcgaattgagcgctgtttaaacgctcttcaactggaagagcggttacgctgtttaaacgctcttcaactggaagagcggttactaccggttcactagctagctgctaatcgagctagttaccctatgaggtgacatgaagcgctcacggttactatgacggttagcttcacgactgttggtggcagtagcgtacgacttagctatagttccggacttacccttaagcgatttaaatctgcggttaccgaattcgagctcggtacctagtacccttgtacttttggtttcacctgcatagagaaaacccacaagaatatgacagtctgatttgtcagtctcattctcaagcaacatttctctatccgttactttcatggtgaataacacaatccatcatcaatactttgtgttactcagaaactgaaagttattccgagtcttgcatatctttggacctactcgtttttctaccattattgctgattgttaagctctcgctacttgaatcggcattgttggagtgggaaggttcaaaaaattggagttatgactagttgtctctttctatgtacgatggagaaaatgaataaacaactgagaaaatggctcttgtttagttgatgatgctcttaagctttccactggttgccatatatgatttgggcatttcactttgatcttaatgggccttgtaaagcccaagactcatgattatctttagttgatgctcttaattaggtgtgggcaaataattcaaactgtatgtacccgaccaaaaccaaagcaaaaataatcgaaccaaaccgaaaatttaaaaataaccgaatgaaaactaaatcctataactgaaagaactgaaaccgaatcaaaatatttaatgtaaccaaaaatatccgaaatataattatattgtcaaaaatattaataatttctagattaaataattaaaaatacttaaaaatttatataaaatagtaaaaatactcgaaaataaccacaaatattcaaaaacaaccgaaatatcccaaaatattcaaagcaaaataaccgaatggataccaaattttaaaaccgaaaaaactggaacaaaaccaaaatcgaaccaaaatttcaaaaatcgaataaatactaaactttagaacaaaaaaaaacgataaccgaatgtatacgaaccaaagccgaattagataaccgaacgtccaggactactcttaatctttccgccacttatgatttgggctattactttgtttataatgagccttttcaagctcaagttcatgattgtccgtgagatgagaaactgacttgttggattcgaaaccctagctagtattggttaatacttaatacataaatgacctgcattgacatcatcatccaagaaaataaaaattgtatgcttgagatatttagttttcctagctaggttttctttattttagtaccgaatctttaggtgtgccacgttaatttagacccattttttcatacttaccaactgagtctagtttaatcatgactataatcgtataaaatgattcagtcgacgtcattgcgaacgtatataaaatcatccaaattgacgtcattccaaagaggtaagcatgcttatctaagagtccgagcatactaaacaagacgacattttatttgcactccaaatcaaattttgtattgcctaaagaaaaacaatcaaactcaagtttcttaaaattaatttcattcaaactaatcactttcaatatctcacatattattcatgccatttctatttgtctaaacatgatttaaaaaaaaaagtaaaatacaaagattactatgcaaaaactctataaaaaaaaattcaaatttcttatttatttgtgacatcaaattttcaaaataatttttttaattatcggttgatccggtcagtcgataaaaacataaactttcagcgaccgttaaaactttcctactaccgatttagagaaaatcttagcttgaaacgtaattgtaacctgccttcatgcaagtcgcaagatatgtcatcctaagttgtatatgttttctcaaaagatgtatttacttgagaaaatacgtttcaacgttgatggacaaccaattaagaatcaagcacctttcgtaatcaatttaggcttatcgtctaaggtatactgatttacgacagttgactagacttataaggaacaaaataatagaatagtttctaaacacttcacctaatcatagagactaagatggtaattcgtaaacgacaaagcctagtgacactgtccattgtaaaattccacatcatattagtattaaacatatacatgtagtttcctgaacacatgtagtatcaaacacacttcgtggcttcttcctcgaaacctgcggccgcgctatagttccggacttacccttaagataacttcgtatagcatacattatacgaagttatgggcccacgcgtgaagagcggttaccagagctggtcacctttgtccaccaagatggaactgtcttcggccagaatggccatctggattcagcaggcctagaaggccatttatcgctatcaactttgtatagaaaagttgggccgaattcgagctcggtacggccagaatggcccggaccgaagcttgcggccgcacactgatagtttaaacctggtaattattggctgtaggattataaacagagcctaaatagctggaatagctctagccctcaatccaaactaatgatatctatacttatgcaactctaaatttttattctaaaagtaatatttcatttttgtcaacgagattctctactctattccacaatcttttgaagcaatatttaccttaaatctgtactctataccaataatcatatattctattatttatttttatctctctcctaaggagcatccccctatgtctgcatggcccccgcctcgggtcccaatctcttgctctgctagtagcacagaagaaaacactagaaatgacttgcttgacttagagtatcagataaacatcatgtttacttaactttaatttgtatcggtttctactatttttataatatttttgtctctatagatactacgtgcaacagtataatcaacctagtttaatccagagcgaaggattttttactaagtacgtgactccatatgcacagcgttccttttatggttcctcactgggcacagcataaacgaaccctgtccaatgttttcagcgcgaacaaacagaaattccatcagcgaacaaacaacatacatgcgagatgaaaataaataataaaaaaagctccgtctcgataggccggcacgaatcgagagcctccatagccagttttttccatcggaacggcgggtctcgacgtaagcgcttacgacgtaagcgcttacgtaattatatgcaccacacgcctataaagccaaccaacccgtcggaggggcgcaagccagacagaagacagcccgtcagcccctctcgtttttcatccgccttcgcctccaaccgcgtgcgctccacgcctcctccaggaagtgagcgcagtcccctttcccctccttccaattcaattcgtcttctcgttcgcagccctaggatttgggggtctggaggggtttgatcgtttctcgccgtgaatctgctttggtgtaaaccaacggatctcggatcgtagtcttcagaagatcccggattttgcggtttggcccctcctggattcaattcgtcgtatcgttcgcagccctaggatttggggatctggaggggtttgatcgtttctcgccgcgaatctgctctggtgtaaaccaacggatctcgggtcgtagtcttcagaaggtcccggattttgcggtttggcccctcctggattcaattcgtcgtatcgttcgcagccctaggatttggggatctggaggggtttgatcctttctcgccgcgaatctgctctggtataaccaacggatctcgggtcgtagtcttcagaaggtcccggattttgcggtttggtggttcttgctctatgaatcagagggatggttcttcccggatttatgccttgcggccactctgtcgaatcatggggtttcgacccgattcgtaggcgtgctccctgttttggatgggaagtaggcgtgtttgtagtattcgtgcttcgattcgtcaacggagattagaagacctgggatgggatttgaggaaatctaggtatctgtctagcacgtttctagatctattcttcagctgttatatgagagtaattttggaaccctggtggggtatgtttgaccgagtattctgtagattattgtccgtgacttgctggctgttaccgtccttatctctgcatcatctatctgtgctagtttctgcgtgcttctcaaatatttccggcctgtgtagcatgtgactgataatatgattttggcagcccgggggatctcgactctagaggatcgctcaggaaggccgctgagatagaggcatggcggccaatgcgggcggcggtggagcgggaggaggcagcggcagcggcagcgtggctgcgccggcggtgtgccgccccagcggctcgcggtggacgccgacgccggagcagatcaggatgctgaaggagctctactacggctgcggcatccggtcgcccagctcggagcagatccagcgcatcaccgccatgctgcggcagcacggcaagatcgagggcaagaacgtcttctactggttccagaaccacaaggcccgcgagcgccagaagcgccgcctcaccagcctcgacgtcaacgtgcccgccgccggcgcggccgacgccaccaccagccaactcggcgtcctctcgctgtcgtcgccgccgccttcaggcgcggcgcctccctcgcccaccctcggcttctacgccgccggcaatggcggcggatcggctgtgctgctggacacgagttccgactggggcagcagcggcgctgccatggccaccgagacatgcttcctgcaggactacatgggcgtgacggacacgggcagctcgtcgcagtggccacgcttctcgtcgtcggacacgataatggcggcggccgcggcgcgggcggcgacgacgcgggcgcccgagacgctccctctcttcccgacctgcggcgacgacggcggcagcggtagcagcagctacttgccgttctggggtgccgcgtccacaactgccggcgccacttcttccgttgcgatccagcagcaacaccagctgcaggagcagtacagcttttacagcaacagcaacagcacccagctggccggcaccggcaaccaagacgtatcggcaacagcagcagcagccgccgccctggagctgagcctcagctcatggtgctccccttaccctgctgcagggagtatgtgagagcaacgcgagctgccactgctcttcactgatgtctctggaatggaaggaggaggaagtgagcatagcgttggtgcgttgctgtcaagggcgaattcacatggttaacctagacttgtccatcttctggattggccaacttaattaatgtatgaaataaaaggatgcacacatagtgacatgctaatcactataatgtgggcatcaaagttgtgtgttatgtgtaattactagttatctgaataaaagagaaagagatcatccatatttcttatcctaaatgaatgtcacgtgtctttataattctttgatgaaccagatgcatttcattaaccaaatccatatacatataaatattaatcatatataattaatatcaattgggttagcaaaacaaatctagtctaggtgtgttttgcgaatgcggccgccaccgcggtggagctcgaattccggtccgggcctagaaggccagcttcaagtttgtacaaaaaagcaggctccggccagaatctcactgactagctaaacagcggccgcatcgagcagctggcttgtggggaccagacaaaaaaggaatggtgcagaattgttaggcgcacctaccaaaagcatctttgcctttattgcaaagataaagcagattcctctagtacaagtggggaacaaaataacgtggaaaagagctgtcctgacagcccactcactaatgcgtatgacgaacgcagtgacgaccacaaaactcgagcaacgagatcatgagccaatcaaagaggagtgatgtagacctaaagcaataatggagccatgacgtaagggcttacgcccatacgaaataattaaaggctgatgtgacctgtcggtctctcagaacctttactttttatgtttggcgtgtatttttaaatttccacggcaatgacgatgtgaccgtcgacccactaaaacattgctttgtcaaaagctaaaaaagatgatgcccgacagccacttgtgtgaagcatgagaagccggtccctccactaagaaaattagtgaagcatcttccagtggtccctccactcacagctcaatcagtgagcaacaggacgaaggaaatgacgtaagccatgacgtctaatcccagggcccggtgaccaatcgaattagcttggcgcgtggaccgaagcttgcatgcctgcagtgcagcgtgacccggtcgtgcccctctctagagataatgagcattgcatgtctaagttataaaaaattaccacatattttttttgtcacacttgtttgaagtgcagtttatctatctttatacatatatttaaactttactctacgaataatataatctatagtactacaataatatcagtgttttagagaatcatataaatgaacagttagacatggtctaaaggacaattgagtattttgacaacaggactctacagttttatctttttagtgtgcatgtgttctcctttttttttgcaaatagcttcacctatataatacttcatccattttattagtacatccatttagggtttagggttaatggtttttatagactaatttttttagtacatctattttattctattttagcctctaaattaagaaaactaaaactctattttagtttttttatttaataatttagatataaaatagaataaaataaagtgactaaaaattaaacaaataccctttaagaaattaaaaaaactaaggaaacatttttcttgtttcgagtagataatgccagcctgttaaacgccgtcgacgagtctaacggacaccaaccagcgaaccagcagcgtcgcgtcgggccaagcgaagcagacggcacggcatctctgtcgctgcctctggacccctctcgagagttccgctccaccgttggacttgctccgctgtcggcatccagaaattgcgtggcggagcggcagacgtgagccggcacggcaggcggcctcctcctcctctcacggcaccggcagctacgggggattcctttcccaccgctccttcgctttcccttcctcgcccgccgtaataaatagacaccccctccacaccctctttccccaacctcgtgttgttcggagcgcacacacacacaaccagatctcccccaaatccacccgtcggcacctccgcttcaaggtacgccgctcgtcctcccccccccccctctctaccttctctagatcggcgttccggtccatgcatggttagggcccggtagttctacttctgttcatgtttgtgttagatccgtgtttgtgttagatccgtgctgctagcgttcgtacacggatgcgacctgtacgtcagacacgttctgattgctaacttgccagtgtttctctttggggaatcctgggatggctctagccgttccgcagacgggatcgatttcatgattttttttgtttcgttgcatagggtttggtttgcccttttcctttatttcaatatatgccgtgcacttgtttgtcgggtcatcttttcatgcttttttttgtcttggttgtgatgatgtggtctggttgggcggtcgttctagatcggagtagaattctgtttcaaactacctggtggatttattaattttggatctgtatgtgtgtgccatacatattcatagttacgaattgaagatgatggatggaaatatcgatctaggataggtatacatgttgatgcgggttttactgatgcatatacagagatgctttttgttcgcttggttgtgatgatgtggtgtggttgggcggtcgttcattcgttctagatcggagtagaatactgtttcaaactacctggtgtatttattaattttggaactgtatgtgtgtgtcatacatcttcatagttacgagtttaagatggatggaaatatcgatctaggataggtatacatgttgatgtgggttttactgatgcatatacatgatggcatatgcagcatctattcatatgctctaaccttgagtacctatctattataataaacaagtatgttttataattattttgatcttgatatacttggatgatggcatatgcagcagctatatgtggatttttttagcactgccttcatacgctatttatttgcttggtactgtttcttttgtcgatgctcaccctgttgtttggtgttacttctgcaggtcgactttaacttagcctaggatccatggccactgtgaacaactggctcgctttctccctctccccgcaggagctgccgccctcccagacgacggactccacactcatctcggccgccaccgccgaccatgtctccggcgatgtctgcttcaacatcccccaagattggagcatgaggggatcagagctttcggcgctcgtcgcggagccgaagctggaggacttcctcggcggcatctccttctccgagcagcatcacaaggccaactgcaacatgatacccagcactagcagcacagtttgctacgcgagctcaggtgctagcaccggctaccatcaccagctgtaccaccagcccaccagctcagcgctccacttcgcggactccgtaatggtggcttcctcggccggtgtccacgacggcggtgccatgctcagcgcggccgccgctaacggtgtcgctggcgctgccagtgccaacggcggcggcatcgggctgtccatgattaagaactggctgcggagccaaccggcgcccatgcagccgagggtggcggcggctgagggcgcgcaggggctctctttgtccatgaacatggcggggacgacccaaggcgctgctggcatgccacttctcgctggagagcgcgcacgggcgcccgagagtgtatcgacgtcagcacagggtggagccgtcgtcgtcacggcgccgaaggaggatagcggtggcagcggtgttgccggcgctctagtagccgtgagcacggacacgggtggcagcggcggcgcgtcggctgacaacacggcaaggaagacggtggacacgttcgggcagcgcacgtcgatttaccgtggcgtgacaaggcatagatggactgggagatatgaggcacatctttgggataacagttgcagaagggaagggcaaactcgtaagggtcgtcaagtctatttaggtggctatgataaagaggagaaagctgctagggcttatgatcttgctgctctgaagtactggggtgccacaacaacaacaaattttccagtgagtaactacgaaaaggagctcgaggacatgaagcacatgacaaggcaggagtttgtagcgtctctgagaaggaagagcagtggtttctccagaggtgcatccatttacaggggagtgactaggcatcaccaacatggaagatggcaagcacggattggacgagttgcagggaacaaggatctttacttgggcaccttcagcacccaggaggaggcagcggaggcgtacgacatcgcggcgatcaagttccgcggcctcaacgccgtcaccaacttcgacatgagccgctacgacgtgaagagcatcctggacagcagcgccctccccatcggcagcgccgccaagcgcctcaaggaggccgaggccgcagcgtccgcgcagcaccaccacgccggcgtggtgagctacgacgtcggccgcatcgcctcgcagctcggcgacggcggagccctggcggcggcgtacggcgcgcactaccacggcgccgcctggccgaccatcgcgttccagccgggcgccgccagcacaggcctgtaccacccgtacgcgcagcagccaatgcgcggcggcgggtggtgcaagcaggagcaggaccacgcggtgatcgcggccgcgcacagcctgcaggacctccaccacctgaacctgggcgcggccggcgcgcacgactttttctcggcagggcagcaggccgccgccgctgcgatgcacggcctgggtagcatcgacagtgcgtcgctcgagcacagcaccggctccaactccgtcgtctacaacggcggggtcggcgacagcaacggcgccagcgccgtcggcggcagtggcggtggctacatgatgccgatgagcgctgccggagcaaccactacatcggcaatggtgagccacgagcaggtgcatgcacgggcctacgacgaagccaagcaggctgctcagatggggtacgagagctacctggtgaacgcggagaacaatggtggcggaaggatgtctgcatgggggactgtcgtgtctgcagccgcggcggcagcagcaagcagcaacgacaacatggccgccgacgtcgggcatggcggcgcgcagctcttcagtgtctggaacgacacttaagcgtacctagtggtacctgacatcttatagtctgcaacctctcgtgtctgaattcctatctttatcaagtgttattgcttccacgactataggacagctttcgtcgaaagcttttgctcatgtgatctcgaaggattcatctagtctgatttttcgtgacttgtatcggttttattggattcatccaacatatatcaataaaaaatgagttgtgtttcctttcttcctagttcagttaaaattatttccctcctgcgcttgtgctgtaattgtctgtgtacctgttgtttgtgactgtgttagttcccttggatatgatttcgtatttgatatgtacatggagatagcttagcttcattattggagtatgaagttagtatgacatagtcactctcctggaaaattgacactgcaaaccatatttttattctgaaccacaaatcctagtcagtccgctggcatatgccgtccgtttgctgaatccagaacgtgggtttggagatgtacggctgagatgcctctatgcgaaggggatttcgtggtgaaacgagatgggagtagagcaacgcccgtggaagatgcttcaaacttccacacttttgagcaacgatcggcagtagtaaggtagacgatttcaagatcaaagcatatgaagataaacaacatcaacaacaaaatttgttggggttctatagagagaaacagagctacatacatacactgttttgtatctaccatctgagatgatgaaaagatgaaaaactaaagaatgccccggcgccaacgccaggacacgccgcgcgcgcgtcacccgagccatctcttgacccagccggcgctgtatatttacacacgttgcagcatcgatcaccacctgttcgatcgcgtcgccgtcaccggcgcgccgcgacttattgaactagtctagggcgcggctaacaacctagcttagattgccttgtctaaacccttaggctaacgcgccactctagaaggccgatctcccccgaacgcgccagatccgatatcgatgggccctggccgaagcttggtcacccggtccgggcctagaaggccgatctcccgggcacccagctttcttgtacaaagtggccgttaacggatcggccagaatggcccggaccgggttaccccgcggttcaaagccaatgactgttgttaggtccagtttctaaggacgaatcatccaatcactggttctttctgaacaaaacaaagagctatagagttacgttactgtagccgagacagagcctgcaatctggttatgccacatactaggttctttcttaaagttgactcactctatcctaagttctacttacaaggagctacaacaaattggtcataaccggagagcgttcaaggaggtaatatcccatcttactctgtagcaaggctacaaaaggagagctaaagaactaggctacaaaaagagagctaaagaactaactatctagcaagactacagagctatagtgtagagatttcataaccggtgagcgttcaaggatactttgaagagaagaggtaatatctcaactagcaagactacaaaaaaatggagatataaaactaactgtctaacaagactacagagctatagtagagatagatacgttcgacacttaagcatgagaattcgagctcggtaccctggttcacaaactcaatacaacacacagtggagtagggtattacgctccggcggcccgaaccactctaaatccttgtgtcctcgtgtgctcttccaccattaatgactgtaattgcagggacacgaagagttgtagcgcttttgccaacaagatccgctatatgctagtagagtggaacctgcacagcaacaagcatccaataatctgagaataagaattatgtgtggtgatggttctcatctctgcaactcgccattttcgcgagagaaccaaatccaagttggtgaagatcatgatttgggctcatgggctggcatagtagctattacctttgcaattgtggttcgaatctatccgatattctccttttcagggagagctaatgcttatgcttattgggtattttggtttgacactgcttcacgcccaaaaaaaggcaactatgtctgagttggatatggcccaaaaaaaggcagctatgtctgagttggatatggaagtcttctttcgtttagggtgaagtaagaccaagctcatgagcttattatcttaggtcggaacaaattagttgataggcatggcacatttatcaaattataatgattttaacagaaaagcaacacctctttttcagcagcaccagctttgcaagctgcaattgacactccaagcatagtatttgctccaaactcagcctgcatttcgcacaatatcatatctatttccatttggataaaatatattttccagaaatatgggaacagaatcaagatacagaaaaaagttgtggtagtagtggtaagtggaaacacaagtacagtgaaaagatagcattatttctgaacagtcaaattaaccgaaataagtagtatcacatactgcccctaaattgactacacccaatgtaaagaattgcttgagcatattgagccatcagttgtttgtttgtgtaacggatttgacaatgcagagttcaggagcaaaaaaccgcaaaggagagaaagagggaaaggatctcctagtatcccaccttgtggcgcgccctgtcaagtgcatgatggcctggtcgatctgcgtctgctgctgcggttccatcccaacgagtgcctccgacaccttgtcgttgatcacccgcaccgcgtaggcgacccccctggcgaggaacttccgcctctcggaggccccggccgcgtcggcggcggcgccctcgagcgcgcccacgctagccgtagatgctcggtgcacggccttgttggtgtgcaactcgacctcaacggccggtgcgctacgcccgtcaaggatctggcgcgcccgcaccctcgtgatcacggtgggcgcctcccgcctcatgtggccgacgatgaaaagcgccgggttaggggccttggcgcgcaccgccgtattcagggcctcctcgctcttgcgcgagagcaggtgcttccccaggtactcctgcactgacaaggctgccacagcggtggaatttgtcctcacgacttcgccacgtcgtcctcacctccctggcttcccacgactccgccgtatcgaggtgctcggtgggtcgtcttaatccgaagtccgaactaggaagacgagacagagaggtctgaggaatgggcctcgtttgatgttgagctgaattatttttccagcataagcccaggtcttggtccatgaacaaaattactagaaacccagcccagtactacgatctaaaagagggactgccactggatagctctctctagcattctccacgctccaatacagcggcgtcgtgtctatccgggtctatccgcgaacacgtgagaactctccagaaactgctttctcctccacttcatctctctcgctttccctctataaaaagaccccttctaggaattgagggagacagcaagcaccaagcagcgatccgaagctcaatcaattcactcaaacctcttccccaaatcttcgattagatcttcgttgacaagaagactagaaccgaacctgacatgtccaacctgctcacggttcaccagaaccttccggctcttccagtggacgcgacgtccgatgaagtcaggaagaacctcatggacatgttccgcgacaggcaagcgttcagcgagcacacctggaagatgctgctctccgtctgccgctcctgggctgcatggtgcaagctgaacaacaggaagtggttccccgctgagcccgaggacgtgagggattaccttctgtacctgcaagcgcgaggtttgtttctgcttctacctttgatatatatataataattatcattaattagtagtaatataatatttcaaatatttttttcaaaataaaagaatgtagtatatagcaattgcttttctgtagtttataagtgtgtatattttaatttataacttttctaatatatgaccaaaacatggtgatgcctaggtctggcagtgaagaccatccagcaacaccttggacaactgaacatgcttcacaggcgctccggcctcccgcgccccagcgactcgaacgccgtgagcctcgtcatgcgccgcatcaggaaggaaaacgtcgatgccggcgaaagggcaaagcaggccctcgcgttcgagaggaccgatttcgaccaggtccgcagcctgatggagaacagcgacaggtgccaggacattaggaacctggcgttcctcggaattgcatacaacacgctcctcaggatcgcggaaattgcccgcattcgcgtgaaggacattagccgcaccgacggcggcaggatgcttatccacattggcaggaccaagacgctcgtttccaccgcaggcgtcgaaaaggccctcagcctcggagtgaccaagctcgtcgaacgctggatctccgtgtccggcgtcgcggacgacccaaacaactacctcttctgccgcgtccgcaagaacggggtggctgcccctagcgccaccagccaactcagcacgagggccttggaaggtattttcgaggccacccaccgcctgatctacggcgcgaaggatgacagcggtcaacgctacctcgcatggtccgggcactccgcccgcgttggagctgctagggacatggcccgcgccggtgtttccatccccgaaatcatgcaggcgggtggatggacgaacgtgaacattgtcatgaactacattcgcaaccttgacagcgagacgggcgcaatggttcgcctcctggaagatggtgactgaggtacccaacctagacttgtccatcttctggattggccaacttaattaatgtatgaaataaaaggatgcacacatagtgacatgctaatcactataatgtgggcatcaaagttgtgtgttatgtgtaattactagttatctgaataaaagagaaagagatcatccatatttcttatcctaaatgaatgtcacgtgtctttataattctttgatgaaccagatgcatttcattaaccaaatccatatacatataaatattaatcatatataattaatatcaattgggttagcaaaacaaatctagtctaggtgtgttttgcgatccgatatcgaattggccacggtaccagctgctgctgttctagggttcacaagtctgcctatttgtcttccccaatggagctatggttgtctggtctggtccttggtcgtgtcccgtttcattgtgtactatttacctgtaatgtgtatccttaagtctggtttgatggtgtctgaaacgttttgctgtggtagagcagcatggaagaactataatgaataagtgatccctaatcattgtgtccaaattttgcttctgctatacccttttgtgctgtttcttatgttttgcttaaaaatttgatctgacaaacaaatttgtctaaattatgctcttgttctgactgtgtactgtacacatttgtattgctaccggtttggcacatagttttctctttgattgcagatcaaacccttctgattgcagattgcttggctatggctgatgtgctcactgttcttctttagcttgtatattgctgatggtggcttggctacggctgaaaaagttgctgctgcgccgacttggcaactgttgctccagtaatgctttgtcctctcttcctagccgccgacttggcacttggcagctgttgctcctgtaatgcgttgttatctcttatctcttgagatgtactatgattttgaggctgtttgacttgtgccagattgccagtgctgatgctatattatctcaggtttttatgctagtatatgttttactgtgtgctgcctgtgtcgagttacgtaatctattgaaccgctatgcgtgttgatgccctgttgttgcttgccagattgatgcccctgttgcttgcagcttgcaagctgtagtgaaatcctaaaattccaaaccaaatctattctgaacttttgaagatctgtgatgtccggaagaaaagattcaaacagataaacgggactctccagaatctataaaataaatgatcgacaaacgctttgctttggtaggcttcaagcttggtcacccggtccgggcctagaaggccagcttcggccgccccgggcaactttattatacaaagttgatagataaatcagatatctggttcctaaggacccggcggaccgattaaactgattcggtccgacgcgttacctaataacttcgtatagcatacattatacgaagttattagctaactaactagtaagcttaagccatgggtcgacggatccgttaactagcgtggcatttggcaccgccgcacactatgcgagctaggagtgctagtttacagatgaaactatgaaaccaagaaaacacaattgtccgtagctagcgcgtggcgtcgtgtcaagcttcacacagtatcttcgttcttcactataaatcgcgcctgttgttcgtgagacccaccaccgtggataacagtcccctaataataagcgatcaacagcactgctgatggctgaacaccgaggcgccgccgcgcgtaaccatccgccggagcagcccgtcgtgccggcgaacgacgccttccccgaccgcgcccagcagctctgcctcgacgccgggcgcgcgctcgcgatgtgcggcgtgctcgtcgccgtccctcccgcattttacgcgtcgacgtcgcggacgacaccgcacttgccttcgtcggcttcgtcctctggatcatcggtgcgtggctgtgcctcctggcgctcacgcccttggctccacgggcggtgagggcgggcggggccgccgccagcaccttgctgatcaggtgcctgtccctttcatgaactactagcgcccgcgcccgcggccgccgggcacaagagaacacatcgatgttcgctgcgtacgtcagcaataaggcactctttgtcagtagtcgagtgcatatgttgggtgtttgccctgggagatttcaagtgttgtggccattatcccgcaggataaaaaatcggcggcttttggattgatacggaaaataacgatgtttcatgctcgtgttgtgtgtgtgacatcttgtcagccaagtttttaaccgttgctactccccctctgtgggctcagtgtgtggaccggaatacgtcgtacataggccgtagcctaagcccaatatgccgtttttcaggttggcctgtgtgacgacaagcgggtctcaaaagcccatcacgcaactggcctgcaattattggaggagagcgcgtcgagttggttccagaggctgcgtggtggggccggactctgcgacgacctctcgttcgcgtccgatttggttgccgtgagccgtgacgtaacgcctccttccgttcctccctatataagttccacccccgggtccggtttccccaagccccagtgacccccgatcccgatcgcgaaatctccgcacccgccggcaagggaccgaagcaagcctctctcccgaccgtcgcatcaaggtacgcgtccgctcgatctgtcctcttccttctcgatttgacttgctgtggtgcccgatcacgggatcagaatcgcaccagtgtagatttcgcatgttctaagatgtgttagtttccaggctaatccagttctcttgacgcccgatccgatcgagctccgtgtttatttcagcctaatcgtagtattcccctaaaatttcctcattagggggttcgcaagattgttggtcgacaggttcacttatgctcgatcgcttacttttagtcgattcatgctgcgtactattgttgccccccgtggttttatcttttctcgtgtgaaatccagtagatatagtagatatcgtagcattaggttttaattcaatcgattgattattgtatcatcaaaattgagaagttcgaatcatgcctatcatgctgcctcaaccgaaatcctgtatattgaagtttcaattcaattgattgatcattcattagattcaaccaaaatctagaaggttagatgacgcatgtcatgctgcctgcgtagtttacctttgatctgtttatgattaccttatcagtaggatatttgtgattttgggaagtagcactaactgattcatgctgacatgatgttccctttcagattatactgttgagtcctatctaattgatgctttgtatgctatatgaatacgtcatggtaaattagcagttaattagcatattagcaattgggcgtacctcatcaggattgctcttgtagatgtgtgtggtgatgtttcttgttcaattcatgttctgctttaaaagtatgtgttctctgtttgttaattaagattcatggttataatgatttggacctaattaatcagggttgcccttttagatgcgtggttacttgttgagttcatttttttcctgctatagttgtatgcgtttgttcattcatggttagatttgatttgtttcttctctattccatgccttccatatacttcaattgtagcttaacatgagatttctgtatatgcaggtcgaccgccggggatccacacgacaccatggcccagtccaagcacggcctgaccaaggagatgaccatgaagtaccgcatggagggctgcgtggacggccacaagttcgtgatcaccggcgagggcatcggctaccccttcaagggcaagcaggccatcaacctgtgcgtggtggagggcggccccttgcccttcgccgaggacatcttgtccgccgccttcatgtacggcaaccgcgtgttcaccgagtacccccaggacatcgtcgactacttcaagaactcctgccccgccggctacacctgggaccgctccttcctgttcgaggacggcgccgtgtgcatctgcaacgccgacatcaccgtgagcgtggaggagaactgcatgtaccacgagtccaagttctacggcgtgaacttccccgccgacggccccgtgatgaagaagatgaccgacaactgggagccctcctgcgagaagatcatccccgtgcccaagcagggcatcttgaagggcgacgtgagcatgtacctgctgctgaaggacggtggccgcttgcgctgccagttcgacaccgtgtacaaggccaagtccgtgccccgcaagatgcccgactggcacttcatccagcacaagctgacccgcgaggaccgcagcgacgccaagaaccagaagtggcacctgaccgagcacgccatcgcctccggctccgccttgccctccggactcagatctcgatagagtcaacctagacttgtccatcttctggattggccaacttaattaatgtatgaaataaaaggatgcacacatagtgacatgctaatcactataatgtgggcatcaaagttgtgtgttatgtgtaattactagttatctgaataaaagagaaagagatcatccatatttcttatcctaaatgaatgtcacgtgtctttataattctttgatgaaccagatgcatttcattaaccaaatccatatacatataaatattaatcatatataattaatatcaattgggttagcaaaacaaatctagtctaggtgtgttttgcgaattgcggcgcccttactttaacgcctctaaccaacacccctttatctttataaggaacaataaacagaatttgccccactgttctaaatcacctaataatatccccagctaaaaacaataaaggtttcctagaattaagacaagcatgactgttcctccaggagggtttggaacattgttgcagtcttgcagatacgggcgaagggtgagaaacagagcggagggctggaggtgacctcggtagtcgacgccggagttgagcttgacaacgacggggcggcccctgatggacttgaggaagtccgatggcgtcttcaccgtcccgccggcgcccgaggcgggcctgtcgctgccgccgccgccgctgctcatcttgcgcgctgtgcccccggcggtgtccctgtgttgcggatcgcgggtgggccaggtggatgcgagggcgacccgtttggactccggccggagccgccggatccctggtcggtgtcagtgccgtttactctgggccccacgtgtcagtaccgtctgtagatgacaacaacccgtcgtccacagtcatgtccaaaatatcctttcttcttttttttcgattcggatatctatcttccttttttttttccaaaaatcttcttgacgcaccagcgcgcacgtttgtggtaaacgccgacacgtcggtcccacgtcgatagaccccacccaccagtgagtagcgtgtacgtattcgggggtgacggacgtgtcgccgtcgtcttgctagtcccattcccatctgagccacacatctctgaacaaaaaaaaggagggaggcctccacgcacatccccctccgtgccacccgccccaaaccctcgcgccgcctccgagacagccgccgcaaccatggccaccgccgccgccgcgtctaccgcgctcactggcgccactaccgctgcgcccaaggcgaggcgccgggcgcacctcctggccacccgccgcgccctcgccgcgcccatcaggtgctcagcggcgtcacccgccatgccgatggctcccccggccaccccgctccggccgtggggccccaccgagccccgcaagggtgctgacatcctcgtcgagtccctcgagcgctgcggcgtccgcgacgtcttcgcctaccccggcggcgcgtccatggagatccaccaggcactcacccgctcccccgtcatcgccaaccacctcttccgccacgagcaaggggaggcctttgccgcctccggctacgcgcgctcctcgggccgcgtcggcgtctgcatcgccacctccggccccggcgccaccaacctagtctccgcgctcgccgacgcgctgctcgattccgtccccatggtcgccatcacgggacaggtggcgcgacgcatgattggcaccgacgccttccaggagacgcccatcgtcgaggtcacccgctccatcaccaagcacaactacctggtcctcgacgtcgacgacatcccccgcgtcgtgcaggaggctttcttcctcgcctcctctggtcgaccagggccggtgcttgtcgacatccccaaggacatccagcagcagatggcggtgcctgtctgggacaagcccatgagtctgcctgggtacattgcgcgccttcccaagccccctgcgactgagttgcttgagcaggtgctgcgtcttgttggtgaatcgcggcgccctgttctttatgtgggcggtggctgcgcagcatctggtgaggagttgcgacgctttgtggagctgactggaatcccggtcacaactactcttatgggcctcggcaacttccccagcgacgacccactgtctctgcgcatgctaggtatgcatgggacggtgtatgcaaattatgcagtggataaggccgatctgttgcttgcacttggtgtgcggtttgatgatcgcgtgacagggaagattgaggcttttgcaagcagggctaagattgtgcacgttgatattgatccggctgagattggcaagaacaagcagccacatgtgtccatctgtgcagatgttaagcttgctttgcagggcatgaatgctcttcttgaaggaagcacatcaaagaagagctttgactttggctcatggaacgatgagttggatcagcagaagagggaattcccccttgggtataaaacatctaatgaggagatccagccacaatatgctattcaggttcttgatgagctgacgaaaggcgaggccatcatcggcacaggtgttgggcagcaccagatgtgggcggcacagtactacacttacaagcggccaaggcagtggttgtcttcagctggtcttggggctatgggatttggtttgccggctgctgctggtgcttctgtggcaaacccaggtgtcactgttgttgacatcgatggagatggtagctttctcatgaacgttcaggagctagctatgatccgaattgagaacctcccagtgaaggtctttgtgctaaacaaccagcacctggggatggtggtgcagttggaggacaggttctataaggccaacagagcgcacacatacttgggaaacccagagaatgaaagtgagatatatccagatttcgtgacgatcgccaaagggttcaacattccagcggtccgtgtgacaaagaagaacgaagtccgcgcagcgataaagaagatgctcgagactccagggccgtacctcttggatataatcgtcccacaccaggagcatgtgttgcctatgatccctagtggtggggctttcaaggatatgatcctggatggtgatggcaggactgtgtactgactagctagtcagttaacagatctgccagatcctcggtgtacaaataacccgtcttatcctatgagacgggccggcgtcagtgtgttctggaggaatttttatgtcagagcctttttctttgtgtgcttgatgtagatgccaagggaagcttattggctgttgaagcttgatgcaaaataaattatggaactctgttttttgtttatctaataataactagcaaatatgcttccattgcattgaaactaacagccttttgtgtttccaagttttattttgtgacaatgtcatctatttcaattagttgtggaatcggaaacttgcaggactaacttggaaactccaatccctcagcatcctggactttttcctggtgtaatccatgtagatattattttaatcatcattttagttctggaggtttttccatctccggttttgctcccctttcttcaaaaaaaaaaaaaaaatgccgtaggcgccgcaacgcccacctgttgttcaaactcatgggcacgagtggctcgaagattttatacaacaattgctgtagtttcaccgttgctggtgaagaagcatttttttaaaaaaatatagtggtattcattttaattagtttagttgtgcagcgagcaaaatttggacatgctctgctcggaatctgatcgacctagacacagattagcagcagtagctttgtcatctgttccaagagttgcgatctgatagaagaaaaaaaaaccttcccttcaatgtaaaaccgaaactaacaagaaagaagcacagtgccgtttaggcaagtatggagtacgtattaagcatgtagaaggccatgcatgaaccactaacaagaaagaagcgcagtgccattcaggcaagcataagcatgtagattggcatgcatgaacaactaacagtagatcgtctctggtctgattagaagttttttgggaagccaagaaatcatgtacaactggttccatctcaaattccgtggcaaaaagaggcctaagcaacatacctcgagtagatcacattcaagcttggtcacccggtccgtcaatattctgattccgatgacttcgtaggttcctagctcaagccgctcgtgtccaagcgtcacttacgattagctaatgattacggcatctaggaccgactagtggcgcgccgactagctagctaaggtaccgagctcgaattcattccgattaatcgtggcctcttgctcttcaggatgaagagctatgtttaaacgtgcaagcgctactagacaattcagtacattaaaaacgtccgcaatgtgttattaagttgtctaagcgtcaatttgtttacaccacaatatatcctgcca

SEQ ID NO: 259 - DNA, 22361 bp, synthetic construct
  misc_feature 1..22361: note = PHP98564
  source 1..22361: mol_type = other DNA
gtttacccgccaatatatcctgtcaaacactgatagtttaaactgaaggcgggaaacgacaatctgatcatgagcggagaattaagggagtcacgttatgacccccgccgatgacgcgggacaagccgttttacgtttggaactgacagaaccgcaacgttgaaggagccactcagcaagctggtacgattgtaatacgactcactatagggcgaattgagcgctgtttaaacgctcttcaactggaagagcggttacgctgtttaaacgctcttcaactggaagagcggttactaccggttcactagctagctgctaatcgagctagttaccctatgaggtgacatgaagcgctcacggttactatgacggttagcttcacgactgttggtggcagtagcgtacgacttagctatagttccggacttacccttaagcgatttaaatctgcggttaccgaattcgagctcggtacctagtacccttgtacttttggtttcacctgcatagagaaaacccacaagaatatgacagtctgatttgtcagtctcattctcaagcaacatttctctatccgttactttcatggtgaataacacaatccatcatcaatactttgtgttactcagaaactgaaagttattccgagtcttgcatatctttggacctactcgtttttctaccattattgctgattgttaagctctcgctacttgaatcggcattgttggagtgggaaggttcaaaaaattggagttatgactagttgtctctttctatgtacgatggagaaaatgaataaacaactgagaaaatggctcttgtttagttgatgatgctcttaagctttccactggttgccatatatgatttgggcatttcactttgatcttaatgggccttgtaaagcccaagactcatgattatctttagttgatgctcttaattaggtgtgggcaaataattcaaactgtatgtacccgaccaaaaccaaagcaaaaataatcgaaccaaaccgaaaatttaaaaataaccgaatgaaaactaaatcctataactgaaagaactgaaaccgaatcaaaatatttaatgtaaccaaaaatatccgaaatataattatattgtcaaaaatattaataatttctagattaaataattaaaaatacttaaaaatttatataaaatagtaaaaatactcgaaaataaccacaaatattcaaaaacaaccgaaatatcccaaaatattcaaagcaaaataaccgaatggataccaaattttaaaaccgaaaaaactggaacaaaaccaaaatcgaaccaaaatttcaaaaatcgaataaatactaaactttagaacaaaaaaaaacgataaccgaatgtatacgaaccaaagccgaattagataaccgaacgtccaggactactcttaatctttccgccacttatgatttgggctattactttgtttataatgagccttttcaagctcaagttcatgattgtccgtgagatgagaaactgacttgttggattcgaaaccctagctagtattggttaatacttaatacataaatgacctgcattgacatcatcatccaagaaaataaaaattgtatgcttgagatatttagttttcctagctaggttttctttattttagtaccgaatctttaggtgtgccacgttaatttagacccattttttcatacttaccaactgagtctagtttaatcatgactataatcgtataaaatgattcagtcgacgtcattgcgaacgtatataaaatcatccaaattgacgtcattccaaagaggtaagcatgcttatctaagagtccgagcatactaaacaagacgacattttatttgcactccaaatcaaattttgtattgcctaaagaaaaacaatcaaactcaagtttcttaaaattaatttcattcaaactaatcactttcaatatctcacatattattcatgccatttctatttgtctaaacatgatttaaaaaaaaaagtaaaatacaaagattactatgcaaaaactctataaaaaaaaattcaaatttcttatttatttgtgacatcaaattttcaaaataatttttttaattatcggttgatccggtcagtcgataaaaacataaactttcagcgaccgttaaaactttcctactaccgatttagagaaaatcttagcttgaaacgtaattgtaacctgccttcatgcaagtcgcaagatatgtcatcctaagttgtatatgttttctcaaaagatgtatttacttgagaaaatacgtttcaacgttgatggacaaccaattaagaatcaagcacctttcgtaatcaatttaggcttatcgtctaaggtatactgatttacgacagttgactagacttataaggaacaaaataatagaatagtttctaaacacttcacctaatcatagagactaagatggtaattcgtaaacgacaaagcctagtgacactgtccattgtaaaattccacatcatattagtattaaacatatacatgtagtttcctgaacacatgtagtatcaaacacacttcgtggcttcttcctcgaaacctgcggccgcgctatagttccggacttacccttaagataacttcgtatagcatacattatacgaagttatgggcccacgcgtgaagagcggttaccagagctggtcacctttgtccaccaagatggaactgtcttcggccagaatggccatctggattcagcaggcctagaaggccatttatcgctatcaactttgtatagaaaagttgggccgagctcggtacggccagaatggcccggaccgggttaccgaattcttaccctagctccctgcggctgttacgcggtcccccatcaatcttctgttcttgcggttgtagcctgtgtaacagtgctagagtatgtatgataaataggttttaagtctgcttacatgacattttttattgtggaagagacatataaaaattagagagagtggttctcatgcaacggcggacggcccggtgctaaaagagcttcaagacaaaataatgaaacaggaagagagtagatttatctaagagccaactttattatatgaatgtgtttattgttggctttagatgatatggtaaggagttagagctaataatagataggctctattattattattattaattaaactcgctctaaggaggaaagtgggaggaagggacgaggacgaagactactggaagcatcgtgcatggatgatggatgtggtgtctcttaatgtaggtggccggaggatgtacgtgttaattgcgcgataagcactcagatccaaccgcaaactacctccacactgacacactgatagagagaaagagagacctccgacgactgccgccgcagatgagccacgtacgtatacgacgtctgccggccggctcaggctgccgccatcaccctgctcgaaagtcgcgttaggcggcgccagctacataggagtatctagtctagccagttagtatactactactgcgctgatgatgaattaactctgcatagatactgtacttgcctccctccaacacccaaccacctcctgctcggctcttaataacttggacacggatcgatgccatccaaggaagaacacgacgacgacgacggaacatccaccatgcaagcttgcatccatacgccgatacgcgtgcatccatccatccaccattatttccattttccaccgatcacacgtacacaggcctatttaaggagcgacatcccactgcaactctcctcaccactcatcaccagctagctctagcaaagcacttgccatctaccgaccgccgcattccaaacagcccgacgagctagcagagcggcaggcacctccctcctcaaggaacccatggcggccaatgcgggcggcggtggagcgggaggaggcagcggcagcggcagcgtggctgcgccggcggtgtgccgccccagcggctcgcggtggacgccgacgccggagcagatcaggatgctgaaggagctctactacggctgcggcatccggtcgcccagctcggagcagatccagcgcatcaccgccatgctgcggcagcacggcaagatcgagggcaagaacgtcttctactggttccagaaccacaaggcccgcgagcgccagaagcgccgcctcaccagcctcgacgtcaacgtgcccgccgccggcgcggccgacgccaccaccagccaactcggcgtcctctcgctgtcgtcgccgccgccttcaggcgcggcgcctccctcgcccaccctcggcttctacgccgccggcaatggcggcggatcggctgtgctgctggacacgagttccgactggggcagcagcggcgctgctatggccaccgagacatgcttcctgcaggactacatgggcgtgacggacacgggcagctcgtcgcagtggccacgcttctcgtcgtcggacacgataatggcggcggccgcggcgcgggcggcgacgacgcgggcgcccgagacgctccctctcttcccgacctgcggcgacgacggcggcagcggtagcagcagctacttgccgttctggggtgccgcgtccacaactgccggcgccacttcttccgttgcgatccaacagcaacaccagctgcaggagcagtacagcttttacagcaacagcaacagcacccagctggccggcaccggcaaccaagacgtatcggcaacagcagcagcagccgccgccctggagctgagcctcagctcatggtgctccccttaccctgctgcagggagtatgtgagagcaacgcgagctgccactgctcttcactgatgtctctggaatggaaggaggaggaagtgagaacagatcattcgacaaagcagcattagtccgttgatcggtggaagaccactcgtcagtgttgagttgaatgtttgatcaataaaatacggcaatgctgtaagggttgttttttatgccattgataatacactgtactgttcagttgttgaactctatttcttagccatgccaagtgcttttcttattttgaataacattacagcaaaaagttgaaagacaaaaaaaaaaacccccgaacagagtgctttgggtcccaagcttctttagactgtgttcggcgttccccctaaatttctccccctatatctcactcacttgtcacatcagcgttctctttccccctatatctccacgctctacagcagttccacctatatcaaacctctataccccaccacaacaatattatatactttcatcttcaactaactcatgtaccttccaatttttttctactaataattatttacgtgcacagaaacttagcaaggagagagagagcggggtcacccggtccgggcctagaaggccagcttcaagtttgtacaaaaaagcaggctccggccagaatggcccggaccgggttaccgaattcgagctcggtaccatttaaattgcgcccgccacggccgtggaggtcgtattccggtcagcttgcatccctgcagtgcagcgtgacccggtcgtgcccctctctagagataatgagcattgcatgtctaagttataaaaaattaccacatattttttttgtcacacttgtttgaagtgcagtttatctatctttatacatatatttaaactttactctacgaataatataatctatagtactacaataatatcagtgttttagagaatcatataaatgaacagttagacatggtctaaaggacaattgagtattttgacaacaggactctacagttttatctttttagtgtgcatgtgttctcctttttttttgcaaatagcttcacctatataatacttcatccattttattagtacatccatttagggtttagggttaatggtttttatagactaatttttttagtacatctattttattctattttagcctctaaattaagaaaactaaaactctattttagtttttttatttaataatttagatataaaatagaataaaataaagtgactaaaaattaaacaaataccctttaagaaattaaaaaaactaaggaaacatttttcttgtttcgagtagataatgccagcctgttaaacgccgtcgacgagtctaacggacaccaaccagcgaaccagcagcgtcgcgtcgggccaagcgaagcagacggcacggcatctctgtcgctgcctctggacccctctcgagagttccgctccaccgttggacttgctccgctgtcggcatccagaaattgcgtggcggagcggcagacgtgagccggcacggcaggcggcctcctcctcctctcacggcaccggcagctacgggggattcctttcccaccgctccttcgctttcccttcctcgcccgccgtaataaatagacaccccctccacaccctctttccccaacctcgtgttgttcggagcgcacacacacacaaccagatctcccccaaatccacccgtcggcacctccgcttcaaggtacgccgctcgtcctcccccccccccctctctaccttctctagatcggcgttccggtccatgcatggttagggcccggtagttctacttctgttcatgtttgtgttagatccgtgtttgtgttagatccgtgctgctagcgttcgtacacggatgcgacctgtacgtcagacacgttctgattgctaacttgccagtgtttctctttggggaatcctgggatggctctagccgttccgcagacgggatcgatttcatgattttttttgtttcgttgcatagggtttggtttgcccttttcctttatttcaatatatgccgtgcacttgtttgtcgggtcatcttttcatgcttttttttgtcttggttgtgatgatgtggtctggttgggcggtcgttctagatcggagtagaattctgtttcaaactacctggtggatttattaattttggatctgtatgtgtgtgccatacatattcatagttacgaattgaagatgatggatggaaatatcgatctaggataggtatacatgttgatgcgggttttactgatgcatatacagagatgctttttgttcgcttggttgtgatgatgtggtgtggttgggcggtcgttcattcgttctagatcggagtagaatactgtttcaaactacctggtgtatttattaattttggaactgtatgtgtgtgtcatacatcttcatagttacgagtttaagatggatggaaatatcgatctaggataggtatacatgttgatgtgggttttactgatgcatatacatgatggcatatgcagcatctattcatatgctctaaccttgagtacctatctattataataaacaagtatgttttataattattttgatcttgatatacttggatgatggcatatgcagcagctatatgtggatttttttagccctgccttcatacgctatttatttgcttggtactgtttcttttgtcgatgctcaccctgttgtttggtgttacttctgcaggtcgactctagaggatccatggccactgtgaacaactggctcgctttctccctctccccgcaggagctgccgccctcccagacgacggactccacactcatctcggccgccaccgccgaccatgtctccggcgatgtctgcttcaacatcccccaagattggagcatgaggggatcagagctttcggcgctcgtcgcggagccgaagctggaggacttcctcggcggcatctccttctccgagcagcatcacaaggccaactgcaacatgatacccagcactagcagcacagtttgctacgcgagctcaggtgctagcaccggctaccatcaccagctgtaccaccagcccaccagctcagcgctccacttcgcggactccgtaatggtggcttcctcggccggtgtccacgacggcggtgccatgctcagcgcggccgccgctaacggtgtcgctggcgctgccagtgccaacggcggcggcatcgggctgtccatgattaagaactggctgcggagccaaccggcgcccatgcagccgagggtggcggcggctgagggcgcgcaggggctctctttgtccatgaacatggcggggacgacccaaggcgctgctggcatgccacttctcgctggagagcgcgcacgggcgcccgagagtgtatcgacgtcagcacagggtggagccgtcgtcgtcacggcgccgaaggaggatagcggtggcagcggtgttgccggcgctctagtagccgtgagcacggacacgggtggcagcggcggcgcgtcggctgacaacacggcaaggaagacggtggacacgttcgggcagcgcacgtcgatttaccgtggcgtgacaaggcatagatggactgggagatatgaggcacatctttgggataacagttgcagaagggaagggcaaactcgtaagggtcgtcaagtctatttaggtggctatgataaagaggagaaagctgctagggcttatgatcttgctgctctgaagtactggggtgccacaacaacaacaaattttccagtgagtaactacgaaaaggagctcgaggacatgaagcacatgacaaggcaggagtttgtagcgtctctgagaaggaagagcagtggtttctccagaggtgcatccatttacaggggagtgactaggcatcaccaacatggaagatggcaagcacggattggacgagttgcagggaacaaggatctttacttgggcaccttcagcacccaggaggaggcagcggaggcgtacgacatcgcggcgatcaagttccgcggcctcaacgccgtcaccaacttcgacatgagccgctacgacgtgaagagcatcctggacagcagcgccctccccatcggcagcgccgccaagcgcctcaaggaggccgaggccgcagcgtccgcgcagcaccaccacgccggcgtggtgagctacgacgtcggccgcatcgcctcgcagctcggcgacggcggagccctggcggcggcgtacggcgcgcactaccacggcgccgcctggccgaccatcgcgttccagccgggcgccgccagcacaggcctgtaccacccgtacgcgcagcagccaatgcgcggcggcgggtggtgcaagcaggagcaggaccacgcggtgatcgcggccgcgcacagcctgcaggacctccaccacctgaacctgggcgcggccggcgcgcacgactttttctcggcagggcagcaggccgccgccgctgcgatgcacggcctgggtagcatcgacagtgcgtcgctcgagcacagcaccggctccaactccgtcgtctacaacggcggggtcggcgacagcaacggcgccagcgccgtcggcggcagtggcggtggctacatgatgccgatgagcgctgccggagcaaccactacatcggcaatggtgagccacgagcaggtgcatgcacgggcctacgacgaagccaagcaggctgctcagatggggtacgagagctacctggtgaacgcggagaacaatggtggcggaaggatgtctgcatgggggactgtcgtgtctgcagccgcggcggcagcagcaagcagcaacgacaacatggccgccgacgtcgggcatggcggcgcgcagctcttcagtgtctggaacgacacttaagcgtacgtgccggcctggctctccgaaagggcgtattccagcacactggcggccgttactagacccaacctagacttgtccatcttctggattggccaacttaattaatgtatgaaataaaaggatgcacacatagtgacatgctaatcactataatgtgggcatcaaagttgtgtgttatgtgtaattactagttatctgaataaaagagaaagagatcatccatatttcttatcctaaatgaatgtcacgtgtctttataattctttgatgaaccagatgcatttcattaaccaaatccatatacatataaatattaatcatatataattaatatcaattgggttagcaaaacaaatctagtctaggtgtgttttgcgaatgcggcctccgggcacccagctttcttgtacaaagtggccgttaacggatcggccagaatggcccggaccgggttaccgaattcgagctcggtaccctggttcacaaactcaatacaacacacagtggagtagggtattacgctccggcggcccgaaccactctaaatccttgtgtcctcgtgtgctcttccaccattaatgactgtaattgcagggacacgaagagttgtagcgcttttgccaacaagatccgctatatgctagtagagtggaacctgcacagcaacaagcatccaataatctgagaataagaattatgtgtggtgatggttctcatctctgcaactcgccattttcgcgagagaaccaaatccaagttggtgaagatcatgatttgggctcatgggctggcatagtagctattacctttgcaattgtggttcgaatctatccgatattctccttttcagggagagctaatgcttatgcttattgggtattttggtttgacactgcttcacgcccaaaaaaaggcaactatgtctgagttggatatggcccaaaaaaaggcagctatgtctgagttggatatggaagtcttctttcgtttagggtgaagtaagaccaagctcatgagcttattatcttaggtcggaacaaattagttgataggcatggcacatttatcaaattataatgattttaacagaaaagcaacacctctttttcagcagcaccagctttgcaagctgcaattgacactccaagcatagtatttgctccaaactcagcctgcatttcgcacaatatcatatctatttccatttggataaaatatattttccagaaatatgggaacagaatcaagatacagaaaaaagttgtggtagtagtggtaagtggaaacacaagtacagtgaaaagatagcattatttctgaacagtcaaattaaccgaaataagtagtatcacatactgcccctaaattgactacacccaatgtaaagaattgcttgagcatattgagccatcagttgtttgtttgtgtaacggatttgacaatgcagagttcaggagcaaaaaaccgcaaaggagagaaagagggaaaggatctcctagtatcccaccttgtggcgcgccctgtcaagtgcatgatggcctggtcgatctgcgtctgctgctgcggttccatcccaacgagtgcctccgacaccttgtcgttgatcacccgcaccgcgtaggcgacccccctggcgaggaacttccgcctctcggaggccccggccgcgtcggcggcggcgccctcgagcgcgcccacgctagccgtagatgctcggtgcacggccttgttggtgtgcaactcgacctcaacggccggtgcgctacgcccgtcaaggatctggcgcgcccgcaccctcgtgatcacggtgggcgcctcccgcctcatgtggccgacgatgaaaagcgccgggttaggggccttggcgcgcaccgccgtattcagggcctcctcgctcttgcgcgagagcaggtgcttccccaggtactcctgcactgacaaggctgccacagcggtggaatttgtcctcacgacttcgccacgtcgtcctcacctccctggcttcccacgactccgccgtatcgaggtgctcggtgggtcgtcttaatccgaagtccgaactaggaagacgagacagagaggtctgaggaatgggcctcgtttgatgttgagctgaattatttttccagcataagcccaggtcttggtccatgaacaaaattactagaaacccagcccagtactacgatctaaaagagggactgccactggatagctctctctagcattctccacgctccaatacagcggcgtcgtgtctatccgggtctatccgcgaacacgtgagaactctccagaaactgctttctcctccacttcatctctctcgctttccctctataaaaagaccccttctaggaattgagggagacagcaagcaccaagcagcgatccgaagctcaatcaattcactcaaacctcttccccaaatcttcgattagatcttcgttgacaagaagactagaaccgaacctgacatgtccaacctgctcacggttcaccagaaccttccggctcttccagtggacgcgacgtccgatgaagtcaggaagaacctcatggacatgttccgcgacaggcaagcgttcagcgagcacacctggaagatgctgctctccgtctgccgctcctgggctgcatggtgcaagctgaacaacaggaagtggttccccgctgagcccgaggacgtgagggattaccttctgtacctgcaagcgcgaggtttgtttctgcttctacctttgatatatatataataattatcattaattagtagtaatataatatttcaaatatttttttcaaaataaaagaatgtagtatatagcaattgcttttctgtagtttataagtgtgtatattttaatttataacttttctaatatatgaccaaaacatggtgatgcctaggtctggcagtgaagaccatccagcaacaccttggacaactgaacatgcttcacaggcgctccggcctcccgcgccccagcgactcgaacgccgtgagcctcgtcatgcgccgcatcaggaaggaaaacgtcgatgccggcgaaagggcaaagcaggccctcgcgttcgagaggaccgatttcgaccaggtccgcagcctgatggagaacagcgacaggtgccaggacattaggaacctggcgttcctcggaattgcatacaacacgctcctcaggatcgcggaaattgcccgcattcgcgtgaaggacattagccgcaccgacggcggcaggatgcttatccacattggcaggaccaagacgctcgtttccaccgcaggcgtcgaaaaggccctcagcctcggagtgaccaagctcgtcgaacgctggatctccgtgtccggcgtcgcggacgacccaaacaactacctcttctgccgcgtccgcaagaacggggtggctgcccctagcgccaccagccaactcagcacgagggccttggaaggtattttcgaggccacccaccgcctgatctacggcgcgaaggatgacagcggtcaacgctacctcgcatggtccgggcactccgcccgcgttggagctgctagggacatggcccgcgccggtgtttccatccccgaaatcatgcaggcgggtggatggacgaacgtgaacattgtcatgaactacattcgcaaccttgacagcgagacgggcgcaatggttcgcctcctggaagatggtgactgaggtacccaacctagacttgtccatcttctggattggccaacttaattaatgtatgaaataaaaggatgcacacatagtgacatgctaatcactataatgtgggcatcaaagttgtgtgttatgtgtaattactagttatctgaataaaagagaaagagatcatccatatttcttatcctaaatgaatgtcacgtgtctttataattctttgatgaaccagatgcatttcattaaccaaatccatatacatataaatattaatcatatataattaatatcaattgggttagcaaaacaaatctagtctaggtgtgttttgcgatccgatatcgaattggccacggtaccagctgctgctgttctagggttcacaagtctgcctatttgtcttccccaatggagctatggttgtctggtctggtccttggtcgtgtcccgtttcattgtgtactatttacctgtaatgtgtatccttaagtctggtttgatggtgtctgaaacgttttgctgtggtagagcagcatggaagaactataatgaataagtgatccctaatcattgtgtccaaattttgcttctgctatacccttttgtgctgtttcttatgttttgcttaaaaatttgatctgacaaacaaatttgtctaaattatgctcttgttctgactgtgtactgtacacatttgtattgctaccggtttggcacatagttttctctttgattgcagatcaaacccttctgattgcagattgcttggctatggctgatgtgctcactgttcttctttagcttgtatattgctgatggtggcttggctacggctgaaaaagttgctgctgcgccgacttggcaactgttgctccagtaatgctttgtcctctcttcctagccgccgacttggcacttggcagctgttgctcctgtaatgcgttgttatctcttatctcttgagatgtactatgattttgaggctgtttgacttgtgccagattgccagtgctgatgctatattatctcaggtttttatgctagtatatgttttactgtgtgctgcctgtgtcgagttacgtaatctattgaaccgctatgcgtgttgatgccctgttgttgcttgccagattgatgcccctgttgcttgcagcttgcaagctgtagtgaaatcctaaaattccaaaccaaatctattctgaacttttgaagatctgtgatgtccggaagaaaagattcaaacagataaacgggactctccagaatctataaaataaatgatcgacaaacgctttgctttggtaggcttcaagcttggtcacccggtccgggcctagaaggccagcttcggccgccccgggcaactttattatacaaagttgatagataaatcagatatctggttcctaaggacccggcggaccgattaaactgattcggtccgacgcgttacctaataacttcgtatagcatacattatacgaagttattagctaactaactagtaagcttaagccatgggtcgacggatccgttaactagcgtggcatttggcaccgccgcacactatgcgagctaggagtgctagtttacagatgaaactatgaaaccaagaaaacacaattgtccgtagctagcgcgtggcgtcgtgtcaagcttcacacagtatcttcgttcttcactataaatcgcgcctgttgttcgtgagacccaccaccgtggataacagtcccctaataataagcgatcaacagcactgctgatggctgaacaccgaggcgccgccgcgcgtaaccatccgccggagcagcccgtcgtgccggcgaacgacgccttccccgaccgcgcccagcagctctgcctcgacgccgggcgcgcgctcgcgatgtgcggcgtgctcgtcgccgtccctcccgcattttacgcgtcgacgtcgcggacgacaccgcacttgccttcgtcggcttcgtcctctggatcatcggtgcgtggctgtgcctcctggcgctcacgcccttggctccacgggcggtgagggcgggcggggccgccgccagcaccttgctgatcaggtgcctgtccctttcatgaactactagcgcccgcgcccgcggccgccgggcacaagagaacacatcgatgttcgctgcgtacgtcagcaataaggcactctttgtcagtagtcgagtgcatatgttgggtgtttgccctgggagatttcaagtgttgtggccattatcccgcaggataaaaaatcggcggcttttggattgatacggaaaataacgatgtttcatgctcgtgttgtgtgtgtgacatcttgtcagccaagtttttaaccgttgctactccccctctgtgggctcagtgtgtggaccggaatacgtcgtacataggccgtagcctaagcccaatatgccgtttttcaggttggcctgtgtgacgacaagcgggtctcaaaagcccatcacgcaactggcctgcaattattggaggagagcgcgtcgagttggttccagaggctgcgtggtggggccggactctgcgacgacctctcgttcgcgtccgatttggttgccgtgagccgtgacgtaacgcctccttccgttcctccctatataagttccacccccgggtccggtttccccaagccccagtgacccccgatcccgatcgcgaaatctccgcacccgccggcaagggaccgaagcaagcctctctcccgaccgtcgcatcaaggtacgcgtccgctcgatctgtcctcttccttctcgatttgacttgctgtggtgcccgatcacgggatcagaatcgcaccagtgtagatttcgcatgttctaagatgtgttagtttccaggctaatccagttctcttgacgcccgatccgatcgagctccgtgtttatttcagcctaatcgtagtattcccctaaaatttcctcattagggggttcgcaagattgttggtcgacaggttcacttatgctcgatcgcttacttttagtcgattcatgctgcgtactattgttgccccccgtggttttatcttttctcgtgtgaaatccagtagatatagtagatatcgtagcattaggttttaattcaatcgattgattattgtatcatcaaaattgagaagttcgaatcatgcctatcatgctgcctcaaccgaaatcctgtatattgaagtttcaattcaattgattgatcattcattagattcaaccaaaatctagaaggttagatgacgcatgtcatgctgcctgcgtagtttacctttgatctgtttatgattaccttatcagtaggatatttgtgattttgggaagtagcactaactgattcatgctgacatgatgttccctttcagattatactgttgagtcctatctaattgatgctttgtatgctatatgaatacgtcatggtaaattagcagttaattagcatattagcaattgggcgtacctcatcaggattgctcttgtagatgtgtgtggtgatgtttcttgttcaattcatgttctgctttaaaagtatgtgttctctgtttgttaattaagattcatggttataatgatttggacctaattaatcagggttgcccttttagatgcgtggttacttgttgagttcatttttttcctgctatagttgtatgcgtttgttcattcatggttagatttgatttgtttcttctctattccatgccttccatatacttcaattgtagcttaacatgagatttctgtatatgcaggtcgaccgccggggatccacacgacaccatggcccagtccaagcacggcctgaccaaggagatgaccatgaagtaccgcatggagggctgcgtggacggccacaagttcgtgatcaccggcgagggcatcggctaccccttcaagggcaagcaggccatcaacctgtgcgtggtggagggcggccccttgcccttcgccgaggacatcttgtccgccgccttcatgtacggcaaccgcgtgttcaccgagtacccccaggacatcgtcgactacttcaagaactcctgccccgccggctacacctgggaccgctccttcctgttcgaggacggcgccgtgtgcatctgcaacgccgacatcaccgtgagcgtggaggagaactgcatgtaccacgagtccaagttctacggcgtgaacttccccgccgacggccccgtgatgaagaagatgaccgacaactgggagccctcctgcgagaagatcatccccgtgcccaagcagggcatcttgaagggcgacgtgagcatgtacctgctgctgaaggacggtggccgcttgcgctgccagttcgacaccgtgtacaaggccaagtccgtgccccgcaagatgcccgactggcacttcatccagcacaagctgacccgcgaggaccgcagcgacgccaagaaccagaagtggcacctgaccgagcacgccatcgcctccggctccgccttgccctccggactcagatctcgatagagtcaacctagacttgtccatcttctggattggccaacttaattaatgtatgaaataaaaggatgcacacatagtgacatgctaatcactataatgtgggcatcaaagttgtgtgttatgtgtaattactagttatctgaataaaagagaaagagatcatccatatttcttatcctaaatgaatgtcacgtgtctttataattctttgatgaaccagatgcatttcattaaccaaatccatatacatataaatattaatcatatataattaatatcaattgggttagcaaaacaaatctagtctaggtgtgttttgcgaattgcggcgcccttactttaacgcctctaaccaacacccctttatctttataaggaacaataaacagaatttgccccactgttctaaatcacctaataatatccccagctaaaaacaataaaggtttcctagaattaagacaagcatgactgttcctccaggagggtttggaacattgttgcagtcttgcagatacgggcgaagggtgagaaacagagcggagggctggaggtgacctcggtagtcgacgccggagttgagcttgacaacgacggggcggcccctgatggacttgaggaagtccgatggcgtcttcaccgtcccgccggcgcccgaggcgggcctgtcgctgccgccgccgccgctgctcatcttgcgcgctgtgcccccggcggtgtccctgtgttgcggatcgcgggtgggccaggtggatgcgagggcgacccgtttggactccggccggagccgccggatccctggtcggtgtcagtgccgtttactctgggccccacgtgtcagtaccgtctgtagatgacaacaacccgtcgtccacagtcatgtccaaaatatcctttcttcttttttttcgattcggatatctatcttccttttttttttccaaaaatcttcttgacgcaccagcgcgcacgtttgtggtaaacgccgacacgtcggtcccacgtcgatagaccccacccaccagtgagtagcgtgtacgtattcgggggtgacggacgtgtcgccgtcgtcttgctagtcccattcccatctgagccacacatctctgaacaaaaaaaaggagggaggcctccacgcacatccccctccgtgccacccgccccaaaccctcgcgccgcctccgagacagccgccgcaaccatggccaccgccgccgccgcgtctaccgcgctcactggcgccactaccgctgcgcccaaggcgaggcgccgggcgcacctcctggccacccgccgcgccctcgccgcgcccatcaggtgctcagcggcgtcacccgccatgccgatggctcccccggccaccccgctccggccgtggggccccaccgagccccgcaagggtgctgacatcctcgtcgagtccctcgagcgctgcggcgtccgcgacgtcttcgcctaccccggcggcgcgtccatggagatccaccaggcactcacccgctcccccgtcatcgccaaccacctcttccgccacgagcaaggggaggcctttgccgcctccggctacgcgcgctcctcgggccgcgtcggcgtctgcatcgccacctccggccccggcgccaccaacctagtctccgcgctcgccgacgcgctgctcgattccgtccccatggtcgccatcacgggacaggtggcgcgacgcatgattggcaccgacgccttccaggagacgcccatcgtcgaggtcacccgctccatcaccaagcacaactacctggtcctcgacgtcgacgacatcccccgcgtcgtgcaggaggctttcttcctcgcctcctctggtcgaccagggccggtgcttgtcgacatccccaaggacatccagcagcagatggcggtgcctgtctgggacaagcccatgagtctgcctgggtacattgcgcgccttcccaagccccctgcgactgagttgcttgagcaggtgctgcgtcttgttggtgaatcgcggcgccctgttctttatgtgggcggtggctgcgcagcatctggtgaggagttgcgacgctttgtggagctgactggaatcccggtcacaactactcttatgggcctcggcaacttccccagcgacgacccactgtctctgcgcatgctaggtatgcatgggacggtgtatgcaaattatgcagtggataaggccgatctgttgcttgcacttggtgtgcggtttgatgatcgcgtgacagggaagattgaggcttttgcaagcagggctaagattgtgcacgttgatattgatccggctgagattggcaagaacaagcagccacatgtgtccatctgtgcagatgttaagcttgctttgcagggcatgaatgctcttcttgaaggaagcacatcaaagaagagctttgactttggctcatggaacgatgagttggatcagcagaagagggaattcccccttgggtataaaacatctaatgaggagatccagccacaatatgctattcaggttcttgatgagctgacgaaaggcgaggccatcatcggcacaggtgttgggcagcaccagatgtgggcggcacagtactacacttacaagcggccaaggcagtggttgtcttcagctggtcttggggctatgggatttggtttgccggctgctgctggtgcttctgtggcaaacccaggtgtcactgttgttgacatcgatggagatggtagctttctcatgaacgttcaggagctagctatgatccgaattgagaacctcccagtgaaggtctttgtgctaaacaaccagcacctggggatggtggtgcagttggaggacaggttctataaggccaacagagcgcacacatacttgggaaacccagagaatgaaagtgagatatatccagatttcgtgacgatcgccaaagggttcaacattccagcggtccgtgtgacaaagaagaacgaagtccgcgcagcgataaagaagatgctcgagactccagggccgtacctcttggatataatcgtcccacaccaggagcatgtgttgcctatgatccctagtggtggggctttcaaggatatgatcctggatggtgatggcaggactgtgtactgactagctagtcagttaacagatctgccagatcctcggtgtacaaataacccgtcttatcctatgagacgggccggcgtcagtgtgttctggaggaatttttatgtcagagcctttttctttgtgtgcttgatgtagatgccaagggaagcttattggctgttgaagcttgatgcaaaataaattatggaactctgttttttgtttatctaataataactagcaaatatgcttccattgcattgaaactaacagccttttgtgtttccaagttttattttgtgacaatgtcatctatttcaattagttgtggaatcggaaacttgcaggactaacttggaaactccaatccctcagcatcctggactttttcctggtgtaatccatgtagatattattttaatcatcattttagttctggaggtttttccatctccggttttgctcccctttcttcaaaaaaaaaaaaaaaatgccgtaggcgccgcaacgcccacctgttgttcaaactcatgggcacgagtggctcgaagattttatacaacaattgctgtagtttcaccgttgctggtgaagaagcatttttttaaaaaaatatagtggtattcattttaattagtttagttgtgcagcgagcaaaatttggacatgctctgctcggaatctgatcgacctagacacagattagcagcagtagctttgtcatctgttccaagagttgcgatctgatagaagaaaaaaaaaccttcccttcaatgtaaaaccgaaactaacaagaaagaagcacagtgccgtttaggcaagtatggagtacgtattaagcatgtagaaggccatgcatgaaccactaacaagaaagaagcgcagtgccattcaggcaagcataagcatgtagattggcatgcatgaacaactaacagtagatcgtctctggtctgattagaagttttttgggaagccaagaaatcatgtacaactggttccatctcaaattccgtggcaaaaagaggcctaagcaacatacctcgagtagatcacattcaagcttggtcacccggtccgtcaatattctgattccgatgacttcgtaggttcctagctcaagccgctcgtgtccaagcgtcacttacgattagctaatgattacggcatctaggaccgactagtggcgcgccgactagctagctaaggtaccgagctcgaattcattccgattaatcgtggcctcttgctcttcaggatgaagagctatgtttaaacgtgcaagcgctactagacaattcagtacattaaaaacgtccgcaatgtgttattaagttgtctaagcgtcaatttgtttacaccacaatatatcctgcca

SEQ ID NO: 260 - DNA, 24141 bp, synthetic construct
  misc_feature 1..24141: note = PHP98565
  source 1..24141: mol_type = other DNA
gtttacccgccaatatatcctgtcaaacactgatagtttaaactgaaggcgggaaacgacaatctgatcatgagcggagaattaagggagtcacgttatgacccccgccgatgacgcgggacaagccgttttacgtttggaactgacagaaccgcaacgttgaaggagccactcagcaagctggtacgattgtaatacgactcactatagggcgaattgagcgctgtttaaacgctcttcaactggaagagcggttacgctgtttaaacgctcttcaactggaagagcggttactaccggttcactagctagctgctaatcgagctagttaccctatgaggtgacatgaagcgctcacggttactatgacggttagcttcacgactgttggtggcagtagcgtacgacttagctatagttccggacttacccttaagcgatttaaatctgcggttaccgaattcgagctcggtacctagtacccttgtacttttggtttcacctgcatagagaaaacccacaagaatatgacagtctgatttgtcagtctcattctcaagcaacatttctctatccgttactttcatggtgaataacacaatccatcatcaatactttgtgttactcagaaactgaaagttattccgagtcttgcatatctttggacctactcgtttttctaccattattgctgattgttaagctctcgctacttgaatcggcattgttggagtgggaaggttcaaaaaattggagttatgactagttgtctctttctatgtacgatggagaaaatgaataaacaactgagaaaatggctcttgtttagttgatgatgctcttaagctttccactggttgccatatatgatttgggcatttcactttgatcttaatgggccttgtaaagcccaagactcatgattatctttagttgatgctcttaattaggtgtgggcaaataattcaaactgtatgtacccgaccaaaaccaaagcaaaaataatcgaaccaaaccgaaaatttaaaaataaccgaatgaaaactaaatcctataactgaaagaactgaaaccgaatcaaaatatttaatgtaaccaaaaatatccgaaatataattatattgtcaaaaatattaataatttctagattaaataattaaaaatacttaaaaatttatataaaatagtaaaaatactcgaaaataaccacaaatattcaaaaacaaccgaaatatcccaaaatattcaaagcaaaataaccgaatggataccaaattttaaaaccgaaaaaactggaacaaaaccaaaatcgaaccaaaatttcaaaaatcgaataaatactaaactttagaacaaaaaaaaacgataaccgaatgtatacgaaccaaagccgaattagataaccgaacgtccaggactactcttaatctttccgccacttatgatttgggctattactttgtttataatgagccttttcaagctcaagttcatgattgtccgtgagatgagaaactgacttgttggattcgaaaccctagctagtattggttaatacttaatacataaatgacctgcattgacatcatcatccaagaaaataaaaattgtatgcttgagatatttagttttcctagctaggttttctttattttagtaccgaatctttaggtgtgccacgttaatttagacccattttttcatacttaccaactgagtctagtttaatcatgactataatcgtataaaatgattcagtcgacgtcattgcgaacgtatataaaatcatccaaattgacgtcattccaaagaggtaagcatgcttatctaagagtccgagcatactaaacaagacgacattttatttgcactccaaatcaaattttgtattgcctaaagaaaaacaatcaaactcaagtttcttaaaattaatttcattcaaactaatcactttcaatatctcacatattattcatgccatttctatttgtctaaacatgatttaaaaaaaaaagtaaaatacaaagattactatgcaaaaactctataaaaaaaaattcaaatttcttatttatttgtgacatcaaattttcaaaataatttttttaattatcggttgatccggtcagtcgataaaaacataaactttcagcgaccgttaaaactttcctactaccgatttagagaaaatcttagcttgaaacgtaattgtaacctgccttcatgcaagtcgcaagatatgtcatcctaagttgtatatgttttctcaaaagatgtatttacttgagaaaatacgtttcaacgttgatggacaaccaattaagaatcaagcacctttcgtaatcaatttaggcttatcgtctaaggtatactgatttacgacagttgactagacttataaggaacaaaataatagaatagtttctaaacacttcacctaatcatagagactaagatggtaattcgtaaacgacaaagcctagtgacactgtccattgtaaaattccacatcatattagtattaaacatatacatgtagtttcctgaacacatgtagtatcaaacacacttcgtggcttcttcctcgaaacctgcggccgcgctatagttccggacttacccttaagataacttcgtatagcatacattatacgaagttatgggcccacgcgtgaagagcggttaccagagctggtcacctttgtccaccaagatggaactgtcttcggccagaatggccatctggattcagcaggcctagaaggccatttatcgctatcaactttgtatagaaaagttgggccgagctcggtacggccagaatggcccggaccgggttaccgaattcttaccctagctccctgcggctgttacgcggtcccccatcaatcttctgttcttgcggttgtagcctgtgtaacagtgctagagtatgtatgataaataggttttaagtctgcttacatgacattttttattgtggaagagacatataaaaattagagagagtggttctcatgcaacggcggacggcccggtgctaaaagagcttcaagacaaaataatgaaacaggaagagagtagatttatctaagagccaactttattatatgaatgtgtttattgttggctttagatgatatggtaaggagttagagctaataatagataggctctattattattattattaattaaactcgctctaaggaggaaagtgggaggaagggacgaggacgaagactactggaagcatcgtgcatggatgatggatgtggtgtctcttaatgtaggtggccggaggatgtacgtgttaattgcgcgataagcactcagatccaaccgcaaactacctccacactgacacactgatagagagaaagagagacctccgacgactgccgccgcagatgagccacgtacgtatacgacgtctgccggccggctcaggctgccgccatcaccctgctcgaaagtcgcgttaggcggcgccagctacataggagtatctagtctagccagttagtatactactactgcgctgatgatgaattaactctgcatagatactgtacttgcctccctccaacacccaaccacctcctgctcggctcttaataacttggacacggatcgatgccatccaaggaagaacacgacgacgacgacggaacatccaccatgcaagcttgcatccatacgccgatacgcgtgcatccatccatccaccattatttccattttccaccgatcacacgtacacaggcctatttaaggagcgacatcccactgcaactctcctcaccactcatcaccagctagctctagcaaagcacttgccatctaccgaccgccgcattccaaacagcccgacgagctagcagagcggcaggcacctccctcctcaaggaacccatggcggccaatgcgggcggcggtggagcgggaggaggcagcggcagcggcagcgtggctgcgccggcggtgtgccgccccagcggctcgcggtggacgccgacgccggagcagatcaggatgctgaaggagctctactacggctgcggcatccggtcgcccagctcggagcagatccagcgcatcaccgccatgctgcggcagcacggcaagatcgagggcaagaacgtcttctactggttccagaaccacaaggcccgcgagcgccagaagcgccgcctcaccagcctcgacgtcaacgtgcccgccgccggcgcggccgacgccaccaccagccaactcggcgtcctctcgctgtcgtcgccgccgccttcaggcgcggcgcctccctcgcccaccctcggcttctacgccgccggcaatggcggcggatcggctgtgctgctggacacgagttccgactggggcagcagcggcgctgctatggccaccgagacatgcttcctgcaggactacatgggcgtgacggacacgggcagctcgtcgcagtggccacgcttctcgtcgtcggacacgataatggcggcggccgcggcgcgggcggcgacgacgcgggcgcccgagacgctccctctcttcccgacctgcggcgacgacggcggcagcggtagcagcagctacttgccgttctggggtgccgcgtccacaactgccggcgccacttcttccgttgcgatccaacagcaacaccagctgcaggagcagtacagcttttacagcaacagcaacagcacccagctggccggcaccggcaaccaagacgtatcggcaacagcagcagcagccgccgccctggagctgagcctcagctcatggtgctccccttaccctgctgcagggagtatgtgagagcaacgcgagctgccactgctcttcactgatgtctctggaatggaaggaggaggaagtgagaacagatcattcgacaaagcagcattagtccgttgatcggtggaagaccactcgtcagtgttgagttgaatgtttgatcaataaaatacggcaatgctgtaagggttgttttttatgccattgataatacactgtactgttcagttgttgaactctatttcttagccatgccaagtgcttttcttattttgaataacattacagcaaaaagttgaaagacaaaaaaaaaaacccccgaacagagtgctttgggtcccaagcttctttagactgtgttcggcgttccccctaaatttctccccctatatctcactcacttgtcacatcagcgttctctttccccctatatctccacgctctacagcagttccacctatatcaaacctctataccccaccacaacaatattatatactttcatcttcaactaactcatgtaccttccaatttttttctactaataattatttacgtgcacagaaacttagcaaggagagagagagcggggtcacccggtccgggcctagaaggccagcttcaagtttgtacaaaaaagcaggctccggccagaatctcactgactagctaaacagcggccgcatcgagcagctggcttgtggggaccagacaaaaaaggaatggtgcagaattgttaggcgcacctaccaaaagcatctttgcctttattgcaaagataaagcagattcctctagtacaagtggggaacaaaataacgtggaaaagagctgtcctgacagcccactcactaatgcgtatgacgaacgcagtgacgaccacaaaactcgagcaacgagatcatgagccaatcaaagaggagtgatgtagacctaaagcaataatggagccatgacgtaagggcttacgcccatacgaaataattaaaggctgatgtgacctgtcggtctctcagaacctttactttttatgtttggcgtgtatttttaaatttccacggcaatgacgatgtgaccgtcgacccactaaaacattgctttgtcaaaagctaaaaaagatgatgcccgacagccacttgtgtgaagcatgagaagccggtccctccactaagaaaattagtgaagcatcttccagtggtccctccactcacagctcaatcagtgagcaacaggacgaaggaaatgacgtaagccatgacgtctaatcccagggcccggtgaccaatcgaattagcttggcgcgtggaccgaagcttgcatgcctgcagtgcagcgtgacccggtcgtgcccctctctagagataatgagcattgcatgtctaagttataaaaaattaccacatattttttttgtcacacttgtttgaagtgcagtttatctatctttatacatatatttaaactttactctacgaataatataatctatagtactacaataatatcagtgttttagagaatcatataaatgaacagttagacatggtctaaaggacaattgagtattttgacaacaggactctacagttttatctttttagtgtgcatgtgttctcctttttttttgcaaatagcttcacctatataatacttcatccattttattagtacatccatttagggtttagggttaatggtttttatagactaatttttttagtacatctattttattctattttagcctctaaattaagaaaactaaaactctattttagtttttttatttaataatttagatataaaatagaataaaataaagtgactaaaaattaaacaaataccctttaagaaattaaaaaaactaaggaaacatttttcttgtttcgagtagataatgccagcctgttaaacgccgtcgacgagtctaacggacaccaaccagcgaaccagcagcgtcgcgtcgggccaagcgaagcagacggcacggcatctctgtcgctgcctctggacccctctcgagagttccgctccaccgttggacttgctccgctgtcggcatccagaaattgcgtggcggagcggcagacgtgagccggcacggcaggcggcctcctcctcctctcacggcaccggcagctacgggggattcctttcccaccgctccttcgctttcccttcctcgcccgccgtaataaatagacaccccctccacaccctctttccccaacctcgtgttgttcggagcgcacacacacacaaccagatctcccccaaatccacccgtcggcacctccgcttcaaggtacgccgctcgtcctcccccccccccctctctaccttctctagatcggcgttccggtccatgcatggttagggcccggtagttctacttctgttcatgtttgtgttagatccgtgtttgtgttagatccgtgctgctagcgttcgtacacggatgcgacctgtacgtcagacacgttctgattgctaacttgccagtgtttctctttggggaatcctgggatggctctagccgttccgcagacgggatcgatttcatgattttttttgtttcgttgcatagggtttggtttgcccttttcctttatttcaatatatgccgtgcacttgtttgtcgggtcatcttttcatgcttttttttgtcttggttgtgatgatgtggtctggttgggcggtcgttctagatcggagtagaattctgtttcaaactacctggtggatttattaattttggatctgtatgtgtgtgccatacatattcatagttacgaattgaagatgatggatggaaatatcgatctaggataggtatacatgttgatgcgggttttactgatgcatatacagagatgctttttgttcgcttggttgtgatgatgtggtgtggttgggcggtcgttcattcgttctagatcggagtagaatactgtttcaaactacctggtgtatttattaattttggaactgtatgtgtgtgtcatacatcttcatagttacgagtttaagatggatggaaatatcgatctaggataggtatacatgttgatgtgggttttactgatgcatatacatgatggcatatgcagcatctattcatatgctctaaccttgagtacctatctattataataaacaagtatgttttataattattttgatcttgatatacttggatgatggcatatgcagcagctatatgtggatttttttagcactgccttcatacgctatttatttgcttggtactgtttcttttgtcgatgctcaccctgttgtttggtgttacttctgcaggtcgactttaacttagcctaggatccatggccactgtgaacaactggctcgctttctccctctccccgcaggagctgccgccctcccagacgacggactccacactcatctcggccgccaccgccgaccatgtctccggcgatgtctgcttcaacatcccccaagattggagcatgaggggatcagagctttcggcgctcgtcgcggagccgaagctggaggacttcctcggcggcatctccttctccgagcagcatcacaaggccaactgcaacatgatacccagcactagcagcacagtttgctacgcgagctcaggtgctagcaccggctaccatcaccagctgtaccaccagcccaccagctcagcgctccacttcgcggactccgtaatggtggcttcctcggccggtgtccacgacggcggtgccatgctcagcgcggccgccgctaacggtgtcgctggcgctgccagtgccaacggcggcggcatcgggctgtccatgattaagaactggctgcggagccaaccggcgcccatgcagccgagggtggcggcggctgagggcgcgcaggggctctctttgtccatgaacatggcggggacgacccaaggcgctgctggcatgccacttctcgctggagagcgcgcacgggcgcccgagagtgtatcgacgtcagcacagggtggagccgtcgtcgtcacggcgccgaaggaggatagcggtggcagcggtgttgccggcgctctagtagccgtgagcacggacacgggtggcagcggcggcgcgtcggctgacaacacggcaaggaagacggtggacacgttcgggcagcgcacgtcgatttaccgtggcgtgacaaggcatagatggactgggagatatgaggcacatctttgggataacagttgcagaagggaagggcaaactcgtaagggtcgtcaagtctatttaggtggctatgataaagaggagaaagctgctagggcttatgatcttgctgctctgaagtactggggtgccacaacaacaacaaattttccagtgagtaactacgaaaaggagctcgaggacatgaagcacatgacaaggcaggagtttgtagcgtctctgagaaggaagagcagtggtttctccagaggtgcatccatttacaggggagtgactaggcatcaccaacatggaagatggcaagcacggattggacgagttgcagggaacaaggatctttacttgggcaccttcagcacccaggaggaggcagcggaggcgtacgacatcgcggcgatcaagttccgcggcctcaacgccgtcaccaacttcgacatgagccgctacgacgtgaagagcatcctggacagcagcgccctccccatcggcagcgccgccaagcgcctcaaggaggccgaggccgcagcgtccgcgcagcaccaccacgccggcgtggtgagctacgacgtcggccgcatcgcctcgcagctcggcgacggcggagccctggcggcggcgtacggcgcgcactaccacggcgccgcctggccgaccatcgcgttccagccgggcgccgccagcacaggcctgtaccacccgtacgcgcagcagccaatgcgcggcggcgggtggtgcaagcaggagcaggaccacgcggtgatcgcggccgcgcacagcctgcaggacctccaccacctgaacctgggcgcggccggcgcgcacgactttttctcggcagggcagcaggccgccgccgctgcgatgcacggcctgggtagcatcgacagtgcgtcgctcgagcacagcaccggctccaactccgtcgtctacaacggcggggtcggcgacagcaacggcgccagcgccgtcggcggcagtggcggtggctacatgatgccgatgagcgctgccggagcaaccactacatcggcaatggtgagccacgagcaggtgcatgcacgggcctacgacgaagccaagcaggctgctcagatggggtacgagagctacctggtgaacgcggagaacaatggtggcggaaggatgtctgcatgggggactgtcgtgtctgcagccgcggcggcagcagcaagcagcaacgacaacatggccgccgacgtcgggcatggcggcgcgcagctcttcagtgtctggaacgacacttaagcgtacctagtggtacctgacatcttatagtctgcaacctctcgtgtctgaattcctatctttatcaagtgttattgcttccacgactataggacagctttcgtcgaaagcttttgctcatgtgatctcgaaggattcatctagtctgatttttcgtgacttgtatcggttttattggattcatccaacatatatcaataaaaaatgagttgtgtttcctttcttcctagttcagttaaaattatttccctcctgcgcttgtgctgtaattgtctgtgtacctgttgtttgtgactgtgttagttcccttggatatgatttcgtatttgatatgtacatggagatagcttagcttcattattggagtatgaagttagtatgacatagtcactctcctggaaaattgacactgcaaaccatatttttattctgaaccacaaatcctagtcagtccgctggcatatgccgtccgtttgctgaatccagaacgtgggtttggagatgtacggctgagatgcctctatgcgaaggggatttcgtggtgaaacgagatgggagtagagcaacgcccgtggaagatgcttcaaacttccacacttttgagcaacgatcggcagtagtaaggtagacgatttcaagatcaaagcatatgaagataaacaacatcaacaacaaaatttgttggggttctatagagagaaacagagctacatacatacactgttttgtatctaccatctgagatgatgaaaagatgaaaaactaaagaatgccccggcgccaacgccaggacacgccgcgcgcgcgtcacccgagccatctcttgacccagccggcgctgtatatttacacacgttgcagcatcgatcaccacctgttcgatcgcgtcgccgtcaccggcgcgccgcgacttattgaactagtctagggcgcggctaacaacctagcttagattgccttgtctaaacccttaggctaacgcgccactctagaaggccgatctcccccgaacgcgccagatccgatatcgatgggccctggccgaagcttggtcacccggtccgggcctagaaggccgatctcccgggcacccagctttcttgtacaaagtggccgttaacggatcggccagaatggcccggaccgggttaccccgcggttcaaagccaatgactgttgttaggtccagtttctaaggacgaatcatccaatcactggttctttctgaacaaaacaaagagctatagagttacgttactgtagccgagacagagcctgcaatctggttatgccacatactaggttctttcttaaagttgactcactctatcctaagttctacttacaaggagctacaacaaattggtcataaccggagagcgttcaaggaggtaatatcccatcttactctgtagcaaggctacaaaaggagagctaaagaactaggctacaaaaagagagctaaagaactaactatctagcaagactacagagctatagtgtagagatttcataaccggtgagcgttcaaggatactttgaagagaagaggtaatatctcaactagcaagactacaaaaaaatggagatataaaactaactgtctaacaagactacagagctatagtagagatagatacgttcgacacttaagcatgagaattcgagctcggtaccctggttcacaaactcaatacaacacacagtggagtagggtattacgctccggcggcccgaaccactctaaatccttgtgtcctcgtgtgctcttccaccattaatgactgtaattgcagggacacgaagagttgtagcgcttttgccaacaagatccgctatatgctagtagagtggaacctgcacagcaacaagcatccaataatctgagaataagaattatgtgtggtgatggttctcatctctgcaactcgccattttcgcgagagaaccaaatccaagttggtgaagatcatgatttgggctcatgggctggcatagtagctattacctttgcaattgtggttcgaatctatccgatattctccttttcagggagagctaatgcttatgcttattgggtattttggtttgacactgcttcacgcccaaaaaaaggcaactatgtctgagttggatatggcccaaaaaaaggcagctatgtctgagttggatatggaagtcttctttcgtttagggtgaagtaagaccaagctcatgagcttattatcttaggtcggaacaaattagttgataggcatggcacatttatcaaattataatgattttaacagaaaagcaacacctctttttcagcagcaccagctttgcaagctgcaattgacactccaagcatagtatttgctccaaactcagcctgcatttcgcacaatatcatatctatttccatttggataaaatatattttccagaaatatgggaacagaatcaagatacagaaaaaagttgtggtagtagtggtaagtggaaacacaagtacagtgaaaagatagcattatttctgaacagtcaaattaaccgaaataagtagtatcacatactgcccctaaattgactacacccaatgtaaagaattgcttgagcatattgagccatcagttgtttgtttgtgtaacggatttgacaatgcagagttcaggagcaaaaaaccgcaaaggagagaaagagggaaaggatctcctagtatcccaccttgtggcgcgccctgtcaagtgcatgatggcctggtcgatctgcgtctgctgctgcggttccatcccaacgagtgcctccgacaccttgtcgttgatcacccgcaccgcgtaggcgacccccctggcgaggaacttccgcctctcggaggccccggccgcgtcggcggcggcgccctcgagcgcgcccacgctagccgtagatgctcggtgcacggccttgttggtgtgcaactcgacctcaacggccggtgcgctacgcccgtcaaggatctggcgcgcccgcaccctcgtgatcacggtgggcgcctcccgcctcatgtggccgacgatgaaaagcgccgggttaggggccttggcgcgcaccgccgtattcagggcctcctcgctcttgcgcgagagcaggtgcttccccaggtactcctgcactgacaaggctgccacagcggtggaatttgtcctcacgacttcgccacgtcgtcctcacctccctggcttcccacgactccgccgtatcgaggtgctcggtgggtcgtcttaatccgaagtccgaactaggaagacgagacagagaggtctgaggaatgggcctcgtttgatgttgagctgaattatttttccagcataagcccaggtcttggtccatgaacaaaattactagaaacccagcccagtactacgatctaaaagagggactgccactggatagctctctctagcattctccacgctccaatacagcggcgtcgtgtctatccgggtctatccgcgaacacgtgagaactctccagaaactgctttctcctccacttcatctctctcgctttccctctataaaaagaccccttctaggaattgagggagacagcaagcaccaagcagcgatccgaagctcaatcaattcactcaaacctcttccccaaatcttcgattagatcttcgttgacaagaagactagaaccgaacctgacatgtccaacctgctcacggttcaccagaaccttccggctcttccagtggacgcgacgtccgatgaagtcaggaagaacctcatggacatgttccgcgacaggcaagcgttcagcgagcacacctggaagatgctgctctccgtctgccgctcctgggctgcatggtgcaagctgaacaacaggaagtggttccccgctgagcccgaggacgtgagggattaccttctgtacctgcaagcgcgaggtttgtttctgcttctacctttgatatatatataataattatcattaattagtagtaatataatatttcaaatatttttttcaaaataaaagaatgtagtatatagcaattgcttttctgtagtttataagtgtgtatattttaatttataacttttctaatatatgaccaaaacatggtgatgcctaggtctggcagtgaagaccatccagcaacaccttggacaactgaacatgcttcacaggcgctccggcctcccgcgccccagcgactcgaacgccgtgagcctcgtcatgcgccgcatcaggaaggaaaacgtcgatgccggcgaaagggcaaagcaggccctcgcgttcgagaggaccgatttcgaccaggtccgcagcctgatggagaacagcgacaggtgccaggacattaggaacctggcgttcctcggaattgcatacaacacgctcctcaggatcgcggaaattgcccgcattcgcgtgaaggacattagccgcaccgacggcggcaggatgcttatccacattggcaggaccaagacgctcgtttccaccgcaggcgtcgaaaaggccctcagcctcggagtgaccaagctcgtcgaacgctggatctccgtgtccggcgtcgcggacgacccaaacaactacctcttctgccgcgtccgcaagaacggggtggctgcccctagcgccaccagccaactcagcacgagggccttggaaggtattttcgaggccacccaccgcctgatctacggcgcgaaggatgacagcggtcaacgctacctcgcatggtccgggcactccgcccgcgttggagctgctagggacatggcccgcgccggtgtttccatccccgaaatcatgcaggcgggtggatggacgaacgtgaacattgtcatgaactacattcgcaaccttgacagcgagacgggcgcaatggttcgcctcctggaagatggtgactgaggtacccaacctagacttgtccatcttctggattggccaacttaattaatgtatgaaataaaaggatgcacacatagtgacatgctaatcactataatgtgggcatcaaagttgtgtgttatgtgtaattactagttatctgaataaaagagaaagagatcatccatatttcttatcctaaatgaatgtcacgtgtctttataattctttgatgaaccagatgcatttcattaaccaaatccatatacatataaatattaatcatatataattaatatcaattgggttagcaaaacaaatctagtctaggtgtgttttgcgatccgatatcgaattggccacggtaccagctgctgctgttctagggttcacaagtctgcctatttgtcttccccaatggagctatggttgtctggtctggtccttggtcgtgtcccgtttcattgtgtactatttacctgtaatgtgtatccttaagtctggtttgatggtgtctgaaacgttttgctgtggtagagcagcatggaagaactataatgaataagtgatccctaatcattgtgtccaaattttgcttctgctatacccttttgtgctgtttcttatgttttgcttaaaaatttgatctgacaaacaaatttgtctaaattatgctcttgttctgactgtgtactgtacacatttgtattgctaccggtttggcacatagttttctctttgattgcagatcaaacccttctgattgcagattgcttggctatggctgatgtgctcactgttcttctttagcttgtatattgctgatggtggcttggctacggctgaaaaagttgctgctgcgccgacttggcaactgttgctccagtaatgctttgtcctctcttcctagccgccgacttggcacttggcagctgttgctcctgtaatgcgttgttatctcttatctcttgagatgtactatgattttgaggctgtttgacttgtgccagattgccagtgctgatgctatattatctcaggtttttatgctagtatatgttttactgtgtgctgcctgtgtcgagttacgtaatctattgaaccgctatgcgtgttgatgccctgttgttgcttgccagattgatgcccctgttgcttgcagcttgcaagctgtagtgaaatcctaaaattccaaaccaaatctattctgaacttttgaagatctgtgatgtccggaagaaaagattcaaacagataaacgggactctccagaatctataaaataaatgatcgacaaacgctttgctttggtaggcttcaagcttggtcacccggtccgggcctagaaggccagcttcggccgccccgggcaactttattatacaaagttgatagataaatcagatatctggttcctaaggacccggcggaccgattaaactgattcggtccgacgcgttacctaataacttcgtatagcatacattatacgaagttattagctaactaactagtaagcttaagccatgggtcgacggatccgttaactagcgtggcatttggcaccgccgcacactatgcgagctaggagtgctagtttacagatgaaactatgaaaccaagaaaacacaattgtccgtagctagcgcgtggcgtcgtgtcaagcttcacacagtatcttcgttcttcactataaatcgcgcctgttgttcgtgagacccaccaccgtggataacagtcccctaataataagcgatcaacagcactgctgatggctgaacaccgaggcgccgccgcgcgtaaccatccgccggagcagcccgtcgtgccggcgaacgacgccttccccgaccgcgcccagcagctctgcctcgacgccgggcgcgcgctcgcgatgtgcggcgtgctcgtcgccgtccctcccgcattttacgcgtcgacgtcgcggacgacaccgcacttgccttcgtcggcttcgtcctctggatcatcggtgcgtggctgtgcctcctggcgctcacgcccttggctccacgggcggtgagggcgggcggggccgccgccagcaccttgctgatcaggtgcctgtccctttcatgaactactagcgcccgcgcccgcggccgccgggcacaagagaacacatcgatgttcgctgcgtacgtcagcaataaggcactctttgtcagtagtcgagtgcatatgttgggtgtttgccctgggagatttcaagtgttgtggccattatcccgcaggataaaaaatcggcggcttttggattgatacggaaaataacgatgtttcatgctcgtgttgtgtgtgtgacatcttgtcagccaagtttttaaccgttgctactccccctctgtgggctcagtgtgtggaccggaatacgtcgtacataggccgtagcctaagcccaatatgccgtttttcaggttggcctgtgtgacgacaagcgggtctcaaaagcccatcacgcaactggcctgcaattattggaggagagcgcgtcgagttggttccagaggctgcgtggtggggccggactctgcgacgacctctcgttcgcgtccgatttggttgccgtgagccgtgacgtaacgcctccttccgttcctccctatataagttccacccccgggtccggtttccccaagccccagtgacccccgatcccgatcgcgaaatctccgcacccgccggcaagggaccgaagcaagcctctctcccgaccgtcgcatcaaggtacgcgtccgctcgatctgtcctcttccttctcgatttgacttgctgtggtgcccgatcacgggatcagaatcgcaccagtgtagatttcgcatgttctaagatgtgttagtttccaggctaatccagttctcttgacgcccgatccgatcgagctccgtgtttatttcagcctaatcgtagtattcccctaaaatttcctcattagggggttcgcaagattgttggtcgacaggttcacttatgctcgatcgcttacttttagtcgattcatgctgcgtactattgttgccccccgtggttttatcttttctcgtgtgaaatccagtagatatagtagatatcgtagcattaggttttaattcaatcgattgattattgtatcatcaaaattgagaagttcgaatcatgcctatcatgctgcctcaaccgaaatcctgtatattgaagtttcaattcaattgattgatcattcattagattcaaccaaaatctagaaggttagatgacgcatgtcatgctgcctgcgtagtttacctttgatctgtttatgattaccttatcagtaggatatttgtgattttgggaagtagcactaactgattcatgctgacatgatgttccctttcagattatactgttgagtcctatctaattgatgctttgtatgctatatgaatacgtcatggtaaattagcagttaattagcatattagcaattgggcgtacctcatcaggattgctcttgtagatgtgtgtggtgatgtttcttgttcaattcatgttctgctttaaaagtatgtgttctctgtttgttaattaagattcatggttataatgatttggacctaattaatcagggttgcccttttagatgcgtggttacttgttgagttcatttttttcctgctatagttgtatgcgtttgttcattcatggttagatttgatttgtttcttctctattccatgccttccatatacttcaattgtagcttaacatgagatttctgtatatgcaggtcgaccgccggggatccacacgacaccatggcccagtccaagcacggcctgaccaaggagatgaccatgaagtaccgcatggagggctgcgtggacggccacaagttcgtgatcaccggcgagggcatcggctaccccttcaagggcaagcaggccatcaacctgtgcgtggtggagggcggccccttgcccttcgccgaggacatcttgtccgccgccttcatgtacggcaaccgcgtgttcaccgagtacccccaggacatcgtcgactacttcaagaactcctgccccgccggctacacctgggaccgctccttcctgttcgaggacggcgccgtgtgcatctgcaacgccgacatcaccgtgagcgtggaggagaactgcatgtaccacgagtccaagttctacggcgtgaacttccccgccgacggccccgtgatgaagaagatgaccgacaactgggagccctcctgcgagaagatcatccccgtgcccaagcagggcatcttgaagggcgacgtgagcatgtacctgctgctgaaggacggtggccgcttgcgctgccagttcgacaccgtgtacaaggccaagtccgtgccccgcaagatgcccgactggcacttcatccagcacaagctgacccgcgaggaccgcagcgacgccaagaaccagaagtggcacctgaccgagcacgccatcgcctccggctccgccttgccctccggactcagatctcgatagagtcaacctagacttgtccatcttctggattggccaacttaattaatgtatgaaataaaaggatgcacacatagtgacatgctaatcactataatgtgggcatcaaagttgtgtgttatgtgtaattactagttatctgaataaaagagaaagagatcatccatatttcttatcctaaatgaatgtcacgtgtctttataattctttgatgaaccagatgcatttcattaaccaaatccatatacatataaatattaatcatatataattaatatcaattgggttagcaaaacaaatctagtctaggtgtgttttgcgaattgcggcgcccttactttaacgcctctaaccaacacccctttatctttataaggaacaataaacagaatttgccccactgttctaaatcacctaataatatccccagctaaaaacaataaaggtttcctagaattaagacaagcatgactgttcctccaggagggtttggaacattgttgcagtcttgcagatacgggcgaagggtgagaaacagagcggagggctggaggtgacctcggtagtcgacgccggagttgagcttgacaacgacggggcggcccctgatggacttgaggaagtccgatggcgtcttcaccgtcccgccggcgcccgaggcgggcctgtcgctgccgccgccgccgctgctcatcttgcgcgctgtgcccccggcggtgtccctgtgttgcggatcgcgggtgggccaggtggatgcgagggcgacccgtttggactccggccggagccgccggatccctggtcggtgtcagtgccgtttactctgggccccacgtgtcagtaccgtctgtagatgacaacaacccgtcgtccacagtcatgtccaaaatatcctttcttcttttttttcgattcggatatctatcttccttttttttttccaaaaatcttcttgacgcaccagcgcgcacgtttgtggtaaacgccgacacgtcggtcccacgtcgatagaccccacccaccagtgagtagcgtgtacgtattcgggggtgacggacgtgtcgccgtcgtcttgctagtcccattcccatctgagccacacatctctgaacaaaaaaaaggagggaggcctccacgcacatccccctccgtgccacccgccccaaaccctcgcgccgcctccgagacagccgccgcaaccatggccaccgccgccgccgcgtctaccgcgctcactggcgccactaccgctgcgcccaaggcgaggcgccgggcgcacctcctggccacccgccgcgccctcgccgcgcccatcaggtgctcagcggcgtcacccgccatgccgatggctcccccggccaccccgctccggccgtggggccccaccgagccccgcaagggtgctgacatcctcgtcgagtccctcgagcgctgcggcgtccgcgacgtcttcgcctaccccggcggcgcgtccatggagatccaccaggcactcacccgctcccccgtcatcgccaaccacctcttccgccacgagcaaggggaggcctttgccgcctccggctacgcgcgctcctcgggccgcgtcggcgtctgcatcgccacctccggccccggcgccaccaacctagtctccgcgctcgccgacgcgctgctcgattccgtccccatggtcgccatcacgggacaggtggcgcgacgcatgattggcaccgacgccttccaggagacgcccatcgtcgaggtcacccgctccatcaccaagcacaactacctggtcctcgacgtcgacgacatcccccgcgtcgtgcaggaggctttcttcctcgcctcctctggtcgaccagggccggtgcttgtcgacatccccaaggacatccagcagcagatggcggtgcctgtctgggacaagcccatgagtctgcctgggtacattgcgcgccttcccaagccccctgcgactgagttgcttgagcaggtgctgcgtcttgttggtgaatcgcggcgccctgttctttatgtgggcggtggctgcgcagcatctggtgaggagttgcgacgctttgtggagctgactggaatcccggtcacaactactcttatgggcctcggcaacttccccagcgacgacccactgtctctgcgcatgctaggtatgcatgggacggtgtatgcaaattatgcagtggataaggccgatctgttgcttgcacttggtgtgcggtttgatgatcgcgtgacagggaagattgaggcttttgcaagcagggctaagattgtgcacgttgatattgatccggctgagattggcaagaacaagcagccacatgtgtccatctgtgcagatgttaagcttgctttgcagggcatgaatgctcttcttgaaggaagcacatcaaagaagagctttgactttggctcatggaacgatgagttggatcagcagaagagggaattcccccttgggtataaaacatctaatgaggagatccagccacaatatgctattcaggttcttgatgagctgacgaaaggcgaggccatcatcggcacaggtgttgggcagcaccagatgtgggcggcacagtactacacttacaagcggccaaggcagtggttgtcttcagctggtcttggggctatgggatttggtttgccggctgctgctggtgcttctgtggcaaacccaggtgtcactgttgttgacatcgatggagatggtagctttctcatgaacgttcaggagctagctatgatccgaattgagaacctcccagtgaaggtctttgtgctaaacaaccagcacctggggatggtggtgcagttggaggacaggttctataaggccaacagagcgcacacatacttgggaaacccagagaatgaaagtgagatatatccagatttcgtgacgatcgccaaagggttcaacattccagcggtccgtgtgacaaagaagaacgaagtccgcgcagcgataaagaagatgctcgagactccagggccgtacctcttggatataatcgtcccacaccaggagcatgtgttgcctatgatccctagtggtggggctttcaaggatatgatcctggatggtgatggcaggactgtgtactgactagctagtcagttaacagatctgccagatcctcggtgtacaaataacccgtcttatcctatgagacgggccggcgtcagtgtgttctggaggaatttttatgtcagagcctttttctttgtgtgcttgatgtagatgccaagggaagcttattggctgttgaagcttgatgcaaaataaattatggaactctgttttttgtttatctaataataactagcaaatatgcttccattgcattgaaactaacagccttttgtgtttccaagttttattttgtgacaatgtcatctatttcaattagttgtggaatcggaaacttgcaggactaacttggaaactccaatccctcagcatcctggactttttcctggtgtaatccatgtagatattattttaatcatcattttagttctggaggtttttccatctccggttttgctcccctttcttcaaaaaaaaaaaaaaaatgccgtaggcgccgcaacgcccacctgttgttcaaactcatgggcacgagtggctcgaagattttatacaacaattgctgtagtttcaccgttgctggtgaagaagcatttttttaaaaaaatatagtggtattcattttaattagtttagttgtgcagcgagcaaaatttggacatgctctgctcggaatctgatcgacctagacacagattagcagcagtagctttgtcatctgttccaagagttgcgatctgatagaagaaaaaaaaaccttcccttcaatgtaaaaccgaaactaacaagaaagaagcacagtgccgtttaggcaagtatggagtacgtattaagcatgtagaaggccatgcatgaaccactaacaagaaagaagcgcagtgccattcaggcaagcataagcatgtagattggcatgcatgaacaactaacagtagatcgtctctggtctgattagaagttttttgggaagccaagaaatcatgtacaactggttccatctcaaattccgtggcaaaaagaggcctaagcaacatacctcgagtagatcacattcaagcttggtcacccggtccgtcaatattctgattccgatgacttcgtaggttcctagctcaagccgctcgtgtccaagcgtcacttacgattagctaatgattacggcatctaggaccgactagtggcgcgccgactagctagctaaggtaccgagctcgaattcattccgattaatcgtggcctcttgctcttcaggatgaagagctatgtttaaacgtgcaagcgctactagacaattcagtacattaaaaacgtccgcaatgtgttattaagttgtctaagcgtcaatttgtttacaccacaatatatcctgcca

SEQ ID NO: 261 - DNA, 21542 bp, synthetic construct
  misc_feature 1..21542: note = PHP97447
  source 1..21542: mol_type = other DNA
gtttacccgccaatatatcctgtcaaacactgcggccgcacttgaccgcggatggagccggagctgtggtgaggccatcgacgggaggtgggggagaacacagtctcagtgttctttgtgagtccgcaaggtttttagcttttctgtattaattaaggttgctgttggctgtagaatacggtcgtggaagagctgtatcggtagctactacgtaagctattatatactggaagtctggagctcgtcgatctccggtcgtcttcctccatttctcctcgtcttgctttgactgctgctaccatttgcttctgttttctgatgaagcatgccatgtcggccaccagtgtttgtgtggtttttgcagggaatggctttcaagtgctgtgattgaatggccctcgtcgtcctcggctgagctcacatggacgcgtcatgtgagtgagatatatgatcatatgatgagtggggttcgggtgagtgcgtacttgaagtaggatcccgctttcactcattcattcattggcctttaaaccgggaaattttcgcgaggagatggagggaagcaagcagggtgacgagtgcagagtgccgcgagcgctttgtcaaaaggcaccgccgtaggcaaaaaaatcaatggccctgactgactcgatggtagtactactgtagagactagagagggttgctccccatatcttcgtgtgacttttactccagcattgcatttccgtcattgagacgttaattaatagcagctttcgggacagatgactgtggccatgtttcgtcacggccgcttcgtgccagctgggggtactatagtactgtgattttgttagtaaaaactttcattaggccaccattgacgaccgggccttcgcttttgctgcgctaattaaccatttcccggcgaccgaagggaacatgaacatgccccgacacatgagggcatgaggactagtgttctccctgtcgttcgttgacttgactagtgatagtttaaacgctcttcaactggaagagcggttactaccggttcactagctagctgctaatcgagctagttaccctatgaggtgacatgaagcgctcacggttactatgacggttagcttcacgactgttggtggcagtagcgtacgacttagctatagttccggacttacctagctaataacttcgtatagcatacattatacgaagttatggttaccgaattcgagctcggtaccctggttcacaaactcaatacaacacacagtggagtagggtattacgctccggcggcccgaaccactctaaatccttgtgtcctcgtgtgctcttccaccattaatgactgtaattgcagggacacgaagagttgtagcgcttttgccaacaagatccgctatatgctagtagagtggaacctgcacagcaacaagcatccaataatctgagaataagaattatgtgtggtgatggttctcatctctgcaactcgccattttcgcgagagaaccaaatccaagttggtgaagatcatgatttgggctcatgggctggcatagtagctattacctttgcaattgtggttcgaatctatccgatattctccttttcagggagagctaatgcttatgcttattgggtattttggtttgacactgcttcacgcccaaaaaaaggcaactatgtctgagttggatatggcccaaaaaaaggcagctatgtctgagttggatatggaagtcttctttcgtttagggtgaagtaagaccaagctcatgagcttattatcttaggtcggaacaaattagttgataggcatggcacatttatcaaattataatgattttaacagaaaagcaacacctctttttcagcagcaccagctttgcaagctgcaattgacactccaagcatagtatttgctccaaactcagcctgcatttcgcacaatatcatatctatttccatttggataaaatatattttccagaaatatgggaacagaatcaagatacagaaaaaagttgtggtagtagtggtaagtggaaacacaagtacagtgaaaagatagcattatttctgaacagtcaaattaaccgaaataagtagtatcacatactgcccctaaattgactacacccaatgtaaagaattgcttgagcatattgagccatcagttgtttgtttgtgtaacggatttgacaatgcagagttcaggagcaaaaaaccgcaaaggagagaaagagggaaaggatctcctagtatcccaccttgtggcgcgccctgtcaagtgcatgatggcctggtcgatctgcgtctgctgctgcggttccatcccaacgagtgcctccgacaccttgtcgttgatcacccgcaccgcgtaggcgacccccctggcgaggaacttccgcctctcggaggccccggccgcgtcggcggcggcgccctcgagcgcgcccacgctagccgtagatgctcggtgcacggccttgttggtgtgcaactcgacctcaacggccggtgcgctacgcccgtcaaggatctggcgcgcccgcaccctcgtgatcacggtgggcgcctcccgcctcatgtggccgacgatgaaaagcgccgggttaggggccttggcgcgcaccgccgtattcagggcctcctcgctcttgcgcgagagcaggtgcttccccaggtactcctgcactgacaaggctgccacagcggtggaatttgtcctcacgacttcgccacgtcgtcctcacctccctggcttcccacgactccgccgtatcgaggtgctcggtgggtcgtcttaatccgaagtccgaactaggaagacgagacagagaggtctgaggaatgggcctcgtttgatgttgagctgaattatttttccagcataagcccaggtcttggtccatgaacaaaattactagaaacccagcccagtactacgatctaaaagagggactgccactggatagctctctctagcattctccacgctccaatacagcggcgtcgtgtctatccgggtctatccgcgaacacgtgagaactctccagaaactgctttctcctccacttcatctctctcgctttccctctataaaaagaccccttctaggaattgagggagacagcaagcaccaagcagcgatccgaagctcaatcaattcactcaaacctcttccccaaatcttcgattagatcttcgttgacaagaagactagaaccgaacctgacatgtccaacctgctcacggttcaccagaaccttccggctcttccagtggacgcgacgtccgatgaagtcaggaagaacctcatggacatgttccgcgacaggcaagcgttcagcgagcacacctggaagatgctgctctccgtctgccgctcctgggctgcatggtgcaagctgaacaacaggaagtggttccccgctgagcccgaggacgtgagggattaccttctgtacctgcaagcgcgaggtttgtttctgcttctacctttgatatatatataataattatcattaattagtagtaatataatatttcaaatatttttttcaaaataaaagaatgtagtatatagcaattgcttttctgtagtttataagtgtgtatattttaatttataacttttctaatatatgaccaaaacatggtgatgcctaggtctggcagtgaagaccatccagcaacaccttggacaactgaacatgcttcacaggcgctccggcctcccgcgccccagcgactcgaacgccgtgagcctcgtcatgcgccgcatcaggaaggaaaacgtcgatgccggcgaaagggcaaagcaggccctcgcgttcgagaggaccgatttcgaccaggtccgcagcctgatggagaacagcgacaggtgccaggacattaggaacctggcgttcctcggaattgcatacaacacgctcctcaggatcgcggaaattgcccgcattcgcgtgaaggacattagccgcaccgacggcggcaggatgcttatccacattggcaggaccaagacgctcgtttccaccgcaggcgtcgaaaaggccctcagcctcggagtgaccaagctcgtcgaacgctggatctccgtgtccggcgtcgcggacgacccaaacaactacctcttctgccgcgtccgcaagaacggggtggctgcccctagcgccaccagccaactcagcacgagggccttggaaggtattttcgaggccacccaccgcctgatctacggcgcgaaggatgacagcggtcaacgctacctcgcatggtccgggcactccgcccgcgttggagctgctagggacatggcccgcgccggtgtttccatccccgaaatcatgcaggcgggtggatggacgaacgtgaacattgtcatgaactacattcgcaaccttgacagcgagacgggcgcaatggttcgcctcctggaagatggtgactgaggtacccaacctagacttgtccatcttctggattggccaacttaattaatgtatgaaataaaaggatgcacacatagtgacatgctaatcactataatgtgggcatcaaagttgtgtgttatgtgtaattactagttatctgaataaaagagaaagagatcatccatatttcttatcctaaatgaatgtcacgtgtctttataattctttgatgaaccagatgcatttcattaaccaaatccatatacatataaatattaatcatatataattaatatcaattgggttagcaaaacaaatctagtctaggtgtgttttgcgatccgatcgagtctaaaaacggcccctaactaacgcttagttgcccgctagattagtcccccgttagtgcctagttagacacacgacgaactaggggctaggccggccgagctcggtccgggccattctggcccggaccgaagcttgcatgcctgcagtgcagcgtgacccggtcgtgcccctctctagagataatgagcattgcatgtctaagttataaaaaattaccacatattttttttgtcacacttgtttgaagtgcagtttatctatctttatacatatatttaaactttactctacgaataatataatctatagtactacaataatatcagtgttttagagaatcatataaatgaacagttagacatggtctaaaggacaattgagtattttgacaacaggactctacagttttatctttttagtgtgcatgtgttctcctttttttttgcaaatagcttcacctatataatacttcatccattttattagtacatccatttagggtttagggttaatggtttttatagactaatttttttagtacatctattttattctattttagcctctaaattaagaaaactaaaactctattttagtttttttatttaataatttagatataaaatagaataaaataaagtgactaaaaattaaacaaataccctttaagaaattaaaaaaactaaggaaacatttttcttgtttcgagtagataatgccagcctgttaaacgccgtcgacgagtctaacggacaccaaccagcgaaccagcagcgtcgcgtcgggccaagcgaagcagacggcacggcatctctgtcgctgcctctggacccctctcgagagttccgctccaccgttggacttgctccgctgtcggcatccagaaattgcgtggcggagcggcagacgtgagccggcacggcaggcggcctcctcctcctctcacggcaccggcagctacgggggattcctttcccaccgctccttcgctttcccttcctcgcccgccgtaataaatagacaccccctccacaccctctttccccaacctcgtgttgttcggagcgcacacacacacaaccagatctcccccaaatccacccgtcggcacctccgcttcaaggtacgccgctcgtcctcccccccccccctctctaccttctctagatcggcgttccggtccatgcatggttagggcccggtagttctacttctgttcatgtttgtgttagatccgtgtttgtgttagatccgtgctgctagcgttcgtacacggatgcgacctgtacgtcagacacgttctgattgctaacttgccagtgtttctctttggggaatcctgggatggctctagccgttccgcagacgggatcgatttcatgattttttttgtttcgttgcatagggtttggtttgcccttttcctttatttcaatatatgccgtgcacttgtttgtcgggtcatcttttcatgcttttttttgtcttggttgtgatgatgtggtctggttgggcggtcgttctagatcggagtagaattctgtttcaaactacctggtggatttattaattttggatctgtatgtgtgtgccatacatattcatagttacgaattgaagatgatggatggaaatatcgatctaggataggtatacatgttgatgcgggttttactgatgcatatacagagatgctttttgttcgcttggttgtgatgatgtggtgtggttgggcggtcgttcattcgttctagatcggagtagaatactgtttcaaactacctggtgtatttattaattttggaactgtatgtgtgtgtcatacatcttcatagttacgagtttaagatggatggaaatatcgatctaggataggtatacatgttgatgtgggttttactgatgcatatacatgatggcatatgcagcatctattcatatgctctaaccttgagtacctatctattataataaacaagtatgttttataattattttgatcttgatatacttggatgatggcatatgcagcagctatatgtggatttttttagccctgccttcatacgctatttatttgcttggtactgtttcttttgtcgatgctcaccctgttgtttggtgttacttctgcaggtcgactttaacttagcctaggatccatggcggccaatgcgggcggcggtggagcgggaggaggcagcggcagcggcagcgtggctgcgccggcggtgtgccgccccagcggctcgcggtggacgccgacgccggagcagatcaggatgctgaaggagctctactacggctgcggcatccggtcgcccagctcggagcagatccagcgcatcaccgccatgctgcggcagcacggcaagatcgagggcaagaacgtcttctactggttccagaaccacaaggcccgcgagcgccagaagcgccgcctcaccagcctcgacgtcaacgtgcccgccgccggcgcggccgacgccaccaccagccaactcggcgtcctctcgctgtcgtcgccgccgccttcaggcgcggcgcctccctcgcccaccctcggcttctacgccgccggcaatggcggcggatcggctgtgctgctggacacgagttccgactggggcagcagcggcgctgctatggccaccgagacatgcttcctgcaggactacatgggcgtgacggacacgggcagctcgtcgcagtggccacgcttctcgtcgtcggacacgataatggcggcggccgcggcgcgggcggcgacgacgcgggcgcccgagacgctccctctcttcccgacctgcggcgacgacggcggcagcggtagcagcagctacttgccgttctggggtgccgcgtccacaactgccggcgccacttcttccgttgcgatccaacagcaacaccagctgcaggagcagtacagcttttacagcaacagcaacagcacccagctggccggcaccggcaaccaagacgtatcggcaacagcagcagcagccgccgccctggagctgagcctcagctcatggtgctccccttaccctgctgcagggagtatgtgagagcaacgcgagctgccactgctcttcactgatgtctctggaatggaaggaggaggaagtgagaacagatcattcgacaaagcagcattagtccgttgatcggtggaagaccactcgtcagtgttgagttgaatgtttgatcaataaaatacggcaatgctgtaagggttgttttttatgccattgataatacactgtactgttcagttgttgaactctatttcttagccatgccaagtgcttttcttattttgaataacattacagcaaaaagttgaaagacaaaaaaaaaaacccccgaacagagtgctttgggtcccaagcttctttagactgtgttcggcgttccccctaaatttctccccctatatctcactcacttgtcacatcagcgttctctttccccctatatctccacgctctacagcagttccacctatatcaaacctctataccccaccacaacaatattatatactttcatcttcaactaactcatgtaccttccaatttttttctactaataattatttacgtgcacagaaacttagcaaggagagagagagcgggaatttaaatgctcggcgttaggcttttagtccgctaggtggctagaccgaggttaggacgctagttcactaggggcctagtggtgttttaagacgtcacggtcaccacgcgtggaccgaagcttgcatgcctgcagtgcagcgtgacccggtcgtgcccctctctagagataatgagcattgcatgtctaagttataaaaaattaccacatattttttttgtcacacttgtttgaagtgcagtttatctatctttatacatatatttaaactttactctacgaataatataatctatagtactacaataatatcagtgttttagagaatcatataaatgaacagttagacatggtctaaaggacaattgagtattttgacaacaggactctacagttttatctttttagtgtgcatgtgttctcctttttttttgcaaatagcttcacctatataatacttcatccattttattagtacatccatttagggtttagggttaatggtttttatagactaatttttttagtacatctattttattctattttagcctctaaattaagaaaactaaaactctattttagtttttttatttaataatttagatataaaatagaataaaataaagtgactaaaaattaaacaaataccctttaagaaattaaaaaaactaaggaaacatttttcttgtttcgagtagataatgccagcctgttaaacgccgtcgacgagtctaacggacaccaaccagcgaaccagcagcgtcgcgtcgggccaagcgaagcagacggcacggcatctctgtcgctgcctctggacccctctcgagagttccgctccaccgttggacttgctccgctgtcggcatccagaaattgcgtggcggagcggcagacgtgagccggcacggcaggcggcctcctcctcctctcacggcaccggcagctacgggggattcctttcccaccgctccttcgcacgtaagcgcttacgcaccgaacaacgtaagcgcttacgcaccgaacaacgtaagcgcttacgctttcccttcctcgcccgccgtaataaatagacaccccctccacaccctctttccccaacctcgtgttgttcggagcgcacacacacacaaccagatctcccccaaatccacccgtcggcacctccgcttcaaggtacgccgctcgtcctcccccccccccctctctaccttctctagatcggcgttccggtccatgcatggttagggcccggtagttctacttctgttcatgtttgtgttagatccgtgtttgtgttagatccgtgctgctagcgttcgtacacggatgcgacctgtacgtcagacacgttctgattgctaacttgccagtgtttctctttggggaatcctgggatggctctagccgttccgcagacgggatcgatttcatgattttttttgtttcgttgcatagggtttggtttgcccttttcctttatttcaatatatgccgtgcacttgtttgtcgggtcatcttttcatgcttttttttgtcttggttgtgatgatgtggtctggttgggcggtcgttctagatcggagtagaattctgtttcaaactacctggtggatttattaattttggatctgtatgtgtgtgccatacatattcatagttacgaattgaagatgatggatggaaatatcgatctaggataggtatacatgttgatgcgggttttactgatgcatatacagagatgctttttgttcgcttggttgtgatgatgtggtgtggttgggcggtcgttcattcgttctagatcggagtagaatactgtttcaaactacctggtgtatttattaattttggaactgtatgtgtgtgtcatacatcttcatagttacgagtttaagatggatggaaatatcgatctaggataggtatacatgttgatgtgggttttactgatgcatatacatgatggcatatgcagcatctattcatatgctctaaccttgagtacctatctattataataaacaagtatgttttataattattttgatcttgatatacttggatgatggcatatgcagcagctatatgtggatttttttagccctgccttcatacgctatttatttgcttggtactgtttcttttgtcgatgctcaccctgttgtttggtgttacttctgcaggtcgactttaacttagcctaggatccatggccactgtgaacaactggctcgctttctccctctccccgcaggagctgccgccctcccagacgacggactccacactcatctcggccgccaccgccgaccatgtctccggcgatgtctgcttcaacatcccccaagattggagcatgaggggatcagagctttcggcgctcgtcgcggagccgaagctggaggacttcctcggcggcatctccttctccgagcagcatcacaaggccaactgcaacatgatacccagcactagcagcacagtttgctacgcgagctcaggtgctagcaccggctaccatcaccagctgtaccaccagcccaccagctcagcgctccacttcgcggactccgtaatggtggcttcctcggccggtgtccacgacggcggtgccatgctcagcgcggccgccgctaacggtgtcgctggcgctgccagtgccaacggcggcggcatcgggctgtccatgattaagaactggctgcggagccaaccggcgcccatgcagccgagggtggcggcggctgagggcgcgcaggggctctctttgtccatgaacatggcggggacgacccaaggcgctgctggcatgccacttctcgctggagagcgcgcacgggcgcccgagagtgtatcgacgtcagcacagggtggagccgtcgtcgtcacggcgccgaaggaggatagcggtggcagcggtgttgccggcgctctagtagccgtgagcacggacacgggtggcagcggcggcgcgtcggctgacaacacggcaaggaagacggtggacacgttcgggcagcgcacgtcgatttaccgtggcgtgacaaggcatagatggactgggagatatgaggcacatctttgggataacagttgcagaagggaagggcaaactcgtaagggtcgtcaagtctatttaggtggctatgataaagaggagaaagctgctagggcttatgatcttgctgctctgaagtactggggtgccacaacaacaacaaattttccagtgagtaactacgaaaaggagctcgaggacatgaagcacatgacaaggcaggagtttgtagcgtctctgagaaggaagagcagtggtttctccagaggtgcatccatttacaggggagtgactaggcatcaccaacatggaagatggcaagcacggattggacgagttgcagggaacaaggatctttacttgggcaccttcagcacccaggaggaggcagcggaggcgtacgacatcgcggcgatcaagttccgcggcctcaacgccgtcaccaacttcgacatgagccgctacgacgtgaagagcatcctggacagcagcgccctccccatcggcagcgccgccaagcgcctcaaggaggccgaggccgcagcgtccgcgcagcaccaccacgccggcgtggtgagctacgacgtcggccgcatcgcctcgcagctcggcgacggcggagccctggcggcggcgtacggcgcgcactaccacggcgccgcctggccgaccatcgcgttccagccgggcgccgccagcacaggcctgtaccacccgtacgcgcagcagccaatgcgcggcggcgggtggtgcaagcaggagcaggaccacgcggtgatcgcggccgcgcacagcctgcaggacctccaccacctgaacctgggcgcggccggcgcgcacgactttttctcggcagggcagcaggccgccgccgctgcgatgcacggcctgggtagcatcgacagtgcgtcgctcgagcacagcaccggctccaactccgtcgtctacaacggcggggtcggcgacagcaacggcgccagcgccgtcggcggcagtggcggtggctacatgatgccgatgagcgctgccggagcaaccactacatcggcaatggtgagccacgagcaggtgcatgcacgggcctacgacgaagccaagcaggctgctcagatggggtacgagagctacctggtgaacgcggagaacaatggtggcggaaggatgtctgcatgggggactgtcgtgtctgcagccgcggcggcagcagcaagcagcaacgacaacatggccgccgacgtcgggcatggcggcgcgcagctcttcagtgtctggaacgacacttaagcgtacctagtggtacctgacatcttatagtctgcaacctctcgtgtctgaattcctatctttatcaagtgttattgcttccacgactataggacagctttcgtcgaaagcttttgctcatgtgatctcgaaggattcatctagtctgatttttcgtgacttgtatcggttttattggattcatccaacatatatcaataaaaaatgagttgtgtttcctttcttcctagttcagttaaaattatttccctcctgcgcttgtgctgtaattgtctgtgtacctgttgtttgtgactgtgttagttcccttggatatgatttcgtatttgatatgtacatggagatagcttagcttcattattggagtatgaagttagtatgacatagtcactctcctggaaaattgacactgcaaaccatatttttattctgaaccacaaatcctagtcagtccgctggcatatgccgtccgtttgctgaatccagaacgtgggtttggagatgtacggctgagatgcctctatgcgaaggggatttcgtggtgaaacgagatgggagtagagcaacgcccgtggaagatgcttcaaacttccacacttttgagcaacgatcggcagtagtaaggtagacgatttcaagatcaaagcatatgaagataaacaacatcaacaacaaaatttgttggggttctatagagagaaacagagctacatacatacactgttttgtatctaccatctgagatgatgaaaagatgaaaaactaaagaatgccccggcgccaacgccaggacacgccgcgcgcgcgtcacccgagccatctcttgacccagccggcgctgtatatttacacacgttgcagcatcgatcaccacctgttcgatcgcgtcgccgtcaccggcgcgccgcgacttattgaactagtctagggcgcggctaacaacctagcttagattgccttgtctaaacccttaggctaacgcgccactctagaaggccgatctcccgggataacttcgtatagcatacattatacgaagttatgaattccggaccgggttaccgaattcctgcccttaaggccaattgttcaagattcattcaacaattgaaacatctcccatgattaaatcagtataaggttgctatggtcttgcttgacaaagtttttttttgagggaatttcaactaaatttttgagtgaaactatcaaatactgattttaaaaaatttttataaaaggaagcgcagagataaaaggccatctatgctacaaaagtacccaaaaatgtaatcctaaagtatgaattgcattttttttttgtttggacgaaaggaaaggagtattaccacaagaatgatatcatcttcatatttagatcttttttgggtaaagcttgagattctctaaatatagagaaatcagaagaaaaaaaaaccgtgttttggtggttttgatttctagcctccacaataactttgacggcgtcgacaagtctaacggacaccaagcagcgaaccaccagcgccgagccaagcgaagcagacggccgagacgttgacaccttcggcgcggcatctctcgagagttccgctccggcgctccacctccaccgctggcggtttcttattccgttccgttccgcctcctgctctgctcctctccacaccacacggcacgaaaccgttacggcaccggcagcacccagcacgggagaggggattcctttcccaccgttccttccctttccgccccgccgctataaatagccagccccatccccagcttttttccccaatctcatctcctctctcctgttgttcggagcacacgcacaatccgatcgatccccaaatccccttcgtctctcctcgcgagcctcgtggatcccagcttcaaggtacggcgatcgatcatcccccctccttctctctaccttcttttctctagactacatcggatggcgatccatggttagggcctgctagtttcccttcctgttttgtcgatggctgcgaggcacaatagatctgatggcgttatgacggctaacttgtcatgttgttgcgatttatagtccctttaggagatcagtttaatttctcggatggttcgagatcggtggtccatggttagtaccctaagatccgcgctgttagggttcgtagatggaggcgacctgttctgattgttaacttgtcagtacctgggaaatcctgggatggttctagctcgtccgcagatgagatcgatttcatgatcctctgtatcttgtttcgttgcctaggttccgtctaatctatccgtggtatgatgtagatgttttgatcgtgctaactacgtcttgtaaagttaattgtcaggtcataatttttagcatgcctttttttttgtttggttttgtctaattgggctgtcgttctagatcagagtagaagactgttccaaactacctgctggatttattgaacttggatctgtatgtgtgtcacatatcttcataaattcatgattaagatggattgaaatatcttttatctttttggtatggatagttctatatgttggtgtggctttgttagatgtatacatgcttagatacatgaagcaacgtgctgctactgtttagtaattgctgttcatttgtctaataaacagataaggatatgtatttatgttgctgttggttttgctggtactttgttggatacaaatgcttcaatacagaaaacagcatgctgctacgatttaccatttatctaatcttatcatatgtctaatctaataaacaaacatgcttttaaattatcttcatatgcttggatgatggcatacacagcggctatgtgtggttttttaaatacccagcatcatgggcatgcatgacactgctttaatatgctttttatttgcttgagactgtttcttttgtttatactgaccctttagttcggtgactcttctgcaggtcgactttaacttagcctaggatccatggcccagtccaagcacggcctgaccaaggagatgaccatgaagtaccgcatggagggctgcgtggacggccacaagttcgtgatcaccggcgagggcatcggctaccccttcaagggcaagcaggccatcaacctgtgcgtggtggagggcggccccttgcccttcgccgaggacatcttgtccgccgccttcatgtacggcaaccgcgtgttcaccgagtacccccaggacatcgtcgactacttcaagaactcctgccccgccggctacacctgggaccgctccttcctgttcgaggacggcgccgtgtgcatctgcaacgccgacatcaccgtgagcgtggaggagaactgcatgtaccacgagtccaagttctacggcgtgaacttccccgccgacggccccgtgatgaagaagatgaccgacaactgggagccctcctgcgagaagatcatccccgtgcccaagcagggcatcttgaagggcgacgtgagcatgtacctgctgctgaaggacggtggccgcttgcgctgccagttcgacaccgtgtacaaggccaagtccgtgccccgcaagatgcccgactggcacttcatccagcacaagctgacccgcgaggaccgcagcgacgccaagaaccagaagtggcacctgaccgagcacgccatcgcctccggctccgccttgccctccggactcagatctcgatagggtaccaatggccagttaacagatccagctgctgctgttctagggttcacaagtctgcctatttgtcttccccaatggagctatggttgtctggtctggtccttggtcgtgtcccgtttcattgtgtactatttacctgtaatgtgtatccttaagtctggtttgatggtgtctgaaacgttttgctgtggtagagcagcatggaagaactataatgaataagtgatccctaatcattgtgtccaaattttgcttctgctatacccttttgtgctgtttcttatgttttgcttaaaaatttgatctgacaaacaaatttgtctaaattatgctcttgttctgactgtgtactgtacacatttgtattgctaccggtttggcacatagttttctctttgattgcagatcaaacccttctgattgcagattgcttggctatggctgatgtgctcactgttcttctttagcttgtatattgctgatggtggcttggctacggctgaaaaagttgctgctgcgccgacttggcaactgttgctccagtaatgctttgtcctctcttcctagccgccgacttggcacttggcagctgttgctcctgtaatgcgttgttatctcttatctcttgagatgtactatgattttgaggctgtttgacttgtgccagattgccagtgctgatgctatattatctcaggtttttatgctagtatatgttttactgtgtgctgcctgtgtcgagttacgtaatctattgaaccgctatgcgtgttgatgccctgttgttgcttgccagattgatgcccctgttgcttgcagcttgcaagctgtagtgaaatcctaaaattcgaaaccaaatctattctgaacttttgaagatctgtgatgtccggaagaaaagattcaaacagataaacgggactctccagaatctataaaataaatgatcgacaaacgctttgctttggtaggcttcctagttagttagcggaccgggatccgacggcgtcttcaccgccccgccgccgcccgagccggacttgtcgctgccgccgccgctgctcatcttgcgcgcttgtgtccctccctcagtccctgcgttcgcggatcgcgggcgggtgcgacccgtttggactccggccggtagccttcgtgccgacctcgctcggtccaccggtttgtcggggacccacatgtcagtgaaggtacgcgtccacgtccacagaccctactaccccagacgagtccaaatcgctgttccctcacactctcgtgtaccagcgcgcggcggaaagcacctttccaacaaccgccgacacgtcggtcccacgtcggcatgctccaccggtcagtgtttggcgtgtacggctcccggcgacgaacgagtgtggcctaagctttcctactcccatcccatctgagccacacatctctctcacgccacgcgcacaaaacagccaggctcccacgcgcatcaaccggctctccctttccgtgccactcgcccccaagccccaaaccctcgccgccgcctccgagacagccgccgccacctaggccatggccaccgccgccgccgcgtctaccgcgctcactggcgccactaccgctgcgcccaaggcgaggcgccgggcgcacctcctggccacccgccgcgccctcgccgcgcccatcaggtgctcagcggcgtcacccgccatgccgatggctcccccggccaccccgctccggccgtggggccccaccgagccccgcaagggtgctgacatcctcgtcgagtccctcgagcgctgcggcgtccgcgacgtcttcgcctaccccggcggcgcgtcgatggagatccaccaggcactcacccgctcccccgtcatcgccaaccacctcttccgccacgagcaaggggaggcctttgccgcctccggctacgcgcgctcctcgggccgcgtcggcgtctgcatcgccacctccggccccggcgccaccaacctagtctccgcgctcgccgacgcgctgctcgattccgtcccgatggtcgccatcacgggacaggtggcgcgacgcatgattggcaccgacgccttccaggagacgcccatcgtcgaggtcacgcgctccatcaccaagcacaactacctggtcctcgacgtcgacgacatcccccgcgtcgtgcaggaggctttcttcctcgcctcctctggtcgaccagggccggtgcttgtcgacatccccaaggacatccagcagcagatggcggtgcctgtctgggacaagcccatgagtctgcctgggtacattgcgcgccttcccaagccccctgcgactgagttgcttgagcaggtgctgcgtcttgttggtgaatcgcggcgccctgttctttatgtgggcggtggctgcgcagcatctggtgaggagttgcgacgctttgtggagctgactggaatcccggtcacaactactcttatgggcctcggcaacttccccagcgacgacccactgtctctgcgcatgctaggtatgcatgggacggtgtatgcaaattatgcagtggataaggccgatctgttgcttgcacttggtgtgcggtttgatgatcgcgtgacagggaagattgaggcttttgcaagcagggctaagattgtgcacgttgatattgatccggctgagattggcaagaacaagcagccacatgtgtccatctgtgcagatgttaagcttgctttgcagggcatgaatgctcttcttgaaggaagcacatcaaagaagagctttgactttggctcatggaacgatgagttggatcagcagaagagggaattcccccttgggtataaaacatctaatgaggagatccagccacaatatgctattcaggttcttgatgagctgacgaaaggcgaggccatcatcggcacaggtgttgggcagcaccagatgtgggcggcacagtactacacttacaagcggccaaggcagtggttgtcttcagctggtcttggggctatgggatttggtttgccggctgctgctggtgcttctgtggcaaacccaggtgtcactgttgttgacatcgatggagatggtagctttctcatgaacgttcaggagctagctatgatccgaattgagaacctcccagtgaaggtctttgtgctaaacaaccagcacctggggatggtggtgcagttggaggacaggttctataaggccaacagagcgcacacatacttgggaaacccagagaatgaaagtgagatatatccagatttcgtgacgatcgccaaagggttcaacattccagccgtccgtgtgacaaagaagaacgaagtccgcgcagcgataaagaagatgctcgagactccagggccgtacctcttggatataatcgtcccacaccaggagcatgtgttgcctatgatccctagtggtggggctttcaaggatatgatcctggatggtgatggcaggactgtgtactgacttcgaataggtacccggggatcctctagtgccgtgggtcgtttaagctgccgctgtacctgtgtcgtctggtgccttctggtgtacctgggaggttgtcgtctatcaagtatctgtggttggtgtcatgagtcagtgagtcccaatactgttcgtgtcctgtgtgcattatacccaaaactgttatgggcaaatcatgaataagcttgatgttcgaacttaaaagtctctgctcaatatggtattatggttgtttttgttcgtctcctaatatttgcctgggatcaaattttattggctggtgttcatttgacctccatgttcttgctaggctccattttttactctacagccataatatgtttgattgtttggtttgttctttgttgtacacctggttctgtcgagcttagttttcgacactggcttacagcttaacatgttgctattttattgggttctgattgctattttattgggttctgattgctagtttttgctgaatccaaaaaccatgttatttatttaagcgatccaggttattattatgatggtggctaagtttttttttttccaagggtaaattttctggattctccagtgtttctgtggccgaattcaatcactagagtcgacctgcaaagcttcggtccgggcctagaaggcccgcgccacttacgcttgattccgatgacttcgtaggttcctagctcaagccgctcgtgtccaagcgtcacttacgattagctaatgattacggcatctaggaccgactagttcttatgtgcttctagtctccaaatgtggttgatagttattttgctctaagatcaacagtaatgaagtataaatcatcgttgtggtgtgctactcggttaattgagcattaacacacacaaacatgacgaggatggtataatctccaaaaatgtgtactttgttaggtgggaccctatagccttgattaatgtgctatgttaggcatgcctggaaacgtgtgacgcatatgttttgtgaacctgttgatattatatgtgcttttatattaccatattttattaaaatactaatatttattactagtaagatataacattctatctagcttaaaaactaaccataaatattccataataactagatttaccaaactaatatactaaatatacataataaatacaaaattaacaagacaataatcaatatttatgagcttaatatatttagacattatggttggtcgacgataatcatgctaacttttcgtaattgcttgattgaaatatgcttagaataatgcctctttgttctacatggcaaatagggaccattatggtgtaacaccctgggaaccacaaacaccccgaaatgctactaaactacacaactaaccttcatatataaaatttcgacagcatctcctttgaaaatttgcatagacgtggaagcaacagagtataaacagatctgcgtttaaacgtgcaagcgctactagacaattcagtacattaaaaacgtccgcaatgtgttattaagttgtctaagcgtcaatttgtttacaccacaatatatcctgcca

SEQ ID NO: 262 - DNA, 21697 bp, synthetic construct
  misc_feature 1..21697: note = PHP97881
  source 1..21697: mol_type = other DNA
gtttacccgccaatatatcctgtcaaacactgcggccgcacttgaccgcggatggagccggagctgtggtgaggccatcgacgggaggtgggggagaacacagtctcagtgttctttgtgagtccgcaaggtttttagcttttctgtattaattaaggttgctgttggctgtagaatacggtcgtggaagagctgtatcggtagctactacgtaagctattatatactggaagtctggagctcgtcgatctccggtcgtcttcctccatttctcctcgtcttgctttgactgctgctaccatttgcttctgttttctgatgaagcatgccatgtcggccaccagtgtttgtgtggtttttgcagggaatggctttcaagtgctgtgattgaatggccctcgtcgtcctcggctgagctcacatggacgcgtcatgtgagtgagatatatgatcatatgatgagtggggttcgggtgagtgcgtacttgaagtaggatcccgctttcactcattcattcattggcctttaaaccgggaaattttcgcgaggagatggagggaagcaagcagggtgacgagtgcagagtgccgcgagcgctttgtcaaaaggcaccgccgtaggcaaaaaaatcaatggccctgactgactcgatggtagtactactgtagagactagagagggttgctccccatatcttcgtgtgacttttactccagcattgcatttccgtcattgagacgttaattaatagcagctttcgggacagatgactgtggccatgtttcgtcacggccgcttcgtgccagctgggggtactatagtactgtgattttgttagtaaaaactttcattaggccaccattgacgaccgggccttcgcttttgctgcgctaattaaccatttcccggcgaccgaagggaacatgaacatgccccgacacatgagggcatgaggactagtgttctccctgtcgttcgttgacttgactagtgatagtttaaacgctcttcaactggaagagcggttactaccggttcactagctagctgctaatcgagctagttaccctatgaggtgacatgaagcgctcacggttactatgacggttagcttcacgactgttggtggcagtagcgtacgacttagctatagttccggacttacccttaagataacttcgtatagcatacattatacgaagttatgggcccacgcgtgaagagcggttaccagagctggtcacctttgtccaccaagatggaactgtcttcggccagaatggccatctggattcagcaggcctagaaggccatttatcgctatcaactttgtatagaaaagttgggccgaattcgagctcggtacggccagaatggcccggaccgggttacccggaccgaagcttgcatgcctgcagtgcagcgtgacccggtcgtgcccctctctagagataatgagcattgcatgtctaagttataaaaaattaccacatattttttttgtcacacttgtttgaagtgcagtttatctatctttatacatatatttaaactttactctacgaataatataatctatagtactacaataatatcagtgttttagagaatcatataaatgaacagttagacatggtctaaaggacaattgagtattttgacaacaggactctacagttttatctttttagtgtgcatgtgttctcctttttttttgcaaatagcttcacctatataatacttcatccattttattagtacatccatttagggtttagggttaatggtttttatagactaatttttttagtacatctattttattctattttagcctctaaattaagaaaactaaaactctattttagtttttttatttaataatttagatataaaatagaataaaataaagtgactaaaaattaaacaaataccctttaagaaattaaaaaaactaaggaaacatttttcttgtttcgagtagataatgccagcctgttaaacgccgtcgacgagtctaacggacaccaaccagcgaaccagcagcgtcgcgtcgggccaagcgaagcagacggcacggcatctctgtcgctgcctctggacccctctcgagagttccgctccaccgttggacttgctccgctgtcggcatccagaaattgcgtggcggagcggcagacgtgagccggcacggcaggcggcctcctcctcctctcacggcaccggcagctacgggggattcctttcccaccgctccttcgctttcccttcctcgcccgccgtaataaatagacaccccctccacaccctctttccccaacctcgtgttgttcggagcgcacacacacacaaccagatctcccccaaatccacccgtcggcacctccgcttcaaggtacgccgctcgtcctcccccccccccctctctaccttctctagatcggcgttccggtccatgcatggttagggcccggtagttctacttctgttcatgtttgtgttagatccgtgtttgtgttagatccgtgctgctagcgttcgtacacggatgcgacctgtacgtcagacacgttctgattgctaacttgccagtgtttctctttggggaatcctgggatggctctagccgttccgcagacgggatcgatttcatgattttttttgtttcgttgcatagggtttggtttgcccttttcctttatttcaatatatgccgtgcacttgtttgtcgggtcatcttttcatgcttttttttgtcttggttgtgatgatgtggtctggttgggcggtcgttctagatcggagtagaattctgtttcaaactacctggtggatttattaattttggatctgtatgtgtgtgccatacatattcatagttacgaattgaagatgatggatggaaatatcgatctaggataggtatacatgttgatgcgggttttactgatgcatatacagagatgctttttgttcgcttggttgtgatgatgtggtgtggttgggcggtcgttcattcgttctagatcggagtagaatactgtttcaaactacctggtgtatttattaattttggaactgtatgtgtgtgtcatacatcttcatagttacgagtttaagatggatggaaatatcgatctaggataggtatacatgttgatgtgggttttactgatgcatatacatgatggcatatgcagcatctattcatatgctctaaccttgagtacctatctattataataaacaagtatgttttataattattttgatcttgatatacttggatgatggcatatgcagcagctatatgtggatttttttagccctgccttcatacgctatttatttgcttggtactgtttcttttgtcgatgctcaccctgttgtttggtgttacttctgcaggtcgactttaacttagcctaggatccatggcggccaatgcgggcggcggtggagcgggaggaggcagcggcagcggcagcgtggctgcgccggcggtgtgccgccccagcggctcgcggtggacgccgacgccggagcagatcaggatgctgaaggagctctactacggctgcggcatccggtcgcccagctcggagcagatccagcgcatcaccgccatgctgcggcagcacggcaagatcgagggcaagaacgtcttctactggttccagaaccacaaggcccgcgagcgccagaagcgccgcctcaccagcctcgacgtcaacgtgcccgccgccggcgcggccgacgccaccaccagccaactcggcgtcctctcgctgtcgtcgccgccgccttcaggcgcggcgcctccctcgcccaccctcggcttctacgccgccggcaatggcggcggatcggctgtgctgctggacacgagttccgactggggcagcagcggcgctgctatggccaccgagacatgcttcctgcaggactacatgggcgtgacggacacgggcagctcgtcgcagtggccacgcttctcgtcgtcggacacgataatggcggcggccgcggcgcgggcggcgacgacgcgggcgcccgagacgctccctctcttcccgacctgcggcgacgacggcggcagcggtagcagcagctacttgccgttctggggtgccgcgtccacaactgccggcgccacttcttccgttgcgatccaacagcaacaccagctgcaggagcagtacagcttttacagcaacagcaacagcacccagctggccggcaccggcaaccaagacgtatcggcaacagcagcagcagccgccgccctggagctgagcctcagctcatggtgctccccttaccctgctgcagggagtatgtgagagcaacgcgagctgccactgctcttcactgatgtctctggaatggaaggaggaggaagtgagaacagatcattcgacaaagcagcattagtccgttgatcggtggaagaccactcgtcagtgttgagttgaatgtttgatcaataaaatacggcaatgctgtaagggttgttttttatgccattgataatacactgtactgttcagttgttgaactctatttcttagccatgccaagtgcttttcttattttgaataacattacagcaaaaagttgaaagacaaaaaaaaaaacccccgaacagagtgctttgggtcccaagcttctttagactgtgttcggcgttccccctaaatttctccccctatatctcactcacttgtcacatcagcgttctctttccccctatatctccacgctctacagcagttccacctatatcaaacctctataccccaccacaacaatattatatactttcatcttcaactaactcatgtaccttccaatttttttctactaataattatttacgtgcacagaaacttagcaaggagagagagagcgggaatttaaatgctcggcgttaggcttttagtccgctaggtggctagaccgaggttaggacgctagttcactaggggcctagtggtgttttaagacgtcacggtcaccacgcgtggaccgaagcttgcatgcctgcagtgcagcgtgacccggtcgtgcccctctctagagataatgagcattgcatgtctaagttataaaaaattaccacatattttttttgtcacacttgtttgaagtgcagtttatctatctttatacatatatttaaactttactctacgaataatataatctatagtactacaataatatcagtgttttagagaatcatataaatgaacagttagacatggtctaaaggacaattgagtattttgacaacaggactctacagttttatctttttagtgtgcatgtgttctcctttttttttgcaaatagcttcacctatataatacttcatccattttattagtacatccatttagggtttagggttaatggtttttatagactaatttttttagtacatctattttattctattttagcctctaaattaagaaaactaaaactctattttagtttttttatttaataatttagatataaaatagaataaaataaagtgactaaaaattaaacaaataccctttaagaaattaaaaaaactaaggaaacatttttcttgtttcgagtagataatgccagcctgttaaacgccgtcgacgagtctaacggacaccaaccagcgaaccagcagcgtcgcgtcgggccaagcgaagcagacggcacggcatctctgtcgctgcctctggacccctctcgagagttccgctccaccgttggacttgctccgctgtcggcatccagaaattgcgtggcggagcggcagacgtgagccggcacggcaggcggcctcctcctcctctcacggcaccggcagctacgggggattcctttcccaccgctccttcgcacgtaagcgcttacgcaccgaacaacgtaagcgcttacgcaccgaacaacgtaagcgcttacgctttcccttcctcgcccgccgtaataaatagacaccccctccacaccctctttccccaacctcgtgttgttcggagcgcacacacacacaaccagatctcccccaaatccacccgtcggcacctccgcttcaaggtacgccgctcgtcctcccccccccccctctctaccttctctagatcggcgttccggtccatgcatggttagggcccggtagttctacttctgttcatgtttgtgttagatccgtgtttgtgttagatccgtgctgctagcgttcgtacacggatgcgacctgtacgtcagacacgttctgattgctaacttgccagtgtttctctttggggaatcctgggatggctctagccgttccgcagacgggatcgatttcatgattttttttgtttcgttgcatagggtttggtttgcccttttcctttatttcaatatatgccgtgcacttgtttgtcgggtcatcttttcatgcttttttttgtcttggttgtgatgatgtggtctggttgggcggtcgttctagatcggagtagaattctgtttcaaactacctggtggatttattaattttggatctgtatgtgtgtgccatacatattcatagttacgaattgaagatgatggatggaaatatcgatctaggataggtatacatgttgatgcgggttttactgatgcatatacagagatgctttttgttcgcttggttgtgatgatgtggtgtggttgggcggtcgttcattcgttctagatcggagtagaatactgtttcaaactacctggtgtatttattaattttggaactgtatgtgtgtgtcatacatcttcatagttacgagtttaagatggatggaaatatcgatctaggataggtatacatgttgatgtgggttttactgatgcatatacatgatggcatatgcagcatctattcatatgctctaaccttgagtacctatctattataataaacaagtatgttttataattattttgatcttgatatacttggatgatggcatatgcagcagctatatgtggatttttttagccctgccttcatacgctatttatttgcttggtactgtttcttttgtcgatgctcaccctgttgtttggtgttacttctgcaggtcgactttaacttagcctaggatccatggccactgtgaacaactggctcgctttctccctctccccgcaggagctgccgccctcccagacgacggactccacactcatctcggccgccaccgccgaccatgtctccggcgatgtctgcttcaacatcccccaagattggagcatgaggggatcagagctttcggcgctcgtcgcggagccgaagctggaggacttcctcggcggcatctccttctccgagcagcatcacaaggccaactgcaacatgatacccagcactagcagcacagtttgctacgcgagctcaggtgctagcaccggctaccatcaccagctgtaccaccagcccaccagctcagcgctccacttcgcggactccgtaatggtggcttcctcggccggtgtccacgacggcggtgccatgctcagcgcggccgccgctaacggtgtcgctggcgctgccagtgccaacggcggcggcatcgggctgtccatgattaagaactggctgcggagccaaccggcgcccatgcagccgagggtggcggcggctgagggcgcgcaggggctctctttgtccatgaacatggcggggacgacccaaggcgctgctggcatgccacttctcgctggagagcgcgcacgggcgcccgagagtgtatcgacgtcagcacagggtggagccgtcgtcgtcacggcgccgaaggaggatagcggtggcagcggtgttgccggcgctctagtagccgtgagcacggacacgggtggcagcggcggcgcgtcggctgacaacacggcaaggaagacggtggacacgttcgggcagcgcacgtcgatttaccgtggcgtgacaaggcatagatggactgggagatatgaggcacatctttgggataacagttgcagaagggaagggcaaactcgtaagggtcgtcaagtctatttaggtggctatgataaagaggagaaagctgctagggcttatgatcttgctgctctgaagtactggggtgccacaacaacaacaaattttccagtgagtaactacgaaaaggagctcgaggacatgaagcacatgacaaggcaggagtttgtagcgtctctgagaaggaagagcagtggtttctccagaggtgcatccatttacaggggagtgactaggcatcaccaacatggaagatggcaagcacggattggacgagttgcagggaacaaggatctttacttgggcaccttcagcacccaggaggaggcagcggaggcgtacgacatcgcggcgatcaagttccgcggcctcaacgccgtcaccaacttcgacatgagccgctacgacgtgaagagcatcctggacagcagcgccctccccatcggcagcgccgccaagcgcctcaaggaggccgaggccgcagcgtccgcgcagcaccaccacgccggcgtggtgagctacgacgtcggccgcatcgcctcgcagctcggcgacggcggagccctggcggcggcgtacggcgcgcactaccacggcgccgcctggccgaccatcgcgttccagccgggcgccgccagcacaggcctgtaccacccgtacgcgcagcagccaatgcgcggcggcgggtggtgcaagcaggagcaggaccacgcggtgatcgcggccgcgcacagcctgcaggacctccaccacctgaacctgggcgcggccggcgcgcacgactttttctcggcagggcagcaggccgccgccgctgcgatgcacggcctgggtagcatcgacagtgcgtcgctcgagcacagcaccggctccaactccgtcgtctacaacggcggggtcggcgacagcaacggcgccagcgccgtcggcggcagtggcggtggctacatgatgccgatgagcgctgccggagcaaccactacatcggcaatggtgagccacgagcaggtgcatgcacgggcctacgacgaagccaagcaggctgctcagatggggtacgagagctacctggtgaacgcggagaacaatggtggcggaaggatgtctgcatgggggactgtcgtgtctgcagccgcggcggcagcagcaagcagcaacgacaacatggccgccgacgtcgggcatggcggcgcgcagctcttcagtgtctggaacgacacttaagcgtacctagtggtacctgacatcttatagtctgcaacctctcgtgtctgaattcctatctttatcaagtgttattgcttccacgactataggacagctttcgtcgaaagcttttgctcatgtgatctcgaaggattcatctagtctgatttttcgtgacttgtatcggttttattggattcatccaacatatatcaataaaaaatgagttgtgtttcctttcttcctagttcagttaaaattatttccctcctgcgcttgtgctgtaattgtctgtgtacctgttgtttgtgactgtgttagttcccttggatatgatttcgtatttgatatgtacatggagatagcttagcttcattattggagtatgaagttagtatgacatagtcactctcctggaaaattgacactgcaaaccatatttttattctgaaccacaaatcctagtcagtccgctggcatatgccgtccgtttgctgaatccagaacgtgggtttggagatgtacggctgagatgcctctatgcgaaggggatttcgtggtgaaacgagatgggagtagagcaacgcccgtggaagatgcttcaaacttccacacttttgagcaacgatcggcagtagtaaggtagacgatttcaagatcaaagcatatgaagataaacaacatcaacaacaaaatttgttggggttctatagagagaaacagagctacatacatacactgttttgtatctaccatctgagatgatgaaaagatgaaaaactaaagaatgccccggcgccaacgccaggacacgccgcgcgcgcgtcacccgagccatctcttgacccagccggcgctgtatatttacacacgttgcagcatcgatcaccacctgttcgatcgcgtcgccgtcaccggcgcgccgcgacttattgaactagtctagggcgcggctaacaacctagcttagattgccttgtctaaacccttaggctaacgcgccacggttaccggttaccgaattcgagctcggtaccctggttcacaaactcaatacaacacacagtggagtagggtattacgctccggcggcccgaaccactctaaatccttgtgtcctcgtgtgctcttccaccattaatgactgtaattgcagggacacgaagagttgtagcgcttttgccaacaagatccgctatatgctagtagagtggaacctgcacagcaacaagcatccaataatctgagaataagaattatgtgtggtgatggttctcatctctgcaactcgccattttcgcgagagaaccaaatccaagttggtgaagatcatgatttgggctcatgggctggcatagtagctattacctttgcaattgtggttcgaatctatccgatattctccttttcagggagagctaatgcttatgcttattgggtattttggtttgacactgcttcacgcccaaaaaaaggcaactatgtctgagttggatatggcccaaaaaaaggcagctatgtctgagttggatatggaagtcttctttcgtttagggtgaagtaagaccaagctcatgagcttattatcttaggtcggaacaaattagttgataggcatggcacatttatcaaattataatgattttaacagaaaagcaacacctctttttcagcagcaccagctttgcaagctgcaattgacactccaagcatagtatttgctccaaactcagcctgcatttcgcacaatatcatatctatttccatttggataaaatatattttccagaaatatgggaacagaatcaagatacagaaaaaagttgtggtagtagtggtaagtggaaacacaagtacagtgaaaagatagcattatttctgaacagtcaaattaaccgaaataagtagtatcacatactgcccctaaattgactacacccaatgtaaagaattgcttgagcatattgagccatcagttgtttgtttgtgtaacggatttgacaatgcagagttcaggagcaaaaaaccgcaaaggagagaaagagggaaaggatctcctagtatcccaccttgtggcgcgccctgtcaagtgcatgatggcctggtcgatctgcgtctgctgctgcggttccatcccaacgagtgcctccgacaccttgtcgttgatcacccgcaccgcgtaggcgacccccctggcgaggaacttccgcctctcggaggccccggccgcgtcggcggcggcgccctcgagcgcgcccacgctagccgtagatgctcggtgcacggccttgttggtgtgcaactcgacctcaacggccggtgcgctacgcccgtcaaggatctggcgcgcccgcaccctcgtgatcacggtgggcgcctcccgcctcatgtggccgacgatgaaaagcgccgggttaggggccttggcgcgcaccgccgtattcagggcctcctcgctcttgcgcgagagcaggtgcttccccaggtactcctgcactgacaaggctgccacagcggtggaatttgtcctcacgacttcgccacgtcgtcctcacctccctggcttcccacgactccgccgtatcgaggtgctcggtgggtcgtcttaatccgaagtccgaactaggaagacgagacagagaggtctgaggaatgggcctcgtttgatgttgagctgaattatttttccagcataagcccaggtcttggtccatgaacaaaattactagaaacccagcccagtactacgatctaaaagagggactgccactggatagctctctctagcattctccacgctccaatacagcggcgtcgtgtctatccgggtctatccgcgaacacgtgagaactctccagaaactgctttctcctccacttcatctctctcgctttccctctataaaaagaccccttctaggaattgagggagacagcaagcaccaagcagcgatccgaagctcaatcaattcactcaaacctcttccccaaatcttcgattagatcttcgttgacaagaagactagaaccgaacctgacatgtccaacctgctcacggttcaccagaaccttccggctcttccagtggacgcgacgtccgatgaagtcaggaagaacctcatggacatgttccgcgacaggcaagcgttcagcgagcacacctggaagatgctgctctccgtctgccgctcctgggctgcatggtgcaagctgaacaacaggaagtggttccccgctgagcccgaggacgtgagggattaccttctgtacctgcaagcgcgaggtttgtttctgcttctacctttgatatatatataataattatcattaattagtagtaatataatatttcaaatatttttttcaaaataaaagaatgtagtatatagcaattgcttttctgtagtttataagtgtgtatattttaatttataacttttctaatatatgaccaaaacatggtgatgcctaggtctggcagtgaagaccatccagcaacaccttggacaactgaacatgcttcacaggcgctccggcctcccgcgccccagcgactcgaacgccgtgagcctcgtcatgcgccgcatcaggaaggaaaacgtcgatgccggcgaaagggcaaagcaggccctcgcgttcgagaggaccgatttcgaccaggtccgcagcctgatggagaacagcgacaggtgccaggacattaggaacctggcgttcctcggaattgcatacaacacgctcctcaggatcgcggaaattgcccgcattcgcgtgaaggacattagccgcaccgacggcggcaggatgcttatccacattggcaggaccaagacgctcgtttccaccgcaggcgtcgaaaaggccctcagcctcggagtgaccaagctcgtcgaacgctggatctccgtgtccggcgtcgcggacgacccaaacaactacctcttctgccgcgtccgcaagaacggggtggctgcccctagcgccaccagccaactcagcacgagggccttggaaggtattttcgaggccacccaccgcctgatctacggcgcgaaggatgacagcggtcaacgctacctcgcatggtccgggcactccgcccgcgttggagctgctagggacatggcccgcgccggtgtttccatccccgaaatcatgcaggcgggtggatggacgaacgtgaacattgtcatgaactacattcgcaaccttgacagcgagacgggcgcaatggttcgcctcctggaagatggtgactgaggtacccaacctagacttgtccatcttctggattggccaacttaattaatgtatgaaataaaaggatgcacacatagtgacatgctaatcactataatgtgggcatcaaagttgtgtgttatgtgtaattactagttatctgaataaaagagaaagagatcatccatatttcttatcctaaatgaatgtcacgtgtctttataattctttgatgaaccagatgcatttcattaaccaaatccatatacatataaatattaatcatatataattaatatcaattgggttagcaaaacaaatctagtctaggtgtgttttgcgatccgatcgagtctaaaaacggcccctaactaacgcttagttgcccgctagattagtcccccgttagtgcctagttagacacacgacgaactaggggctagcacgcgttacccgggataacttcgtatagcatacattatacgaagttatgaattccggaccgggttaccgaattcctgcccttaaggccaattgttcaagattcattcaacaattgaaacatctcccatgattaaatcagtataaggttgctatggtcttgcttgacaaagtttttttttgagggaatttcaactaaatttttgagtgaaactatcaaatactgattttaaaaaatttttataaaaggaagcgcagagataaaaggccatctatgctacaaaagtacccaaaaatgtaatcctaaagtatgaattgcattttttttttgtttggacgaaaggaaaggagtattaccacaagaatgatatcatcttcatatttagatcttttttgggtaaagcttgagattctctaaatatagagaaatcagaagaaaaaaaaaccgtgttttggtggttttgatttctagcctccacaataactttgacggcgtcgacaagtctaacggacaccaagcagcgaaccaccagcgccgagccaagcgaagcagacggccgagacgttgacaccttcggcgcggcatctctcgagagttccgctccggcgctccacctccaccgctggcggtttcttattccgttccgttccgcctcctgctctgctcctctccacaccacacggcacgaaaccgttacggcaccggcagcacccagcacgggagaggggattcctttcccaccgttccttccctttccgccccgccgctataaatagccagccccatccccagcttttttccccaatctcatctcctctctcctgttgttcggagcacacgcacaatccgatcgatccccaaatccccttcgtctctcctcgcgagcctcgtggatcccagcttcaaggtacggcgatcgatcatcccccctccttctctctaccttcttttctctagactacatcggatggcgatccatggttagggcctgctagtttcccttcctgttttgtcgatggctgcgaggcacaatagatctgatggcgttatgacggctaacttgtcatgttgttgcgatttatagtccctttaggagatcagtttaatttctcggatggttcgagatcggtggtccatggttagtaccctaagatccgcgctgttagggttcgtagatggaggcgacctgttctgattgttaacttgtcagtacctgggaaatcctgggatggttctagctcgtccgcagatgagatcgatttcatgatcctctgtatcttgtttcgttgcctaggttccgtctaatctatccgtggtatgatgtagatgttttgatcgtgctaactacgtcttgtaaagttaattgtcaggtcataatttttagcatgcctttttttttgtttggttttgtctaattgggctgtcgttctagatcagagtagaagactgttccaaactacctgctggatttattgaacttggatctgtatgtgtgtcacatatcttcataaattcatgattaagatggattgaaatatcttttatctttttggtatggatagttctatatgttggtgtggctttgttagatgtatacatgcttagatacatgaagcaacgtgctgctactgtttagtaattgctgttcatttgtctaataaacagataaggatatgtatttatgttgctgttggttttgctggtactttgttggatacaaatgcttcaatacagaaaacagcatgctgctacgatttaccatttatctaatcttatcatatgtctaatctaataaacaaacatgcttttaaattatcttcatatgcttggatgatggcatacacagcggctatgtgtggttttttaaatacccagcatcatgggcatgcatgacactgctttaatatgctttttatttgcttgagactgtttcttttgtttatactgaccctttagttcggtgactcttctgcaggtcgactttaacttagcctaggatccatggcccagtccaagcacggcctgaccaaggagatgaccatgaagtaccgcatggagggctgcgtggacggccacaagttcgtgatcaccggcgagggcatcggctaccccttcaagggcaagcaggccatcaacctgtgcgtggtggagggcggccccttgcccttcgccgaggacatcttgtccgccgccttcatgtacggcaaccgcgtgttcaccgagtacccccaggacatcgtcgactacttcaagaactcctgccccgccggctacacctgggaccgctccttcctgttcgaggacggcgccgtgtgcatctgcaacgccgacatcaccgtgagcgtggaggagaactgcatgtaccacgagtccaagttctacggcgtgaacttccccgccgacggccccgtgatgaagaagatgaccgacaactgggagccctcctgcgagaagatcatccccgtgcccaagcagggcatcttgaagggcgacgtgagcatgtacctgctgctgaaggacggtggccgcttgcgctgccagttcgacaccgtgtacaaggccaagtccgtgccccgcaagatgcccgactggcacttcatccagcacaagctgacccgcgaggaccgcagcgacgccaagaaccagaagtggcacctgaccgagcacgccatcgcctccggctccgccttgccctccggactcagatctcgatagggtaccaatggccagttaacagatccagctgctgctgttctagggttcacaagtctgcctatttgtcttccccaatggagctatggttgtctggtctggtccttggtcgtgtcccgtttcattgtgtactatttacctgtaatgtgtatccttaagtctggtttgatggtgtctgaaacgttttgctgtggtagagcagcatggaagaactataatgaataagtgatccctaatcattgtgtccaaattttgcttctgctatacccttttgtgctgtttcttatgttttgcttaaaaatttgatctgacaaacaaatttgtctaaattatgctcttgttctgactgtgtactgtacacatttgtattgctaccggtttggcacatagttttctctttgattgcagatcaaacccttctgattgcagattgcttggctatggctgatgtgctcactgttcttctttagcttgtatattgctgatggtggcttggctacggctgaaaaagttgctgctgcgccgacttggcaactgttgctccagtaatgctttgtcctctcttcctagccgccgacttggcacttggcagctgttgctcctgtaatgcgttgttatctcttatctcttgagatgtactatgattttgaggctgtttgacttgtgccagattgccagtgctgatgctatattatctcaggtttttatgctagtatatgttttactgtgtgctgcctgtgtcgagttacgtaatctattgaaccgctatgcgtgttgatgccctgttgttgcttgccagattgatgcccctgttgcttgcagcttgcaagctgtagtgaaatcctaaaattcgaaaccaaatctattctgaacttttgaagatctgtgatgtccggaagaaaagattcaaacagataaacgggactctccagaatctataaaataaatgatcgacaaacgctttgctttggtaggcttcctagttagttagcggaccgggatccgacggcgtcttcaccgccccgccgccgcccgagccggacttgtcgctgccgccgccgctgctcatcttgcgcgcttgtgtccctccctcagtccctgcgttcgcggatcgcgggcgggtgcgacccgtttggactccggccggtagccttcgtgccgacctcgctcggtccaccggtttgtcggggacccacatgtcagtgaaggtacgcgtccacgtccacagaccctactaccccagacgagtccaaatcgctgttccctcacactctcgtgtaccagcgcgcggcggaaagcacctttccaacaaccgccgacacgtcggtcccacgtcggcatgctccaccggtcagtgtttggcgtgtacggctcccggcgacgaacgagtgtggcctaagctttcctactcccatcccatctgagccacacatctctctcacgccacgcgcacaaaacagccaggctcccacgcgcatcaaccggctctccctttccgtgccactcgcccccaagccccaaaccctcgccgccgcctccgagacagccgccgccacctaggccatggccaccgccgccgccgcgtctaccgcgctcactggcgccactaccgctgcgcccaaggcgaggcgccgggcgcacctcctggccacccgccgcgccctcgccgcgcccatcaggtgctcagcggcgtcacccgccatgccgatggctcccccggccaccccgctccggccgtggggccccaccgagccccgcaagggtgctgacatcctcgtcgagtccctcgagcgctgcggcgtccgcgacgtcttcgcctaccccggcggcgcgtcgatggagatccaccaggcactcacccgctcccccgtcatcgccaaccacctcttccgccacgagcaaggggaggcctttgccgcctccggctacgcgcgctcctcgggccgcgtcggcgtctgcatcgccacctccggccccggcgccaccaacctagtctccgcgctcgccgacgcgctgctcgattccgtcccgatggtcgccatcacgggacaggtggcgcgacgcatgattggcaccgacgccttccaggagacgcccatcgtcgaggtcacgcgctccatcaccaagcacaactacctggtcctcgacgtcgacgacatcccccgcgtcgtgcaggaggctttcttcctcgcctcctctggtcgaccagggccggtgcttgtcgacatccccaaggacatccagcagcagatggcggtgcctgtctgggacaagcccatgagtctgcctgggtacattgcgcgccttcccaagccccctgcgactgagttgcttgagcaggtgctgcgtcttgttggtgaatcgcggcgccctgttctttatgtgggcggtggctgcgcagcatctggtgaggagttgcgacgctttgtggagctgactggaatcccggtcacaactactcttatgggcctcggcaacttccccagcgacgacccactgtctctgcgcatgctaggtatgcatgggacggtgtatgcaaattatgcagtggataaggccgatctgttgcttgcacttggtgtgcggtttgatgatcgcgtgacagggaagattgaggcttttgcaagcagggctaagattgtgcacgttgatattgatccggctgagattggcaagaacaagcagccacatgtgtccatctgtgcagatgttaagcttgctttgcagggcatgaatgctcttcttgaaggaagcacatcaaagaagagctttgactttggctcatggaacgatgagttggatcagcagaagagggaattcccccttgggtataaaacatctaatgaggagatccagccacaatatgctattcaggttcttgatgagctgacgaaaggcgaggccatcatcggcacaggtgttgggcagcaccagatgtgggcggcacagtactacacttacaagcggccaaggcagtggttgtcttcagctggtcttggggctatgggatttggtttgccggctgctgctggtgcttctgtggcaaacccaggtgtcactgttgttgacatcgatggagatggtagctttctcatgaacgttcaggagctagctatgatccgaattgagaacctcccagtgaaggtctttgtgctaaacaaccagcacctggggatggtggtgcagttggaggacaggttctataaggccaacagagcgcacacatacttgggaaacccagagaatgaaagtgagatatatccagatttcgtgacgatcgccaaagggttcaacattccagccgtccgtgtgacaaagaagaacgaagtccgcgcagcgataaagaagatgctcgagactccagggccgtacctcttggatataatcgtcccacaccaggagcatgtgttgcctatgatccctagtggtggggctttcaaggatatgatcctggatggtgatggcaggactgtgtactgacttcgaataggtacccggggatcctctagtgccgtgggtcgtttaagctgccgctgtacctgtgtcgtctggtgccttctggtgtacctgggaggttgtcgtctatcaagtatctgtggttggtgtcatgagtcagtgagtcccaatactgttcgtgtcctgtgtgcattatacccaaaactgttatgggcaaatcatgaataagcttgatgttcgaacttaaaagtctctgctcaatatggtattatggttgtttttgttcgtctcctaatatttgcctgggatcaaattttattggctggtgttcatttgacctccatgttcttgctaggctccattttttactctacagccataatatgtttgattgtttggtttgttctttgttgtacacctggttctgtcgagcttagttttcgacactggcttacagcttaacatgttgctattttattgggttctgattgctattttattgggttctgattgctagtttttgctgaatccaaaaaccatgttatttatttaagcgatccaggttattattatgatggtggctaagtttttttttttccaagggtaaattttctggattctccagtgtttctgtggccgaattcaatcactagagtcgacctgcaaagcttcggtccgggcctagaaggcccgcgccacttacgcttgattccgatgacttcgtaggttcctagctcaagccgctcgtgtccaagcgtcacttacgattagctaatgattacggcatctaggaccgactagttcttatgtgcttctagtctccaaatgtggttgatagttattttgctctaagatcaacagtaatgaagtataaatcatcgttgtggtgtgctactcggttaattgagcattaacacacacaaacatgacgaggatggtataatctccaaaaatgtgtactttgttaggtgggaccctatagccttgattaatgtgctatgttaggcatgcctggaaacgtgtgacgcatatgttttgtgaacctgttgatattatatgtgcttttatattaccatattttattaaaatactaatatttattactagtaagatataacattctatctagcttaaaaactaaccataaatattccataataactagatttaccaaactaatatactaaatatacataataaatacaaaattaacaagacaataatcaatatttatgagcttaatatatttagacattatggttggtcgacgataatcatgctaacttttcgtaattgcttgattgaaatatgcttagaataatgcctctttgttctacatggcaaatagggaccattatggtgtaacaccctgggaaccacaaacaccccgaaatgctactaaactacacaactaaccttcatatataaaatttcgacagcatctcctttgaaaatttgcatagacgtggaagcaacagagtataaacagatctgcgtttaaacgtgcaagcgctactagacaattcagtacattaaaaacgtccgcaatgtgttattaagttgtctaagcgtcaatttgtttacaccacaatatatcctgcca

SEQ ID NO: 263 - DNA, 22113 bp, synthetic construct
  misc_feature 1..22113: note = PHP99676
  source 1..22113: mol_type = other DNA
gtttacccgccaatatatcctgtcaaacactgatagtttaaactgaaggcgggaaacgacaatctgatcatgagcggagaattaagggagtcacgttatgacccccgccgatgacgcgggacaagccgttttacgtttggaactgacagaaccgcaacgttgaaggagccactcagcaagctggtacgattgtaatacgactcactatagggcgaattgagcgctgtttaaacgctcttcaactggaagagcggttacgctgtttaaacgctcttcaactggaagagcggttactaccggttcactagctagctgctaatcgagctagttaccctatgaggtgacatgaagcgctcacggttactatgacggttagcttcacgactgttggtggcagtagcgtacgacttagctatagttccggacttacccttaagcgatttaaatctgcggttaccgaattcgagctcggtacctagtacccttgtacttttggtttcacctgcatagagaaaacccacaagaatatgacagtctgatttgtcagtctcattctcaagcaacatttctctatccgttactttcatggtgaataacacaatccatcatcaatactttgtgttactcagaaactgaaagttattccgagtcttgcatatctttggacctactcgtttttctaccattattgctgattgttaagctctcgctacttgaatcggcattgttggagtgggaaggttcaaaaaattggagttatgactagttgtctctttctatgtacgatggagaaaatgaataaacaactgagaaaatggctcttgtttagttgatgatgctcttaagctttccactggttgccatatatgatttgggcatttcactttgatcttaatgggccttgtaaagcccaagactcatgattatctttagttgatgctcttaattaggtgtgggcaaataattcaaactgtatgtacccgaccaaaaccaaagcaaaaataatcgaaccaaaccgaaaatttaaaaataaccgaatgaaaactaaatcctataactgaaagaactgaaaccgaatcaaaatatttaatgtaaccaaaaatatccgaaatataattatattgtcaaaaatattaataatttctagattaaataattaaaaatacttaaaaatttatataaaatagtaaaaatactcgaaaataaccacaaatattcaaaaacaaccgaaatatcccaaaatattcaaagcaaaataaccgaatggataccaaattttaaaaccgaaaaaactggaacaaaaccaaaatcgaaccaaaatttcaaaaatcgaataaatactaaactttagaacaaaaaaaaacgataaccgaatgtatacgaaccaaagccgaattagataaccgaacgtccaggactactcttaatctttccgccacttatgatttgggctattactttgtttataatgagccttttcaagctcaagttcatgattgtccgtgagatgagaaactgacttgttggattcgaaaccctagctagtattggttaatacttaatacataaatgacctgcattgacatcatcatccaagaaaataaaaattgtatgcttgagatatttagttttcctagctaggttttctttattttagtaccgaatctttaggtgtgccacgttaatttagacccattttttcatacttaccaactgagtctagtttaatcatgactataatcgtataaaatgattcagtcgacgtcattgcgaacgtatataaaatcatccaaattgacgtcattccaaagaggtaagcatgcttatctaagagtccgagcatactaaacaagacgacattttatttgcactccaaatcaaattttgtattgcctaaagaaaaacaatcaaactcaagtttcttaaaattaatttcattcaaactaatcactttcaatatctcacatattattcatgccatttctatttgtctaaacatgatttaaaaaaaaaagtaaaatacaaagattactatgcaaaaactctataaaaaaaaattcaaatttcttatttatttgtgacatcaaattttcaaaataatttttttaattatcggttgatccggtcagtcgataaaaacataaactttcagcgaccgttaaaactttcctactaccgatttagagaaaatcttagcttgaaacgtaattgtaacctgccttcatgcaagtcgcaagatatgtcatcctaagttgtatatgttttctcaaaagatgtatttacttgagaaaatacgtttcaacgttgatggacaaccaattaagaatcaagcacctttcgtaatcaatttaggcttatcgtctaaggtatactgatttacgacagttgactagacttataaggaacaaaataatagaatagtttctaaacacttcacctaatcatagagactaagatggtaattcgtaaacgacaaagcctagtgacactgtccattgtaaaattccacatcatattagtattaaacatatacatgtagtttcctgaacacatgtagtatcaaacacacttcgtggcttcttcctcgaaacctgcggccgcgctatagttccggacttacccttaagataacttcgtatagcatacattatacgaagttatgggcccacgcgtgaagagcggttaccagagctggtcacctttgtccaccaagatggaactgtcttcggccagaatggccatctggattcagcaggcctagaaggccatttatcgctatcaactttgtatagaaaagttgggccgaattcgagctcggtacggccagaatggcccggaccgaagcttgcggccgcacactgatagtttaaactgaaggcgggaaacgacaatctgatcatgagcggagaattaagggagtcacgttatgacccccgccgatgacgcgggacaagccgttttacgtttggaactgacagaaccgcaacgttgaaggagccactcagccgcgggtttctggagtttaatgagctaagcacatacgtcagaaaccattattgcgcgttcaaaagtcgcctaaggtcactatcagctagcaaatatttcttgtcaaaaatgctccactgacgttccataaattcccctcggtatccaattagagtctcatattcactctcccgggggatctcgactctagaggatcgctcaggaaggccgctgagatagaggcatggcggccaatgcgggcggcggtggagcgggaggaggcagcggcagcggcagcgtggctgcgccggcggtgtgccgccccagcggctcgcggtggacgccgacgccggagcagatcaggatgctgaaggagctctactacggctgcggcatccggtcgcccagctcggagcagatccagcgcatcaccgccatgctgcggcagcacggcaagatcgagggcaagaacgtcttctactggttccagaaccacaaggcccgcgagcgccagaagcgccgcctcaccagcctcgacgtcaacgtgcccgccgccggcgcggccgacgccaccaccagccaactcggcgtcctctcgctgtcgtcgccgccgccttcaggcgcggcgcctccctcgcccaccctcggcttctacgccgccggcaatggcggcggatcggctgtgctgctggacacgagttccgactggggcagcagcggcgctgccatggccaccgagacatgcttcctgcaggactacatgggcgtgacggacacgggcagctcgtcgcagtggccacgcttctcgtcgtcggacacgataatggcggcggccgcggcgcgggcggcgacgacgcgggcgcccgagacgctccctctcttcccgacctgcggcgacgacggcggcagcggtagcagcagctacttgccgttctggggtgccgcgtccacaactgccggcgccacttcttccgttgcgatccagcagcaacaccagctgcaggagcagtacagcttttacagcaacagcaacagcacccagctggccggcaccggcaaccaagacgtatcggcaacagcagcagcagccgccgccctggagctgagcctcagctcatggtgctccccttaccctgctgcagggagtatgtgagagcaacgcgagctgccactgctcttcactgatgtctctggaatggaaggaggaggaagtgagcatagcgttggtgcgttgctgtcaagggcgaattcacatggttaacctagacttgtccatcttctggattggccaacttaattaatgtatgaaataaaaggatgcacacatagtgacatgctaatcactataatgtgggcatcaaagttgtgtgttatgtgtaattactagttatctgaataaaagagaaagagatcatccatatttcttatcctaaatgaatgtcacgtgtctttataattctttgatgaaccagatgcatttcattaaccaaatccatatacatataaatattaatcatatataattaatatcaattgggttagcaaaacaaatctagtctaggtgtgttttgcgaatgcggccgccaccgcggtggagctcgaattccggtccgggcctagaaggccagcttcaagtttgtacaaaaaagcaggctccggccagaatggcccggaccgggttaccgaattcgagctcggtacccgcacgcgggggtgttccatcgtgtctgccaaaaaccttttgctactgtatgtacggtccaaacgtggtttggtgatgttgcgtcttttcacgaccgtcgtgggccgacagcgtcgtcctaggttcctttcttgccgatccgttcggcaaggacttggtcattcgtcctgtctcgtagacttgctcggcagggacttggtcggtcaccccgtctcgcagacttgctcgtccgggacttggtcgttcgcccctcctcgcatacttgctcgacggggacttggttgctggtcccgtctcgcaaacttgctcgatgaggacttggacatttgctccgccgagtagacttgctcggcggggacttggtcgttcgccccgcatcatagacttgctcgacacagactcagttggtaaatgggccagagaggggtttgtgggggtatcccgttcttgggtacttgacacaattatttgtagtttttacctgttaaaacttcaaatatgatgttcatattcatatctttattggtatcactcttcgtgtatacatttatttatcctatgtacatgcaatgtaaatgatacatagtgcatattgaccttatttttaacatgtacttctttcaaagcaaaccacccgcgaagtgtcacaatgcatacatccttcggtgtcgagggacctcatcatgaggcccctgcccccctaagtctagcttccaatgtcatttaaggaagaagatgagtttcgaggcctttagggcctctgaggttctaccgaacaatctaggttatctttgtctcttagatcccctgcatcagacccctcttggacctcgaccttggagcccttcaaggttctgaagccctcttgagatctatggctcttaatgtgggaacccaagcttctctcttgactaagtacaagaatgctccacattgaggcatacaactagttgtaacccccgggcaagaagtaccatgggagtatggtcccatagccacaactgtctctacttaagacgaccatgtgatactaatgttccgaataaagcttttgcacatcacattaatgtgatggatgatattgtggtcaagcaggcatatggtagccaccacaaaggatatgaagcatacccaaatccactatgaggagtgtgtcgcgtacctatgccacacctaaatgtgctaatttacctgtaagcattataaaatataagcaattacaccgtatctgatggcatggactcgagtacataactatgatatgatatatttctcactgccgcaagatatgcatattacaatgacatgttcaagcgccattgtggtccgcgtagagtcctcgtctctaacaagatgaagtaatcgagcatgttcactacgaaccaacatgtgatcctcctcttcttcgagctataaaatattcatccagcttaaatttcaaaatatgtgtgtcagagttaaaaaaatattcgattcaaatctaaatatcagttctgtattcatatcctagaatattcgaatctatatttgaattcagattacaaggtagtgaattgtgacatgtattcgttcctatccgatccgtcgtttttgagcactaggtgcggtcactgtgacgcgtggacttggcttcgcccactgccatcgtggacccacgtcatcagcaagtgtccatatccaccacccgacccgacgaccgcttgccgtccgatccgtgtgctcccgagggcaaggatggcatttcgccacgcgagatatttttcggtggcctgcacaggccggcagtgcagcggccaaaacgaggtcaggtcagtcacgctgggccccgcctcacgctcccgtcctgctccgggtcccaacaaagccgtccccgggaggtgctcgtgtgctcgtagcgcggtggcgaccccgatgccccgcatattccactgggcgtccgcgccgtcggatgggatcaggacggccgcggcggccccgcgctcggctataaagacgctgcgggggacgcattccctctccgtgctttcttagaggtgggttggcttctcctccccctccggttcgggttcgggttcgtgaggttctccggggttcgggttcgtgggtgagcggatcgagggatccatggccactgtgaacaactggctcgctttctccctctccccgcaggagctgccgccctcccagacgacggactccacactcatctcggccgccaccgccgaccatgtctccggcgatgtctgcttcaacatcccccaagattggagcatgaggggatcagagctttcggcgctcgtcgcggagccgaagctggaggacttcctcggcggcatctccttctccgagcagcatcacaaggccaactgcaacatgatacccagcactagcagcacagtttgctacgcgagctcaggtgctagcaccggctaccatcaccagctgtaccaccagcccaccagctcagcgctccacttcgcggactccgtaatggtggcttcctcggccggtgtccacgacggcggtgccatgctcagcgcggccgccgctaacggtgtcgctggcgctgccagtgccaacggcggcggcatcgggctgtccatgattaagaactggctgcggagccaaccggcgcccatgcagccgagggtggcggcggctgagggcgcgcaggggctctctttgtccatgaacatggcggggacgacccaaggcgctgctggcatgccacttctcgctggagagcgcgcacgggcgcccgagagtgtatcgacgtcagcacagggtggagccgtcgtcgtcacggcgccgaaggaggatagcggtggcagcggtgttgccggcgctctagtagccgtgagcacggacacgggtggcagcggcggcgcgtcggctgacaacacggcaaggaagacggtggacacgttcgggcagcgcacgtcgatttaccgtggcgtgacaaggcatagatggactgggagatatgaggcacatctttgggataacagttgcagaagggaagggcaaactcgtaagggtcgtcaagtctatttaggtggctatgataaagaggagaaagctgctagggcttatgatcttgctgctctgaagtactggggtgccacaacaacaacaaattttccagtgagtaactacgaaaaggagctcgaggacatgaagcacatgacaaggcaggagtttgtagcgtctctgagaaggaagagcagtggtttctccagaggtgcatccatttacaggggagtgactaggcatcaccaacatggaagatggcaagcacggattggacgagttgcagggaacaaggatctttacttgggcaccttcagcacccaggaggaggcagcggaggcgtacgacatcgcggcgatcaagttccgcggcctcaacgccgtcaccaacttcgacatgagccgctacgacgtgaagagcatcctggacagcagcgccctccccatcggcagcgccgccaagcgcctcaaggaggccgaggccgcagcgtccgcgcagcaccaccacgccggcgtggtgagctacgacgtcggccgcatcgcctcgcagctcggcgacggcggagccctggcggcggcgtacggcgcgcactaccacggcgccgcctggccgaccatcgcgttccagccgggcgccgccagcacaggcctgtaccacccgtacgcgcagcagccaatgcgcggcggcgggtggtgcaagcaggagcaggaccacgcggtgatcgcggccgcgcacagcctgcaggacctccaccacctgaacctgggcgcggccggcgcgcacgactttttctcggcagggcagcaggccgccgccgctgcgatgcacggcctgggtagcatcgacagtgcgtcgctcgagcacagcaccggctccaactccgtcgtctacaacggcggggtcggcgacagcaacggcgccagcgccgtcggcggcagtggcggtggctacatgatgccgatgagcgctgccggagcaaccactacatcggcaatggtgagccacgagcaggtgcatgcacgggcctacgacgaagccaagcaggctgctcagatggggtacgagagctacctggtgaacgcggagaacaatggtggcggaaggatgtctgcatgggggactgtcgtgtctgcagccgcggcggcagcagcaagcagcaacgacaacatggccgccgacgtcgggcatggcggcgcgcagctcttcagtgtctggaacgacacttaagcgtacgtgccggcctggctctccgaaagggcgtattccagcacactggcggccgttactagacccaacctagacttgtccatcttctggattggccaacttaattaatgtatgaaataaaaggatgcacacatagtgacatgctaatcactataatgtgggcatcaaagttgtgtgttatgtgtaattactagttatctgaataaaagagaaagagatcatccatatttcttatcctaaatgaatgtcacgtgtctttataattctttgatgaaccagatgcatttcattaaccaaatccatatacatataaatattaatcatatataattaatatcaattgggttagcaaaacaaatctagtctaggtgtgttttgcgaatgcggcctccgggcacccagctttcttgtacaaagtggccgttaacggatcggccagaatggcccggaccgggttaccccgcggttcaaagccaatgactgttgttaggtccagtttctaaggacgaatcatccaatcactggttctttctgaacaaaacaaagagctatagagttacgttactgtagccgagacagagcctgcaatctggttatgccacatactaggttctttcttaaagttgactcactctatcctaagttctacttacaaggagctacaacaaattggtcataaccggagagcgttcaaggaggtaatatcccatcttactctgtagcaaggctacaaaaggagagctaaagaactaggctacaaaaagagagctaaagaactaactatctagcaagactacagagctatagtgtagagatttcataaccggtgagcgttcaaggatactttgaagagaagaggtaatatctcaactagcaagactacaaaaaaatggagatataaaactaactgtctaacaagactacagagctatagtagagatagatacgttcgacacttaagcatgagaattcgagctcggtaccctggttcacaaactcaatacaacacacagtggagtagggtattacgctccggcggcccgaaccactctaaatccttgtgtcctcgtgtgctcttccaccattaatgactgtaattgcagggacacgaagagttgtagcgcttttgccaacaagatccgctatatgctagtagagtggaacctgcacagcaacaagcatccaataatctgagaataagaattatgtgtggtgatggttctcatctctgcaactcgccattttcgcgagagaaccaaatccaagttggtgaagatcatgatttgggctcatgggctggcatagtagctattacctttgcaattgtggttcgaatctatccgatattctccttttcagggagagctaatgcttatgcttattgggtattttggtttgacactgcttcacgcccaaaaaaaggcaactatgtctgagttggatatggcccaaaaaaaggcagctatgtctgagttggatatggaagtcttctttcgtttagggtgaagtaagaccaagctcatgagcttattatcttaggtcggaacaaattagttgataggcatggcacatttatcaaattataatgattttaacagaaaagcaacacctctttttcagcagcaccagctttgcaagctgcaattgacactccaagcatagtatttgctccaaactcagcctgcatttcgcacaatatcatatctatttccatttggataaaatatattttccagaaatatgggaacagaatcaagatacagaaaaaagttgtggtagtagtggtaagtggaaacacaagtacagtgaaaagatagcattatttctgaacagtcaaattaaccgaaataagtagtatcacatactgcccctaaattgactacacccaatgtaaagaattgcttgagcatattgagccatcagttgtttgtttgtgtaacggatttgacaatgcagagttcaggagcaaaaaaccgcaaaggagagaaagagggaaaggatctcctagtatcccaccttgtggcgcgccctgtcaagtgcatgatggcctggtcgatctgcgtctgctgctgcggttccatcccaacgagtgcctccgacaccttgtcgttgatcacccgcaccgcgtaggcgacccccctggcgaggaacttccgcctctcggaggccccggccgcgtcggcggcggcgccctcgagcgcgcccacgctagccgtagatgctcggtgcacggccttgttggtgtgcaactcgacctcaacggccggtgcgctacgcccgtcaaggatctggcgcgcccgcaccctcgtgatcacggtgggcgcctcccgcctcatgtggccgacgatgaaaagcgccgggttaggggccttggcgcgcaccgccgtattcagggcctcctcgctcttgcgcgagagcaggtgcttccccaggtactcctgcactgacaaggctgccacagcggtggaatttgtcctcacgacttcgccacgtcgtcctcacctccctggcttcccacgactccgccgtatcgaggtgctcggtgggtcgtcttaatccgaagtccgaactaggaagacgagacagagaggtctgaggaatgggcctcgtttgatgttgagctgaattatttttccagcataagcccaggtcttggtccatgaacaaaattactagaaacccagcccagtactacgatctaaaagagggactgccactggatagctctctctagcattctccacgctccaatacagcggcgtcgtgtctatccgggtctatccgcgaacacgtgagaactctccagaaactgctttctcctccacttcatctctctcgctttccctctataaaaagaccccttctaggaattgagggagacagcaagcaccaagcagcgatccgaagctcaatcaattcactcaaacctcttccccaaatcttcgattagatcttcgttgacaagaagactagaaccgaacctgacatgtccaacctgctcacggttcaccagaaccttccggctcttccagtggacgcgacgtccgatgaagtcaggaagaacctcatggacatgttccgcgacaggcaagcgttcagcgagcacacctggaagatgctgctctccgtctgccgctcctgggctgcatggtgcaagctgaacaacaggaagtggttccccgctgagcccgaggacgtgagggattaccttctgtacctgcaagcgcgaggtttgtttctgcttctacctttgatatatatataataattatcattaattagtagtaatataatatttcaaatatttttttcaaaataaaagaatgtagtatatagcaattgcttttctgtagtttataagtgtgtatattttaatttataacttttctaatatatgaccaaaacatggtgatgcctaggtctggcagtgaagaccatccagcaacaccttggacaactgaacatgcttcacaggcgctccggcctcccgcgccccagcgactcgaacgccgtgagcctcgtcatgcgccgcatcaggaaggaaaacgtcgatgccggcgaaagggcaaagcaggccctcgcgttcgagaggaccgatttcgaccaggtccgcagcctgatggagaacagcgacaggtgccaggacattaggaacctggcgttcctcggaattgcatacaacacgctcctcaggatcgcggaaattgcccgcattcgcgtgaaggacattagccgcaccgacggcggcaggatgcttatccacattggcaggaccaagacgctcgtttccaccgcaggcgtcgaaaaggccctcagcctcggagtgaccaagctcgtcgaacgctggatctccgtgtccggcgtcgcggacgacccaaacaactacctcttctgccgcgtccgcaagaacggggtggctgcccctagcgccaccagccaactcagcacgagggccttggaaggtattttcgaggccacccaccgcctgatctacggcgcgaaggatgacagcggtcaacgctacctcgcatggtccgggcactccgcccgcgttggagctgctagggacatggcccgcgccggtgtttccatccccgaaatcatgcaggcgggtggatggacgaacgtgaacattgtcatgaactacattcgcaaccttgacagcgagacgggcgcaatggttcgcctcctggaagatggtgactgaggtacccaacctagacttgtccatcttctggattggccaacttaattaatgtatgaaataaaaggatgcacacatagtgacatgctaatcactataatgtgggcatcaaagttgtgtgttatgtgtaattactagttatctgaataaaagagaaagagatcatccatatttcttatcctaaatgaatgtcacgtgtctttataattctttgatgaaccagatgcatttcattaaccaaatccatatacatataaatattaatcatatataattaatatcaattgggttagcaaaacaaatctagtctaggtgtgttttgcgatccgatatcgaattggccacggtaccagctgctgctgttctagggttcacaagtctgcctatttgtcttccccaatggagctatggttgtctggtctggtccttggtcgtgtcccgtttcattgtgtactatttacctgtaatgtgtatccttaagtctggtttgatggtgtctgaaacgttttgctgtggtagagcagcatggaagaactataatgaataagtgatccctaatcattgtgtccaaattttgcttctgctatacccttttgtgctgtttcttatgttttgcttaaaaatttgatctgacaaacaaatttgtctaaattatgctcttgttctgactgtgtactgtacacatttgtattgctaccggtttggcacatagttttctctttgattgcagatcaaacccttctgattgcagattgcttggctatggctgatgtgctcactgttcttctttagcttgtatattgctgatggtggcttggctacggctgaaaaagttgctgctgcgccgacttggcaactgttgctccagtaatgctttgtcctctcttcctagccgccgacttggcacttggcagctgttgctcctgtaatgcgttgttatctcttatctcttgagatgtactatgattttgaggctgtttgacttgtgccagattgccagtgctgatgctatattatctcaggtttttatgctagtatatgttttactgtgtgctgcctgtgtcgagttacgtaatctattgaaccgctatgcgtgttgatgccctgttgttgcttgccagattgatgcccctgttgcttgcagcttgcaagctgtagtgaaatcctaaaattccaaaccaaatctattctgaacttttgaagatctgtgatgtccggaagaaaagattcaaacagataaacgggactctccagaatctataaaataaatgatcgacaaacgctttgctttggtaggcttcaagcttggtcacccggtccgggcctagaaggccagcttcggccgccccgggcaactttattatacaaagttgatagataaatcagatatctggttcctaaggacccggcggaccgattaaactgattcggtccgacgcgttacctaataacttcgtatagcatacattatacgaagttattagctaactaactagtaagcttaagccatgggtcgacggatccgttaactagcgtggcatttggcaccgccgcacactatgcgagctaggagtgctagtttacagatgaaactatgaaaccaagaaaacacaattgtccgtagctagcgcgtggcgtcgtgtcaagcttcacacagtatcttcgttcttcactataaatcgcgcctgttgttcgtgagacccaccaccgtggataacagtcccctaataataagcgatcaacagcactgctgatggctgaacaccgaggcgccgccgcgcgtaaccatccgccggagcagcccgtcgtgccggcgaacgacgccttccccgaccgcgcccagcagctctgcctcgacgccgggcgcgcgctcgcgatgtgcggcgtgctcgtcgccgtccctcccgcattttacgcgtcgacgtcgcggacgacaccgcacttgccttcgtcggcttcgtcctctggatcatcggtgcgtggctgtgcctcctggcgctcacgcccttggctccacgggcggtgagggcgggcggggccgccgccagcaccttgctgatcaggtgcctgtccctttcatgaactactagcgcccgcgcccgcggccgccgggcacaagagaacacatcgatgttcgctgcgtacgtcagcaataaggcactctttgtcagtagtcgagtgcatatgttgggtgtttgccctgggagatttcaagtgttgtggccattatcccgcaggataaaaaatcggcggcttttggattgatacggaaaataacgatgtttcatgctcgtgttgtgtgtgtgacatcttgtcagccaagtttttaaccgttgctactccccctctgtgggctcagtgtgtggaccggaatacgtcgtacataggccgtagcctaagcccaatatgccgtttttcaggttggcctgtgtgacgacaagcgggtctcaaaagcccatcacgcaactggcctgcaattattggaggagagcgcgtcgagttggttccagaggctgcgtggtggggccggactctgcgacgacctctcgttcgcgtccgatttggttgccgtgagccgtgacgtaacgcctccttccgttcctccctatataagttccacccccgggtccggtttccccaagccccagtgacccccgatcccgatcgcgaaatctccgcacccgccggcaagggaccgaagcaagcctctctcccgaccgtcgcatcaaggtacgcgtccgctcgatctgtcctcttccttctcgatttgacttgctgtggtgcccgatcacgggatcagaatcgcaccagtgtagatttcgcatgttctaagatgtgttagtttccaggctaatccagttctcttgacgcccgatccgatcgagctccgtgtttatttcagcctaatcgtagtattcccctaaaatttcctcattagggggttcgcaagattgttggtcgacaggttcacttatgctcgatcgcttacttttagtcgattcatgctgcgtactattgttgccccccgtggttttatcttttctcgtgtgaaatccagtagatatagtagatatcgtagcattaggttttaattcaatcgattgattattgtatcatcaaaattgagaagttcgaatcatgcctatcatgctgcctcaaccgaaatcctgtatattgaagtttcaattcaattgattgatcattcattagattcaaccaaaatctagaaggttagatgacgcatgtcatgctgcctgcgtagtttacctttgatctgtttatgattaccttatcagtaggatatttgtgattttgggaagtagcactaactgattcatgctgacatgatgttccctttcagattatactgttgagtcctatctaattgatgctttgtatgctatatgaatacgtcatggtaaattagcagttaattagcatattagcaattgggcgtacctcatcaggattgctcttgtagatgtgtgtggtgatgtttcttgttcaattcatgttctgctttaaaagtatgtgttctctgtttgttaattaagattcatggttataatgatttggacctaattaatcagggttgcccttttagatgcgtggttacttgttgagttcatttttttcctgctatagttgtatgcgtttgttcattcatggttagatttgatttgtttcttctctattccatgccttccatatacttcaattgtagcttaacatgagatttctgtatatgcaggtcgaccgccggggatccacacgacaccatggcccagtccaagcacggcctgaccaaggagatgaccatgaagtaccgcatggagggctgcgtggacggccacaagttcgtgatcaccggcgagggcatcggctaccccttcaagggcaagcaggccatcaacctgtgcgtggtggagggcggccccttgcccttcgccgaggacatcttgtccgccgccttcatgtacggcaaccgcgtgttcaccgagtacccccaggacatcgtcgactacttcaagaactcctgccccgccggctacacctgggaccgctccttcctgttcgaggacggcgccgtgtgcatctgcaacgccgacatcaccgtgagcgtggaggagaactgcatgtaccacgagtccaagttctacggcgtgaacttccccgccgacggccccgtgatgaagaagatgaccgacaactgggagccctcctgcgagaagatcatccccgtgcccaagcagggcatcttgaagggcgacgtgagcatgtacctgctgctgaaggacggtggccgcttgcgctgccagttcgacaccgtgtacaaggccaagtccgtgccccgcaagatgcccgactggcacttcatccagcacaagctgacccgcgaggaccgcagcgacgccaagaaccagaagtggcacctgaccgagcacgccatcgcctccggctccgccttgccctccggactcagatctcgatagagtcaacctagacttgtccatcttctggattggccaacttaattaatgtatgaaataaaaggatgcacacatagtgacatgctaatcactataatgtgggcatcaaagttgtgtgttatgtgtaattactagttatctgaataaaagagaaagagatcatccatatttcttatcctaaatgaatgtcacgtgtctttataattctttgatgaaccagatgcatttcattaaccaaatccatatacatataaatattaatcatatataattaatatcaattgggttagcaaaacaaatctagtctaggtgtgttttgcgaattgcggcgcccttactttaacgcctctaaccaacacccctttatctttataaggaacaataaacagaatttgccccactgttctaaatcacctaataatatccccagctaaaaacaataaaggtttcctagaattaagacaagcatgactgttcctccaggagggtttggaacattgttgcagtcttgcagatacgggcgaagggtgagaaacagagcggagggctggaggtgacctcggtagtcgacgccggagttgagcttgacaacgacggggcggcccctgatggacttgaggaagtccgatggcgtcttcaccgtcccgccggcgcccgaggcgggcctgtcgctgccgccgccgccgctgctcatcttgcgcgctgtgcccccggcggtgtccctgtgttgcggatcgcgggtgggccaggtggatgcgagggcgacccgtttggactccggccggagccgccggatccctggtcggtgtcagtgccgtttactctgggccccacgtgtcagtaccgtctgtagatgacaacaacccgtcgtccacagtcatgtccaaaatatcctttcttcttttttttcgattcggatatctatcttccttttttttttccaaaaatcttcttgacgcaccagcgcgcacgtttgtggtaaacgccgacacgtcggtcccacgtcgatagaccccacccaccagtgagtagcgtgtacgtattcgggggtgacggacgtgtcgccgtcgtcttgctagtcccattcccatctgagccacacatctctgaacaaaaaaaaggagggaggcctccacgcacatccccctccgtgccacccgccccaaaccctcgcgccgcctccgagacagccgccgcaaccatggccaccgccgccgccgcgtctaccgcgctcactggcgccactaccgctgcgcccaaggcgaggcgccgggcgcacctcctggccacccgccgcgccctcgccgcgcccatcaggtgctcagcggcgtcacccgccatgccgatggctcccccggccaccccgctccggccgtggggccccaccgagccccgcaagggtgctgacatcctcgtcgagtccctcgagcgctgcggcgtccgcgacgtcttcgcctaccccggcggcgcgtccatggagatccaccaggcactcacccgctcccccgtcatcgccaaccacctcttccgccacgagcaaggggaggcctttgccgcctccggctacgcgcgctcctcgggccgcgtcggcgtctgcatcgccacctccggccccggcgccaccaacctagtctccgcgctcgccgacgcgctgctcgattccgtccccatggtcgccatcacgggacaggtggcgcgacgcatgattggcaccgacgccttccaggagacgcccatcgtcgaggtcacccgctccatcaccaagcacaactacctggtcctcgacgtcgacgacatcccccgcgtcgtgcaggaggctttcttcctcgcctcctctggtcgaccagggccggtgcttgtcgacatccccaaggacatccagcagcagatggcggtgcctgtctgggacaagcccatgagtctgcctgggtacattgcgcgccttcccaagccccctgcgactgagttgcttgagcaggtgctgcgtcttgttggtgaatcgcggcgccctgttctttatgtgggcggtggctgcgcagcatctggtgaggagttgcgacgctttgtggagctgactggaatcccggtcacaactactcttatgggcctcggcaacttccccagcgacgacccactgtctctgcgcatgctaggtatgcatgggacggtgtatgcaaattatgcagtggataaggccgatctgttgcttgcacttggtgtgcggtttgatgatcgcgtgacagggaagattgaggcttttgcaagcagggctaagattgtgcacgttgatattgatccggctgagattggcaagaacaagcagccacatgtgtccatctgtgcagatgttaagcttgctttgcagggcatgaatgctcttcttgaaggaagcacatcaaagaagagctttgactttggctcatggaacgatgagttggatcagcagaagagggaattcccccttgggtataaaacatctaatgaggagatccagccacaatatgctattcaggttcttgatgagctgacgaaaggcgaggccatcatcggcacaggtgttgggcagcaccagatgtgggcggcacagtactacacttacaagcggccaaggcagtggttgtcttcagctggtcttggggctatgggatttggtttgccggctgctgctggtgcttctgtggcaaacccaggtgtcactgttgttgacatcgatggagatggtagctttctcatgaacgttcaggagctagctatgatccgaattgagaacctcccagtgaaggtctttgtgctaaacaaccagcacctggggatggtggtgcagttggaggacaggttctataaggccaacagagcgcacacatacttgggaaacccagagaatgaaagtgagatatatccagatttcgtgacgatcgccaaagggttcaacattccagcggtccgtgtgacaaagaagaacgaagtccgcgcagcgataaagaagatgctcgagactccagggccgtacctcttggatataatcgtcccacaccaggagcatgtgttgcctatgatccctagtggtggggctttcaaggatatgatcctggatggtgatggcaggactgtgtactgactagctagtcagttaacagatctgccagatcctcggtgtacaaataacccgtcttatcctatgagacgggccggcgtcagtgtgttctggaggaatttttatgtcagagcctttttctttgtgtgcttgatgtagatgccaagggaagcttattggctgttgaagcttgatgcaaaataaattatggaactctgttttttgtttatctaataataactagcaaatatgcttccattgcattgaaactaacagccttttgtgtttccaagttttattttgtgacaatgtcatctatttcaattagttgtggaatcggaaacttgcaggactaacttggaaactccaatccctcagcatcctggactttttcctggtgtaatccatgtagatattattttaatcatcattttagttctggaggtttttccatctccggttttgctcccctttcttcaaaaaaaaaaaaaaaatgccgtaggcgccgcaacgcccacctgttgttcaaactcatgggcacgagtggctcgaagattttatacaacaattgctgtagtttcaccgttgctggtgaagaagcatttttttaaaaaaatatagtggtattcattttaattagtttagttgtgcagcgagcaaaatttggacatgctctgctcggaatctgatcgacctagacacagattagcagcagtagctttgtcatctgttccaagagttgcgatctgatagaagaaaaaaaaaccttcccttcaatgtaaaaccgaaactaacaagaaagaagcacagtgccgtttaggcaagtatggagtacgtattaagcatgtagaaggccatgcatgaaccactaacaagaaagaagcgcagtgccattcaggcaagcataagcatgtagattggcatgcatgaacaactaacagtagatcgtctctggtctgattagaagttttttgggaagccaagaaatcatgtacaactggttccatctcaaattccgtggcaaaaagaggcctaagcaacatacctcgagtagatcacattcaagcttggtcacccggtccgtcaatattctgattccgatgacttcgtaggttcctagctcaagccgctcgtgtccaagcgtcacttacgattagctaatgattacggcatctaggaccgactagtggcgcgccgactagctagctaaggtaccgagctcgaattcattccgattaatcgtggcctcttgctcttcaggatgaagagctatgtttaaacgtgcaagcgctactagacaattcagtacattaaaaacgtccgcaatgtgttattaagttgtctaagcgtcaatttgtttacaccacaatatatcctgcca

(The sequence listing continues in the following parts.)

What is claimed is:

1. A method of pre-treating a seedling with at least one chemical compound, the method comprising contacting the seedling with the at least one chemical compound and isolating leaf explants from the seedling for transformation, wherein the transformation frequency of the leaf explants from the pre-treated seedling is higher than the transformation frequency of leaf explants from seedlings not treated with the at least one chemical compound.

2. The method of claim 1, wherein the at least one chemical compound is an auxin selected from the group consisting of 2,4-D, dicamba, 2,4,5-T, 1-Naphthaleneacetic acid (NAA), picloram, indole-3-acetic acid, 4-chloroindole-3-acetic acid, phenylacetic acid, indole-3-butyric acid, and indole-3-propionic acid.

3. The method of claim 1, wherein the at least one chemical compound is anti-oxidant selected from the group consisting of dithiolthreitol, cysteine, and glutathione.

4. The method of claim 1, wherein the at least one chemical compound is gibberellic acid inhibitors selected from the group consisting of ancymidol, paclobutrazol, uniconazole, chlormequat chloride, mepiquat, AMO-1618 [(2′-isopropyl-4′-(trimethylammoniumchloride)-5′-methylphenylpiperidinecarboxylate)], clorphonium-Cl, tetcylacis, flurprimidol, inabenfide, pro-hexadione, trinexapac-ethyl, daminozide, exo-16,17-acetate, malic hydrazide, phoshor D, alar, chlorocholine chloride, cycocel, the fungicides tebuconazole and metconazole, trinexapac-ethyl, prohexadione-calcium, and exo-16,17-dihydro-GA5-13-acetate.

5. The method of claim 1, wherein the at least one chemical compound is ancymidol.

6. The method of claim 5, wherein the seedling is contacted with ancymidol at a concentration of about 1 mg/l to about 2 mg/l.

7. The method of claim 1, wherein the at least one chemical compound is an inhibitor of abscisic acid biosynthesis selected from the group consisting of norflurazon, fluridone, diflufenican, abamine, and nordihydroguaiaretic acid (NDGA).

8. The method of claim 1, wherein the at least one chemical compound is an abscisic acid antagonist selected from the group consisting of AA1 [1-[(4-benzylpiperazin-1-yl)methyl]-2-sulfanylidene-1H,2H,5H,6H,7H,8H-[1,3,4]thiadiazolo[3,2-a][1,3]diazepin-5-one], AS6 [3′-hexylsulfanyl-ABA], DFPM ([5-(3,4-Dichlorophenyl) furan-2-yl]-piperidin-1-ylmethanethione), and RK460.

9. The method of claim 1, wherein the at least one chemical compound is the abscisic acid agonist, pyrabactin.

10. The method of claim 1, wherein the at least one chemical compound is a cytokinin selected from the group consisting of BAP [6-benylamino purine], BA [benzyladenine], kinetin, TDZ [thidiazuron], and trans-zeatin.

11. The method of claim 1, wherein the at least one chemical compound is an anti-cytokinin selected from the group consisting of S-4893 [a 4-phenylquinazoline derivative], 4-phenylquinazoline, 6-(2,5-Dihydroxybenzylamino) purine (LGR-991), and 2-hydroxy-3-methyl-benzyladenine.

12. The method of claim 1, wherein the at least one chemical compound is the cyclin-dependent kinase (CDK) inhibitor, caffeine.

13. The method of claim 1, wherein the at least one chemical compound is an auxin agonist selected from the group consisting of quinclorac, RubNeddins1 (RN1), RubNeddins2 (RN2), RubNeddins3 (RN3), and RubNeddins4 (RN4).

14. The method of claim 1, wherein the at least one chemical compound is an auxin antagonist selected from the group consisting of p-Chlorophenoxy isobutylic (PCIB), tert-butoxycarbonylaminohexyl-IAA (BH-Indole Acetic Acid=BH-IAA), α-(phenylethyl-2-oxo)-IAA (PEO-IAA), and α-(2,4-dimethylphenylethyl-2-oxo)-IAA (auxinole).

15. The method of claim 1, wherein the at least one chemical compound is fipexide.

16. The method of claim 1, wherein the at least one chemical compound is a methylation inhibitor selected from the group consisting of 5-azacytidine, Decitabine, RG108 [N-Phthalyl-L-tryptophan], zebularine, thioguanine, 2′-deoxy-5-fluoreocytidine, CM-272 (6-methoxy-2-(5-methyl-2-furyl)-N-(1-methyl-4-piperidyl)-7-(3-pyrrolidin-1-ylpropoxy) quinolin-4-amine), CM-579 (6-methoxy-2-(5-methyl-2-furyl)-N-[(1-methyl-4-piperidyl)methyl]-7-(3-pyrrolidin-1-ylpropoxy) quinolin-4-amine), SGI-1027 [N-[4-[(2-Amino-6-methyl-4-pyrimidinyl)amino]phenyl]-4-(4-quinolinylamino)benzamide], gamma-oryzanol, and (−)-epigallocatechin gallate (ECGC), β-Thujaplicin, and procainamide.

17. The method of claim 1, wherein the at least one chemical compound is a histone deacetylase (HDAC) inhibitor selected from the group consisting of valproic acid, tacedinaline, cambinol, trichostain A (TSA), verinostat, panobinostat, belinostat, RGFP-966 [(E)-N-(2-amino-4-fluorophenyl)-3-(1-cinnamyl-1H-pyrazol-4-yl) acrylamide], tubastatin A, and PCI-34051 [N-Hydroxy-1-[(4-methoxyphenyl)methyl]-1H-indole-6-carboxamide].

18. (canceled)

19. The method of claim 1, wherein the at least one chemical compound is a sugar composition selected from the group consisting of sucrose and maltose.

20. The method of claim 1, wherein the at least one chemical compound is a composition comprising a metal selected from the group consisting of copper, zinc, and manganese.

21. The method of claim 1, wherein the at least one chemical compound is an amino acid selected from the group consisting of proline, asparagine, methionine, and glutamine.

22. The method of claim 1, wherein the at least one chemical compound is an ethylene inhibitor selected from the group consisting of silver nitrate, 2-aminoethoxyvinyl glycine (AVG), silver ions (Ag), and 1-methylcyclopropene (1-MCP).

23. The method of claim 1, wherein the at least one chemical compound is the ethylene competitive inhibitor, norbornadiene.

24. The method of claim 1, wherein the at least one chemical compound is a Polycomb Repressive Complex 2 (PRC2) inhibitor selected from the group consisting of EPZ005687 [1-cyclopentyl-N-[(4,6-dimethyl-2-oxo-1H-pyridin-3-yl)methyl]-6-[4-(morpholin-4-ylmethyl)phenyl]indazole-4-carboxamide], UNC1999 [N-[(6-methyl-2-oxo-4-propyl-1H-pyridin-3-yl)methyl]-1-propan-2-yl-6-[6-(4-propan-2-ylpiperazin-1-yl) pyridin-3-yl]indazole-4-carboxamide], PF-06726304 (C₂₂H₂₁Cl₂N₃O₃), Lirametostat, Tazemetostat, EPZ011989 (C₃₅H₅₁N₅O₄·HCl), CPI-169 (C₂₇H₃₆N₄O₅S), and JQ-EZ-05 (C₃₀H₃₈N₈O₂).

25. The method of claim 1, wherein the at least one chemical compound is a Jasmonate, selected from the group consisting of Jasmonic acid and Methyl-jasmonate.

26. The method of claim 1, wherein the at least one chemical compound is a safener selected from the group consisting of naphthalic anhydride, salicylic acid, fenchlorazole, cloquintocet-mexyl, and mefenpyr diethyl.

27. The method of claim 1, wherein the at least one chemical compound is a kinase inhibitor selected from the group consisting of N-[(2R)-2,3 dihydroxypropoxy]-3,4-difluoro-2-(2-fluoro-4-iodoanilino) benzamide, anthra (1,9-cd) pyrazol-6 (2H)-one:4-(4-Fluoro phenyl)-2-(4-methylsulfinylphenyl)-5-(4-pyridyl) 1H imidazole, and N-benzyl-2-(pyrimidin-4-ylamino)-1,3 thiazole-4-carboxamide.

28. The method of claim 1, wherein the at least one chemical compound is a reactive oxygen species (ROS) scavenger selected from the group consisting of Tiron, dimethylthiourea (DMTU), and diphenyleneiodonium (DPI).

29. The method of claim 1, wherein the at least one chemical compound is 2,4-D, dicamba, 2,4,5-T, NAA, picloram, indole-3-acetic acid, 4-chloroindole-3-acetic acid, phenylacetic acid, indole-3-butyric acid, indole-3-propionic acid, dithiolthreitol (DTT), cysteine, glutathione, ancymidol, paclobutrazol, uniconazole, chlormequat chloride, mepiquat, AMO-1618 [(2′-isopropyl-4′-(trimethylammoniumchloride)-5′-methylphenylpiperidinecarboxylate)], clorphonium-Cl, tetcylacis, flurprimidol, inabenfide, pro-hexadione, trinexapac-ethyl, daminozide, exo-16,17-acetate, malic hydrazide, phoshor D, alar, chlorocholine chloride, cycocel, the fungicides tebuconazole and metconazole, trinexapac-ethyl, prohexadione-calcium, exo-16,17-dihydro-GA5-13-acetate, norflurazon, fluridone, diflufenican, abamine, nordihydroguaiaretic acid (NDGA), AA1 [1-[(4-benzylpiperazin-1-yl)methyl]-2-sulfanylidene-1H,2H,5H,6H,7H,8H-[1,3,4]thiadiazolo[3,2-a][1,3]diazepin-5-one], AS6 [3′-hexylsulfanyl-ABA], DFPM ([5-(3,4-Dichlorophenyl)furan-2-yl]-piperidin-1-ylmethanethione), RK460, pyrabactin, BAP [6-benylamino purine], BA [benzyladenine], kinetin, TDZ [thidiazuron], trans-zeatin, S-4893 [a 4-phenylquinazoline derivative], 4-phenylquinazoline, 6-(2,5-Dihydroxybenzylamino) purine (LGR-991), 2-hydroxy-3-Methyl-benzyladenine, caffeine, quinclorac, RubNeddins1 (RN1), RubNeddins2 (RN2), RubNeddins3 (RN3), RubNeddins4 (RN4), p-Chlorophenoxy isobutylic (PCIB), tert-butoxycarbonylaminohexyl-IAA (BH-Indole Acetic Acid=BH-IAA), α-(phenylethyl-2-oxo)-IAA (PEO-IAA), α-(2,4-dimethylphenylethyl-2-oxo)-IAA (auxinole), fipexide, 5-azacytidine, Decitabine, RG108 [N-Phthalyl-L-tryptophan], zebularine, thioguanine, 2′-deoxy-5-fluoreocytidine, CM-272 (6-methoxy-2-(5-methyl-2-furyl)-N-(1-methyl-4-piperidyl)-7-(3-pyrrolidin-1-ylpropoxy) quinolin-4-amine), CM-579 (6-methoxy-2-(5-methyl-2-furyl)-N-[(1-methyl-4-piperidyl)methyl]-7-(3-pyrrolidin-1-ylpropoxy) quinolin-4-amine), SGI-1027 [N-[4-[(2-Amino-6-methyl-4-pyrimidinyl)amino]phenyl]-4-(4-quinolinylamino)benzamide], gamma-oryzanol, and (−)-epigallocatechin gallate (ECGC), β-Thujaplicin, procainamide, valproic acid, tacedinaline, cambinol, trichostain A (TSA), verinostat, panobinostat, belinostat, RGFP-966 [(E)-N-(2-amino-4-fluorophenyl)-3-(1-cinnamyl-1H-pyrazol-4-yl) acrylamide], tubastatin A, PCI-34051 [N-Hydroxy-1-[(4-methoxyphenyl)methyl]-1H-indole-6-carboxamide], sucrose, maltose, copper, zinc, manganese, proline, asparagine, methionine, glutamine, silver nitrate, 2-aminoethoxyvinyl glycine (AVG), silver ions (Ag), 1-methylcyclopropene (1-MCP), norbornadiene, EPZ005687 [1-cyclopentyl-N-[(4,6-dimethyl-2-oxo-1H-pyridin-3-yl)methyl]-6-[4-(morpholin-4-ylmethyl)phenyl]indazole-4-carboxamide], UNC1999 [N-[(6-methyl-2-oxo-4-propyl-1H-pyridin-3-yl)methyl]-1-propan-2-yl-6-[6-(4-propan-2-ylpiperazin-1-yl) pyridin-3-yl]indazole-4-carboxamide], PF-06726304 [C₂₂H₂₁Cl₂N₃O₃], Lirametostat, Tazemetostat, EPZ011989 (C₃₅H₅₁N₅O₄·HCl), CPI-169 (C₂₇H₃₆N₄O₅S), and JQ-EZ-05 (C₃₀H₃₈N₈O₂), Jasmonic acid, Methyl-jasmonate, naphthalic anhydride, salicylic acid, fenchlorazole, cloquintocet-mexyl, mefenpyr diethyl, N-[(2R)-2,3 dihydroxypropoxy]-3,4-difluoro-2-(2-fluoro-4-iodoanilino) benzamide, anthra (1,9-cd) pyrazol-6 (2H)-one:4 (4-Fluoro phenyl)-2-(4-methylsulfinylphenyl)-5-(4-pyridyl) 1H imidazole, N-benzyl-2-(pyrimidin-4-ylamino)-1,3 thiazole-4-carboxamide, Tiron, dimethylthiourea (DMTU), diphenyleneiodonium (DPI), or any combinations thereof.

30. (canceled)

31. A method of pre-treating a seedling, comprising exposing the seedling to an increased spectrum of light, an increased heat treatment, or a cold-shock treatment, and isolating leaf explants from the exposed seedling for transformation, wherein the transformation frequency of the leaf explants from the pre-treated seedling is higher than the transformation frequency of leaf explants from an unexposed seedling.

32. The method of claim 31, wherein the heat treatment is 45° C. for 3 hours at 70% relative humidity.

33. The method of claim 31, wherein the heat treatment is 37° C. for 17 hours at 50% relative humidity.

34. (canceled)

35. The method of claim 1, wherein the seedling is further contacted with a non-chemical pre-treatment comprising exposing the seedling to an increased spectrum of light, an increased heat treatment, or a cold-shock treatment, and wherein the pre-treatment of the seedling with the at least one chemical compound and the non-chemical pre-treatment occur simultaneously or sequentially, and isolating leaf explants from the exposed seedling for transformation, wherein the transformation frequency of the leaf explants from the pre-treated seedling is higher than the transformation frequency of leaf explants from an unexposed seedling.

36. (canceled)
